United States Patent Application Publication US 2007/0054278 A1 - sequence listing, part 4

SEQ ID NO: 3363 - DNA, 987 bp, Homo sapiens
gaactactagccgacgaattccagcttcggcggcggcagggcgaggccttctggataacagagttcacgcactgaggttgctgttggatccgagggggttagactacaactcccagggggaaacgggcgggaccgcctcctggcacgatgggagatgtagttcgttctgcccccacttttcgctagcccgggctcgccagggactctcagaatcgcagagtygtcatctstgctgttgctaaactggatgcctcattccaatttacgacgtcactgaaccgaaacgcgggagcaaccctgagcctttccggaacccagtgggggggggggggggggtggagccagacagtgacccggaagtagaagtggcccttgcaggcaagagtgctggagggcggcagcggcgaccggagcggtaggagcagcaatttatccgtgtgcagccccaaactggaaagaagatgctaattaaagtgaagacgctgaccggaaaggagattgagattgacattgaacctacagacaaggtggagcgaatcaaggagcgtgtggaggagaaagagggaatccccccacaacagcagaggctcatctacagtggcaagcagatgaatgatgagaagacagcagctgattacaagattttaggtggttcagtccttcacctggtgttggctctgagaggaggaggtggtcttaggcagtgatggaccctccattttacctctttaccctgtcgctcataatgaggcatcatatatcctctcactctytgggacaccatagmcactgccccctcccctggatgcccagtaatgtatgtctactggtgggagactgtgaggatcccaggattcagtattcctggcccagagggcccttgctggctactggrtgttagtttgcagtcctgtgtgcttccctctcttatgactgtgtccctggttgtcaataaaatatttcctggcctcctggaatctttcttct

SEQ ID NO: 3364 - DNA, 880 bp, Homo sapiens
tgagccgcgggcggagagtctgaggcgtggcccttcgagccagctccgccccgttgttcctggcttgagtagggcagagagcaccgcccagcagccagygggttcccgcgcgtgccgagactctgaggccttgcacccccacgatcccgtacgatggccgtcaagaagatcgcgatcttcggcgccactggccagaccgggctcaccaccctggcgcaggcggtgcaagcaggttacgaagtgacagtgctggtgcgggactcctccaggctgccatcagaggggccccggccggcccacgtggtagtgggagatgttctgcaggcagccgatgtggacaagaccgtggctgggcaggacrctgtcatcgtgytgctgggcacccgcaatgacctcagtcccacgacagtgatgtccgagggcgcccggaacattgtggcagccatgaaggctcatggtgtggacaaggtcgtggcctgcacctcggctttcctgctctgggaccctaccaaggtgcccccacractgcaggctgtgactgatgaccacatccggatgcacamggtgctgcgggaatcaggcctgaagtacgtggctgtgatgccgccacacataggagaccagccactaactggggcgtacacagtgaccctggatggacgagggccctcaagggtcatctccaaacatgacctgggccatttcatgctgcgctgcctcaccaccgatgagtacgacggacacagcacctacccctcccaccagtaccagtagcactctgtccccatctgggagggtrgcattytgggacatgaggagcaaaggaagggggcaataaatgttgagccaagagcttcaaattactctagagaaaccgact

SEQ ID NO: 3365 - DNA, 742 bp, Homo sapiens
atggccgtcaagaagatcgcgatcttcggcgccactggccagaccgggctcaccaccctggcgcaggcggctctctgctcctctttgcccacaggttacgaagtgacagtgctggtgcgggactcctccaggctgccatcagaggggccccggccggcccacgtggtagtgggagatgttctgcaggcagccgatgtggacaagaccgtggctgggcaggacrctgtcatcgtgytgctgggcacccgcaatgacctcagtcccacgacagtgatgtccgagggcgcccggaacattgtggcagccatgaaggctcatggtgtggacaaggtcgtggcctgcacctcggctttcctgctctgggaccctaccaaggtgcccccacractgcaggctgtgactgatgaccacatccggatgcacamggtgctgcgggaatcaggcctgaagtacgtggctgtgatgccgccacacataggagaccagccactaactggggcgtacacagtgaccctggatggacgagggccctcaagggtcatctccaaacatgacctgggccatttcatgctgcgctgcctcaccaccgatgagtacgacggacacagcacctacccctcccaccagtaccagtagcactctgtccccatctgggagggtrgcattytgggacatgaggagcaaaggaagggggcaataaatgttgagccaagagcttcaaattactctagagaaaccgact

SEQ ID NO: 3366 - DNA, 1827 bp, Homo sapiens
tgggacaaggttaaagatcgttttatccttgctgtaaaagctgatctgcctgtagctgccacagcctccagcggtggctacagttgaaaccctcacaccacgcaggaagaggtcatcatcatgtcrgacgatttcttatggtttgaaggcatagctttccctactatgggtttcagatccgaaaccttaagaaaagtacgtgatgagttygtgataagggatgaagatgtaataatattgacttaccccaaatcaggaacaaactggttggctgagattctctgcctgatgcactccaagggggatsccaagtggatccaatctgtgcccatctgggagcgatcaccctgggtagagagtgagattgggtatacagcactcagtgaaacggagagtccacgtttattctcctcccacctccccatccagttattccccaagtctttcttcagttccaaggccaaggtgatttatctcatgagaaatcccagagatgttttggtgtctggttattttttctggaaaaacatgaagtttattaagaaaccaaagtcatgggaagaatattttgaatggttttgtcaaggaactgtgctatatgggtcatggtttgaccacattcatggctggatgcccatgagagaggagaaaaacttcctgttactgagttatgaggagctgaaacaggacacaggaagaaccatagagaagatctgtcaattcctgggaaagacgttagaacccgaagaactgaacttaattctcaagaacagctcctttcagagcatgaaagaaaacaagatgtccaattattccctcctgagtgttgattatgtagtggacaaagcacaacttctgagaaaaggtgtatctggggactggaaaaatcacttcacagtgrcccaagctgaagactttgataaattgttccaagagaagatggcagatcttcctcgagagctgttcccatgggaataacgtccaaaacactctggatcttatatggagaatgacattgattctcctgtccttgtacatgtaccygactggggtcattgtgtaagacttattattttatcctgaaaccttaaatatcaaacctctgcatctctgatcccttccttgttaaaagttaccasggttggccaggcrcggtggttcatgcctgtaatcccagcactatgggaggccgagacgggcggatcacgaggtcaggagactgagaccatcctggctaacacggtgaaaccccatctctactaaaaatacaaaaamcaaaaaaaattagccaggcgcattggctcatgtctgtaatcccagcactttgggaggtcgggggggtgggggaggatcacggggtcaggagatcgagaccatcctggccaacatgatgaaaccctatctctactaaaaatacaaaaattagccgggcatggtggtgcacgcctatagtcccagctactcgggrggctgaggtaggagaatcrtttgaactcaggaggcagaggttgcaatgagccaagatcgcgccactgcactccagcstgggtgacagagcgagaccgtctcaaaaagaaagaagtgactagggttcagagaaccagggttcaaagcccagggatgcaaaggttgcagtgagttgagtcatgggatcccagacttttttaaatgtttgcaatgtttcccgtttacagaatgctacaagaataatgtacgtactacctaaaaggatgtctaaatgtttgttaataaaaataagaaatagctacagtgacagattttagagcaaaaattagtaataaaaataagaaataaaattacaggagc

SEQ ID NO: 3367 - DNA, 1700 bp, Homo sapiens
tgggacaaggttaaagatcgttttatccttgctgtaaaagctgatctgcctgtagctgccacagcctccagcggtggctacagttgaaaccctcacaccacgcaggaagaggtcatcatcatgtcrgacgatttcttatggtttgaaggcatagctttccctactatgggtttcagatccgaaaccttaagaaaagtacgtgatgagttygtgataagggatgaagatgtaataatattgacttaccccaaatcaggaacaaactggttggctgagattctctgcctgatgcactccaagggggatsccaagtggatccaatctgtgcccatctgggagcgatcaccctgggtagagagtgagattgggtatacagcactcagtgaaacggagagtccacgtttattctcctcccacctccccatccagttattccccaagtctttcttcagttccaaggccaagtgctatatgggtcatggtttgaccacattcatggctggatgcccatgagagaggagaaaaacttcctgttactgagttatgaggagctgaaacaggacacaggaagaaccatagagaagatctgtcaattcctgggaaagacgttagaacccgaagaactgaacttaattctcaagaacagctcctttcagagcatgaaagaaaacaagatgtccaattattccctcctgagtgttgattatgtagtggacaaagcacaacttctgagaaaaggtgtatctggggactggaaaaatcacttcacagtgrcccaagctgaagactttgataaattgttccaagagaagatggcagatcttcctcgagagctgttcccatgggaataacgtccaaaacactctggatcttatatggagaatgacattgattctcctgtccttgtacatgtaccygactggggtcattgtgtaagacttattattttatcctgaaaccttaaatatcaaacctctgcatctctgatcccttccttgttaaaagttaccasggttggccaggcrcggtggttcatgcctgtaatcccagcactatgggaggccgagacgggcggatcacgaggtcaggagactgagaccatcctggctaacacggtgaaaccccatctctactaaaaatacaaaaamcaaaaaaaattagccaggcgcattggctcatgtctgtaatcccagcactttgggaggtcgggggggtgggggaggatcacggggtcaggagatcgagaccatcctggccaacatgatgaaaccctatctctactaaaaatacaaaaattagccgggcatggtggtgcacgcctatagtcccagctactcgggrggctgaggtaggagaatcrtttgaactcaggaggcagaggttgcaatgagccaagatcgcgccactgcactccagcstgggtgacagagcgagaccgtctcaaaaagaaagaagtgactagggttcagagaaccagggttcaaagcccagggatgcaaaggttgcagtgagttgagtcatgggatcccagacttttttaaatgtttgcaatgtttcccgtttacagaatgctacaagaataatgtacgtactacctaaaaggatgtctaaatgtttgttaataaaaataagaaatagctacagtgacagattttagagcaaaaattagtaataaaaataagaaataaaattacaggagc

SEQ ID NO: 3368 - DNA, 1911 bp, Homo sapiens
agcagatatggggtctttaagggtcaggggcatccctgcaccggggcatggagccgaaggctggatttcattcccctcttgaactgtgaagaatgtattgtgggaggggcaggcagaagtccatgcccagaggcccccagaagcatgaggctggggactccggccctgcagaaaaccccagaacaatgatgtctgtcctcagcggggccatgtggagtgccacctcgaggagtgccaggccctctcctgcccccatggctgggcgaaggtgccccaggctgacagctgctgtgagcgatgccaagctcccacccagtcctgcgtgcaccagggccgtgaggtggcctctggagagcgctggactgtggacacctgcaccagctgctcctgcatggcgggcaccgtgcgttgccagagccagcgctgctcaccgctctcgtgtggccccgacaaggcccctgccctgagtcctggcagctgctgcccccgctgcctgcctcggcccgcttcctgcatggccttcggagacccccattaccgcaccttcgacggccgcctgctgcacttccagggcagttgcagctatgtgctggccaaggactgccacagcggggacttcagtgtgcacgtgaccaatgatgaccggggccggagcggtgtggcctggacccaggaggtggcggtgctgctgggagacatggccgtgcggctgctgcaggacggggcagtcacggtggatgggcacccggtggccttgcccttcctgcaggagccgctgctgtatgtggagctgcgaggacacactgtgatcctgcacgcccagcccgggctccaggtgctgtgggatgggcagtcccaggtggaggtgagcgtacctggctcctaccagggccggacttgtgggctctgtgggaacttcaatggctttgcccaggacgatctgcagggccctgaggggctgctcctgccctcggaggctgcgtttgggaatagctggcaggtgcaagagggccgcgggtrtcccccagggctggagctgccccctgtactgctgcagatggagtggagccggcgggcccaggagcagctcctgtgggacttggaactgctgactggtgtggagctgggcctcttctggccaccccaggcccagtttttcggtccgaggggccaggcccagcaagcatggagccagtgctgtcagccaggtggtagcacaggtggggaccctgagcagccgatactgaaggccagctgtgatggctcacgcctgtaatcccagcactttgggaggccgaggcaggtggattgcttgaacccaggagtttgagaccagaatgggccacatagaaattgggatggcggttcttgttaagctcccctatgmcgcccagcaggaaaccagtcaccgtgtcctcgtctccgatcactgcgrtgagcttacccctccccgccatccctgcagccgggcagagmtcaccctagagcaccagaagccactgaaaccccgcctccgccgtacggcgccccgtcggcctcaacccccacccttcgagcatgcgcagtcctcccagccgcattccgggacatgcgcattaacagcaacacggcctccatgtgaatacgcctgcgccgtaaagacaggcccgaaccaggggactacgattcccagaagaccgcgcggcaccacgtccttcgcgggcattcattcgttcattcactcgttccttggttcattcgttcaacaagcgctttggacctgacgctgttagacgccgagaccccagagaagagacgcagttactcatctcaagggcagggtctgggtctttatcgtgtatgtatgtgtgtaactatgacacatagttaacaagtaacacacgtttgttcagttaaaggamtgcaaaagtt

SEQ ID NO: 3369 - DNA, 1836 bp, Homo sapiens
ggaatgaggagctgcccctcccgccccggccccgagcgcacactcgacgaaacccacacgggaccacaagagtcagaccgggcggactggtccgagaccaggagtaaggggacaggagcgaggactgatgccactgtagaaggcgaggtctctagacccctctcacctgtggggtgcacaggtgcctgcaaccaggatggtaacccagaccaggcagaagcaagctaagagaaaacgttgggtccckgggcctggcctcgccctcccagttggaggctaacggtgcggaggttccctccagcactcgctccttacagccctccccacctagcccagcccagcccagcccagcccagctgaatttgctcttgggtctttaaggggcgggaactgccaccaacgcgcatggctgcgtcattaacttgcgcctctggcytgcgcctccacgtggatttggtagagaaaccccggactgggatcatggcagccgagactcggaacgtggccggagcagaggccccaccgccccagaagcgctactaccggcaacgtgctcactccaaccccatggcggaccacacgctgcgctaccctgtgaagccagaggagatggactggtctgagctatacccagagttcttcgctccactcactcaaaatcagagccacgatgacccaaaggataagaaagaaaagagagctcaggcccaagtggagtttgcagacataggctgtggctatggtggcctgttagtggaactgtcaccgctgttcccagacacacttattctgggtctggagatccgggtgaaggtctcagactatgtacaagaccggattcgggccctacgcgcagctcctgcaggtggcttccagaacatygcctgtctccgtagcaatgccatgaagcaccttcctaacttcttctacaagggccagctgacaaagatgttcttcctcttccccgacccacatttcaagcggacaaagcacaagtggcgaatcatcagtcccaccctgctagcagaatatgcctacgtgctaagagttggggggctggtgtataccataaccgatgtgctggagctacacgactggatgtgcactcatttcgaagagcacccactgtttgagcgtgtgcctctggaggacctgagtgaagaccccgttgtgggacatctaggcacctcaactgaggaggggaagaaagttctacgtaatggagggaagaatttcccagccatcttccgaagaatacaagatcccgtcctccaggcagtgacctcccaaaccagcctgcctggtcactgactgcttactctaccttagctggacctcgtctcccagggaytagagaaaagagcaggagtcctgggtcttcccagttgagactgctggagctgagacacagtactctcttaaagaaggtggggagctgcccagggcagaacccactggtgttcatgactacccctggctcctctcaccttgtccctccactgccaacagaaaacaaagcagctgactgagatggtcaaaggactttggaccataggggatctttggaaggctgtggggtcttgctcttccttagcactcctttctccttgtgagatctctcctcagctggaatgaggaatgtagtccatctaaactgcttgctaggctcaattaccacttctgtttgctttgtggatcctgggataacatgtatatgtgtacacatgcctattctgccatttctcaggaaagggtggagtatgtatcatatgccttctaccatcctcctgtcctctccctgcgtaagacttgacctggggaatctgtgttccctaa

SEQ ID NO: 3370 - DNA, 1530 bp, Homo sapiens
ggcytgcgcctccacgtggatttggtagagaaaccccggactgggatcatggcagccgagactcggaacgtggccggagcagaggccccaccgccccagaagcgctactaccggcaacgtgctcactccaaccccatggcggaccacacgctgcgctaagcacaaacacaaagtaggatcccagtgcattaggcagccagtctcgggagaaggggaacttgtgccccagaaagggcagttacccggccagggtcacatcaaccgccagaagtggagttgggcagccctgtgaagccagaggagatggactggtctgagctatacccagagttcttcgctccactcactcaaaatcagagccacgatgacccaaaggataagaaagaaaagagagctcaggcccaagtggagtttgcagacataggctgtggctatggtggcctgttagtggaactgtcaccgctgttcccagacacacttattctgggtctggagatccgggtgaaggtctcagactatgtacaagaccggattcgggccctacgcgcagctcctgcaggtggcttccagaacatygcctgtctccgtagcaatgccatgaagcaccttcctaacttcttctacaagggccagctgacaaagatgttcttcctcttccccgacccacatttcaagcggacaaagcacaagtggcgaatcatcagtcccaccctgctagcagaatatgcctacgtgctaagagttggggggctggtgtataccataaccgatgtgctggagctacacgactggatgtgcactcatttcgaagagcacccactgtttgagcgtgtgcctctggaggacctgagtgaagaccccgttgtgggacatctaggcacctcaactgaggaggggaagaaagttctacgtaatggagggaagaatttcccagccatcttccgaagaatacaagatcccgtcctccaggcagtgacctcccaaaccagcctgcctggtcactgactgcttactctaccttagctggacctcgtctcccagggaytagagaaaagagcaggagtcctgggtcttcccagttgagactgctggagctgagacacagtactctcttaaagaaggtggggagctgcccagggcagaacccactggtgttcatgactacccctggctcctctcaccttgtccctccactgccaacagaaaacaaagcagctgactgagatggtcaaaggactttggaccataggggatctttggaaggctgtggggtcttgctcttccttagcactcctttctccttgtgagatctctcctcagctggaatgaggaatgtagtccatctaaactgcttgctaggctcaattaccacttctgtttgctttgtggatcctgggataacatgtatatgtgtacacatgcctattctgccatttctcaggaaagggtggagtatgtatcatatgccttctaccatcctcctgtcctctccctgcgtaagacttgacctggggaatctgtgttccctaa

SEQ ID NO: 3371 - DNA, 1651 bp, Homo sapiens
ggaatgaggagctgcccctcccgccccggccccgagcgcacactcgacgaaacccacacgggaccacaagagtcagaccgggcggactggtccgagaccaggagtaaggggacaggagcgaggactgatgccactgtagaaggcgaggtctctagacccctctcacctgtggggtgcacaggtgcctgcaaccaggatggtaacccagaccaggcagaagcaagctaagagaaaacgttgggtccckgggcctggcctcgccctcccagttggaggctaacggtgcggaggttccctccagcactcgctccttacagccctccccacctagcccagcccagcccagcccagcccagctgaatttgctcttgggtctttaaggggcgggaactgccaccaacgcgcatggctgcgtcattaacttgcgcctctggcytgcgcctccacgtggatttggtagagaaaccccggactgggatcatggcagccgagactcggaacgtggccggagcagaggccccaccgccccagaagcgctactaccggcaacgtgctcactccaaccccatggcggaccacacgctgcgctaccctgtgaagccagaggagatggactggtctgagctatacccagagttcttcgctccactcactcaaaatcagagccacgatgacccaaaggataagaaagaaaagagagctcaggcccaagtggagtttgcagacataggctgtggctatggtggcctgttagctgacaaagatgttcttcctcttccccgacccacatttcaagcggacaaagcacaagtggcgaatcatcagtcccaccctgctagcagaatatgcctacgtgctaagagttggggggctggtgtataccataaccgatgtgctggagctacacgactggatgtgcactcatttcgaagagcacccactgtttgagcgtgtgcctctggaggacctgagtgaagaccccgttgtgggacatctaggcacctcaactgaggaggggaagaaagttctacgtaatggagggaagaatttcccagccatcttccgaagaatacaagatcccgtcctccaggcagtgacctcccaaaccagcctgcctggtcactgactgcttactctaccttagctggacctcgtctcccagggaytagagaaaagagcaggagtcctgggtcttcccagttgagactgctggagctgagacacagtactctcttaaagaaggtggggagctgcccagggcagaacccactggtgttcatgactacccctggctcctctcaccttgtccctccactgccaacagaaaacaaagcagctgactgagatggtcaaaggactttggaccataggggatctttggaaggctgtggggtcttgctcttccttagcactcctttctccttgtgagatctctcctcagctggaatgaggaatgtagtccatctaaactgcttgctaggctcaattaccacttctgtttgctttgtggatcctgggataacatgtatatgtgtacacatgcctattctgccatttctcaggaaagggtggagtatgtatcatatgccttctaccatcctcctgtcctctccctgcgtaagacttgacctggggaatctgtgttccctaa

SEQ ID NO: 3372 - DNA, 3381 bp, Homo sapiens
ggaatgaggagctgcccctcccgccccggccccgagcgcacactcgacgaaacccacacgggaccacaagagtcagaccgggcggactggtccgagaccaggagtaaggggacaggagcgaggactgatgccactgtagaaggcgaggtctctagacccctctcacctgtggggtgcacaggtgcctgcaaccaggatggtaacccagaccaggcagaagcaagctaagagaaaacgttgggtccckgggcctggcctcgccctcccagttggaggctaacggtgcggaggttccctccagcactcgctccttacagccctccccacctagcccagcccagcccagcccagcccagctgaatttgctcttgggtctttaaggggcgggaactgccaccaacgcgcatggctgcgtcattaacttgcgcctctggcytgcgcctccacgtggatttggtagagaaaccccggactgggatcatggcagccgagactcggaacgtggccggagcagaggccccaccgccccagaagcgctactaccggcaacgtgctcactccaaccccatggcggaccacacgctgcgctaccctgtgaagccagaggagatggactggtctgagctatacccagagttcttcgctccactcactcaaaatcagagccacgatgacccaaaggataagaaagaaaagagagctcaggcccaagtggagtttgcagacataggctgtggctatggtggcctgttagctgacaaagatgttcttcctcttccccgacccacatttcaagcggacaaagcacaagtggcgaatcatcagtcccaccctgctagcagaatatgcctacgtgctaagagttggggggctggtgtataccataaccgatgtgctggagctacacgactggatgtgcactcatttcgaagagcacccactgtttgagcgtgtgcctctggaggacctgagtgaagaccccgttgtgggacatctaggcacctcaactgaggaggggaagaaagttctacgtaatggagggaagaatttcccagccatcttccgaagaatacaagatcccgtcctccaggcagtgacctcccaaaccagcctgcctggtcactgactgcttactctaccttagctggacctcgtctcccagggaytagagaaaagagcaggagtcctgggtcttcccagttgagactgctggagctgagacacagtactctcttaaagaaggtgcagggcgccgcgcacttcgggccggtgtggctagccagctttgggacagtgcgcaccgtgtacgtggctgcccctgcactcgtcgaggagctgctgcgacaggagggaccccggcccgagcrctgcagcttctcgccctggacggagcaccgccgctgccgccagcgggcttgcgractgctcactrcggaaggcgaagaatggcaaaggctccgcagtctcctggcccygctcctcctccggcctcaagcggccgcccgctacgccggaaccctgaacaacgtagtctgcraccttgtgcggcgtctgaggcgccagcggggacgtggcacggggccgcccgccctggttcgggacgtggcgggggrattttacaagttcggactggaaggcatcgccgcggttctgctcggctcgcgcttgggctgcctggaggctcaagtgccacccgacacggagaccttcatccgcgctgtgggctcggtgtttgtrtccacgctgttgaccatggcgatgccccactggctgcgccaccttgtgcctgggccctggggccgcctctgccgagactgggaccagatgtttgcatttgctcagaggcacgtggagcggcgagaggcagaggcagccatgaggaacggaggacagcccgagaaggacctggagtctggggcgcacctgacccacttcctgttccgggaagagttgcctgcccagtccatcctgggaaatgtgacagagttrctattggcgggagtggacasggtgtmcaacacgctctcttgggctctgtatgagctctcccsgcaccccgaagtccagacagcaytccactcagagatcacagctgccctgagccctggctccagtgcctacccctcagccactgttctgtcccagctgcccctgctgaaggcggtggtcaaggaagtgctaagactgtacyctgtggtacctggaaattctcgtgtcccagacaaagacattcatgtgggtgactatattatccccaaaaatacgctggtcaytctgtgtcactatgccacttcaagggaccctgcccagttcccagagccaaattcttttcstccagctcgctggctgggggagggtcccaccccccacccatttgcatctcttccctttggctttggcaagygcagctgtatggggagacgcctggcagagcttgaattgcaaatggctttggcccagatcctaacacattttgaggkgcagcctgagccaggtgcggccccagttagacccaagacccggactgtcctggtacstgaaaggagcatcaacctacagtttttggacagatagtcccatggaaagagactgtcatcatcaccctttcattcatcatagggataagattttttgtaggcacaagaccaaggtatacatcttcccctaatgcctatctgaccaaactggatagaaccaccatagtgaagtgtgaggcggccctgaccaatgtgtgaagtatgcacttggcctgactcaggaagccaggtgagaaaaccatggtctctctgcttgcttggcccttctgatcatgtatgcatcccccaaggatgaaatcagattttaactaataatgctggatggcctgaggaaagattcaactgcctctctttttgggctttcatagtgttcattgatgctgctggctaagcatttatcaaagcataagctcagtaactgtgcatctggtctgtacctggttggtccttcrtctttgcatgtaagctctttgagaggaagggtgaagccttatttgttttttatgtcccctgccagggcctgtctctgactaggtgtcaccatacacattcttagattgaatctgaaccatgtggcagaagggataagcagcttacttagtaggctctgtctacccccttccttctttgtcttgcccctaggaaggtgaatctgccctagcctggtttacggtttcttataactctcctttgctctctggccactattaagtgggtttgccccatcacttagttctcaggcagagacatctttgggcctgtccctgcccaggcctctggctttttatattgaaaatttttaaatattcacaaattttagaataaatcaaatattccattcttg

SEQ ID NO: 3373 - DNA, 3566 bp, Homo sapiens
ggaatgaggagctgcccctcccgccccggccccgagcgcacactcgacgaaacccacacgggaccacaagagtcagaccgggcggactggtccgagaccaggagtaaggggacaggagcgaggactgatgccactgtagaaggcgaggtctctagacccctctcacctgtggggtgcacaggtgcctgcaaccaggatggtaacccagaccaggcagaagcaagctaagagaaaacgttgggtccckgggcctggcctcgccctcccagttggaggctaacggtgcggaggttccctccagcactcgctccttacagccctccccacctagcccagcccagcccagcccagcccagctgaatttgctcttgggtctttaaggggcgggaactgccaccaacgcgcatggctgcgtcattaacttgcgcctctggcytgcgcctccacgtggatttggtagagaaaccccggactgggatcatggcagccgagactcggaacgtggccggagcagaggccccaccgccccagaagcgctactaccggcaacgtgctcactccaaccccatggcggaccacacgctgcgctaccctgtgaagccagaggagatggactggtctgagctatacccagagttcttcgctccactcactcaaaatcagagccacgatgacccaaaggataagaaagaaaagagagctcaggcccaagtggagtttgcagacataggctgtggctatggtggcctgttagtggaactgtcaccgctgttcccagacacacttattctgggtctggagatccgggtgaaggtctcagactatgtacaagaccggattcgggccctacgcgcagctcctgcaggtggcttccagaacatygcctgtctccgtagcaatgccatgaagcaccttcctaacttcttctacaagggccagctgacaaagatgttcttcctcttccccgacccacatttcaagcggacaaagcacaagtggcgaatcatcagtcccaccctgctagcagaatatgcctacgtgctaagagttggggggctggtgtataccataaccgatgtgctggagctacacgactggatgtgcactcatttcgaagagcacccactgtttgagcgtgtgcctctggaggacctgagtgaagaccccgttgtgggacatctaggcacctcaactgaggaggggaagaaagttctacgtaatggagggaagaatttcccagccatcttccgaagaatacaagatcccgtcctccaggcagtgacctcccaaaccagcctgcctggtcactgactgcttactctaccttagctggacctcgtctcccagggaytagagaaaagagcaggagtcctgggtcttcccagttgagactgctggagctgagacacagtactctcttaaagaaggtgcagggcgccgcgcacttcgggccggtgtggctagccagctttgggacagtgcgcaccgtgtacgtggctgcccctgcactcgtcgaggagctgctgcgacaggagggaccccggcccgagcrctgcagcttctcgccctggacggagcaccgccgctgccgccagcgggcttgcgractgctcactrcggaaggcgaagaatggcaaaggctccgcagtctcctggcccygctcctcctccggcctcaagcggccgcccgctacgccggaaccctgaacaacgtagtctgcraccttgtgcggcgtctgaggcgccagcggggacgtggcacggggccgcccgccctggttcgggacgtggcgggggrattttacaagttcggactggaaggcatcgccgcggttctgctcggctcgcgcttgggctgcctggaggctcaagtgccacccgacacggagaccttcatccgcgctgtgggctcggtgtttgtrtccacgctgttgaccatggcgatgccccactggctgcgccaccttgtgcctgggccctggggccgcctctgccgagactgggaccagatgtttgcatttgctcagaggcacgtggagcggcgagaggcagaggcagccatgaggaacggaggacagcccgagaaggacctggagtctggggcgcacctgacccacttcctgttccgggaagagttgcctgcccagtccatcctgggaaatgtgacagagttrctattggcgggagtggacasggtgtmcaacacgctctcttgggctctgtatgagctctcccsgcaccccgaagtccagacagcaytccactcagagatcacagctgccctgagccctggctccagtgcctacccctcagccactgttctgtcccagctgcccctgctgaaggcggtggtcaaggaagtgctaagactgtacyctgtggtacctggaaattctcgtgtcccagacaaagacattcatgtgggtgactatattatccccaaaaatacgctggtcaytctgtgtcactatgccacttcaagggaccctgcccagttcccagagccaaattcttttcstccagctcgctggctgggggagggtcccaccccccacccatttgcatctcttccctttggctttggcaagygcagctgtatggggagacgcctggcagagcttgaattgcaaatggctttggcccagatcctaacacattttgaggkgcagcctgagccaggtgcggccccagttagacccaagacccggactgtcctggtacstgaaaggagcatcaacctacagtttttggacagatagtcccatggaaagagactgtcatcatcaccctttcattcatcatagggataagattttttgtaggcacaagaccaaggtatacatcttcccctaatgcctatctgaccaaactggatagaaccaccatagtgaagtgtgaggcggccctgaccaatgtgtgaagtatgcacttggcctgactcaggaagccaggtgagaaaaccatggtctctctgcttgcttggcccttctgatcatgtatgcatcccccaaggatgaaatcagattttaactaataatgctggatggcctgaggaaagattcaactgcctctctttttgggctttcatagtgttcattgatgctgctggctaagcatttatcaaagcataagctcagtaactgtgcatctggtctgtacctggttggtccttcrtctttgcatgtaagctctttgagaggaagggtgaagccttatttgttttttatgtcccctgccagggcctgtctctgactaggtgtcaccatacacattcttagattgaatctgaaccatgtggcagaagggataagcagcttacttagtaggctctgtctacccccttccttctttgtcttgcccctaggaaggtgaatctgccctagcctggtttacggtttcttataactctcctttgctctctggccactattaagtgggtttgccccatcacttagttctcaggcagagacatctttgggcctgtccctgcccaggcctctggctttttatattgaaaatttttaaatattcacaaattttagaataaatcaaatattccattcttg

SEQ ID NO: 3374 - DNA, 2455 bp, Homo sapiens
aggagggattggctgaggagcttggagagggggcgtcatcacctcacccaaaggttaaataggggttgagatatgatgctcaggagaagcgctttctttcgcgagcaccctgaaccagaccatgacccagaccctcaagtacgcctccagagtgttccatcgcgtccgctgggcgcccgagttgggcgcctccctaggctaccgagagtaccactcagcacgccggagcttggcagacatcccaggcccctctacgcccagctttctggccgaacttttctgcaagggggggctgtcgaggctacacgagctgcaggtgcagggcgccgcgcacttcgggccggtgtggctagccagctttgggacagtgcgcaccgtgtacgtggctgcccctgcactcgtcgaggagctgctgcgacaggagggaccccggcccgagcrctgcagcttctcgccctggacggagcaccgccgctgccgccagcgggcttgcgractgctcactrcggaaggcgaagaatggcaaaggctccgcagtctcctggcccygctcctcctccggcctcaagcggccgcccgctacgccggaaccctgaacaacgtagtctgcraccttgtgcggcgtctgaggcgccagcggggacgtggcacggggccgcccgccctggttcgggacgtggcgggggrattttacaagttcggactggaaggcatcgccgcggttctgctcggctcgcgcttgggctgcctggaggctcaagtgccacccgacacggagaccttcatccgcgctgtgggctcggtgtttgtrtccacgctgttgaccatggcgatgccccactggctgcgccaccttgtgcctgggccctggggccgcctctgccgagactgggaccagatgtttgcatttgctcagaggcacgtggagcggcgagaggcagaggcagccatgaggaacggaggacagcccgagaaggacctggagtctggggcgcacctgacccacttcctgttccgggaagagttgcctgcccagtccatcctgggaaatgtgacagagttrctattggcgggagtggacasggtgtmcaacacgctctcttgggctctgtatgagctctcccsgcaccccgaagtccagacagcaytccactcagagatcacagctgccctgagccctggctccagtgcctacccctcagccactgttctgtcccagctgcccctgctgaaggcggtggtcaaggaagtgctaagactgtacyctgtggtacctggaaattctcgtgtcccagacaaagacattcatgtgggtgactatattatccccaaaaatacgctggtcaytctgtgtcactatgccacttcaagggaccctgcccagttcccagagccaaattcttttcstccagctcgctggctgggggagggtcccaccccccacccatttgcatctcttccctttggctttggcaagygcagctgtatggggagacgcctggcagagcttgaattgcaaatggctttggcccagatcctaacacattttgaggkgcagcctgagccaggtgcggccccagttagacccaagacccggactgtcctggtacstgaaaggagcatcaacctacagtttttggacagatagtcccatggaaagagactgtcatcatcaccctttcattcatcatagggataagattttttgtaggcacaagaccaaggtatacatcttcccctaatgcctatctgaccaaactggatagaaccaccatagtgaagtgtgaggcggccctgaccaatgtgtgaagtatgcacttggcctgactcaggaagccaggtgagaaaaccatggtctctctgcttgcttggcccttctgatcatgtatgcatcccccaaggatgaaatcagattttaactaataatgctggatggcctgaggaaagattcaactgcctctctttttgggctttcatagtgttcattgatgctgctggctaagcatttatcaaagcataagctcagtaactgtgcatctggtctgtacctggttggtccttcrtctttgcatgtaagctctttgagaggaagggtgaagccttatttgttttttatgtcccctgccagggcctgtctctgactaggtgtcaccatacacattcttagattgaatctgaaccatgtggcagaagggataagcagcttacttagtaggctctgtctacccccttccttctttgtcttgcccctaggaaggtgaatctgccctagcctggtttacggtttcttataactctcctttgctctctggccactattaagtgggtttgccccatcacttagttctcaggcagagacatctttgggcctgtccctgcccaggcctctggctttttatattgaaaatttttaaatattcacaaattttagaataaatcaaatattccattcttg

SEQ ID NO: 3375 - DNA, 288 bp, Homo sapiens
atgaaaagccatccytctagagctcagctcaccagagtgtcagcttcagcctcccagcagaggctgaaccaggaacagccccaagagatgaggggaagagaatgctctgggtgtaggggagtggtgcggagtcctggagagggaattgaaggtcagccaaagagcaagccagtctggaaacctaaaggactctgtccaagtgtacaggaaccaggtggaattgctgagagtcckttttctggggaggcttacaggccactacgtaagacttgttctgtcgcttctctt

SEQ ID NO: 3376 - DNA, 1069 bp, Homo sapiens
tctaaggatcatgtctgcgagccaggattcctgatccagagacaayggccccratgggatggagcccaaaggtgtcattgagagtaactggaatgagattgttgacagctttgatgacatgaacctctcagagtcccttctccgtggcatctaygcctatggtttagagaagccgtctgccatccagcagcgagccattctaccttgtatcaaggrttatcacgtgattgctcaagcccaatctggggctgggaaaatggccacatttgccatattgattctgcagcagattgaattagatctaaaagccacccaggccttgctcctagcacccactcaagaattggctcagcagatacagaaggtggtcatggcactaggagactacatgggtgcctcctgtcatgcctgtatcaggggcaccaacatgcgtgctgaggtgcagaaactgcagacgaagctcctcacatcattgtgggtacccctggccatgtgtttgatatgcttaacgggagatacctgtctcccaaatacatcaagatgtttgtactggacgaagctgacgaaatgttaagccgtggattcaaggaccagatctatgacatattccaaaagctcaacagcaacacccaggtagttttgctgtcagctgcgatgccttctgatgtgcttgaggtgaccaagaagttcatgagggggaagctggacacactatgtgacttgtatgaaaccctgaccatcaccccaggcagtcatcttcatcaacacccggaggaaggtggactggctcaccgagaagatgcatgctcgagatttcactgtcttcaccattcgtggagatatggaccaaaacgaacragacgtgatcttgagggagtttctcaccaactatgaccttcccaccaacagggaaaaccatatccatagaatcggtcgaggtggacggtttggccgtaaaggtgtggctattaacgtggtgacagaagaagacaagaggactcttcgagacatcgagatcttctacaactcctccattgaggaaatgcccctcaatgttgctgacctcatc

SEQ ID NO: 3377 - DNA, 1384 bp, Homo sapiens
ctagagtttctaaggatcatgtctgcgagccaggattcctgatccagagacaayggccccratgggatggagcccaaaggtgtcattgagagtaactggaatgagattgttgacagctttgatgacatgaacctctcagagtcccttctccgtggcatctaygcctatggtttagagaagccgtctgccatccagcagcgagccattctaccttgtatcaaggrttatcacgtgattgctcaagcccaatctggggctgggaaaatggccacatttgccatattgattctgcagcagattgaattagatctaaaagccacccaggccttgctcctagcacccactcaagaattggctcagcagatacagaaggtggtcatggcactaggagactacatgggtgcctcctgtcatgcctgtatcaggggcaccaacatgcgtgctgaggtgcagaaactgcagacgaagctcctcacatcattgtgggtacccctggccatgtgtttgatatgcttaacgggagatacctgtctcccaaatacatcaagatgtttgtactggacgaagctgacgaaatgttaagccgtggattcaaggaccagatctatgacatattccaaaagctcaacagcaacacccaggtagttttgctgtcagctgcgatgccttctgatgtgcttgaggtgaccaagaagttcatgagggacctcattcggattcttgtcacgaaggaagtgttgaccttggagggtatccgccaattctacatcaatttggaacgagaggagtggaagctggacacactatgtgacttgtatgaaaccctgaccatcaccccaggcagtcatcttcatcaacacccggaggaaggtggactggctcaccgagaagatgcatgctcgagatttcactgtcttcaccattcgtggagatatggaccaaaacgaacragacgtgatcttgagggagtttcgttatggctctagcagttttgattaccactgacctgctggccagaggcattgatgtgcaacaggtttctttagtcaccaactatgaccttcccaccaacagggaaaaccatatccatagaatcggtcgaggtggacggtttggccgtaaaggtgtggctattaacgtggtgacagaagaagacaagaggactcttcgagacatcgagatcttctacaactcctccattgaggaaatgcccctcaatgttgctgacctcatctgaggggctgtcctgccacccagccccagccagggctctatctcggggggctgaggagcagcaggagtggggagggaagggagccaagggatggacatcttgtcatttttttctttgaataaatgtcactttttgaggcaaaaacaaaac

SEQ ID NO: 3378 - DNA, 1171 bp, Homo sapiens
cagccaccgcgacggagcccgcaggcgggaacctgcctccgcgcgttagcgcgcacgcgcgcctcatgtgtcgtccccatcagcgccggcttccgtctataggccagatgcactgtcactctggcgaagtcgcagacccgattggccgggacggaggcgcgagaccgggttgcgggcggggccgaacgtggtataaaaggggcgggaggccaggctcgtgccgttttgcagacgccaccgccgaggaaaaccgtgtrctattagccatggtcaaccccaccgtgttcttcgacattgccgtcgacggcgagcccttgggccgcgtctcctttgagctgtttgcagacaaggtcccaaagacagcagaaaattttcgtgctctgagcactggagagaaaggatttggttataagggttcctgctttcacagaattattccagggtttatgtgtcagggtggwgacttcacacgccataatggcactggtggcaagtccatctatggggagaaatttgagcatgaatattgtggaggccatggagcgctttgggtccaggaatggcaagaccagcaagaagatcaccattgctgactgtggacaactcgaataagtttgacttgtgttttatcttaaccaccagatcattccttctgtagctcaggagagcaccyctccaccccatttgctcgcagtatcctagaatctttgtgctctcgctgcagttccctttgggttccatgttttccttgttccctcccatgcctagctggattgcagagttaagtttatgattatgaaataaaaactaaataacaattgtcctcgtttgagttaagtgttgatgtaggctttattttaagcagtaatgggttacttctgaaacatcacttgtttgcttaattctacacagtacttagattttttttactttccagtcccaggaagtgtcaatgtttgttgagtggaatattgaaaatgtaggcagcaactgggcatggtggctcactgtctgtaatgtattacctgaggcagaagaccacctgagggtaggagtcaagatcagcctgggcaacatagtgagacgctgtctctacaaaaaataattagcctggcctggtggtgcatgcctagtcctagctgatctggaggctgacgtgggaggattgctt

SEQ ID NO: 3379 - DNA, 2211 bp, Homo sapiens
cagccaccgcgacggagcccgcaggcgggaacctgcctccgcgcgttagcgcgcacgcgcgcctcatgtgtcgtccccatcagcgccggcttccgtctataggccagatgcactgtcactctggcgaagtcgcagacccgattggccgggacggaggcgcgagaccgggttgcgggcggggccgaacgtggtataaaaggggcgggaggccaggctcgtgccgttttgcagacgccaccgccgaggaaaaccgtgtrctattagccatggtcaaccccaccgtgttcttcgacattgccgtcgacggcgagcccttgggccgcgtctcctttgagctgtttgcagacaaggtcccaaagacagcagaaaattttcgtgctctgagcactggagagaaaggatttggttataagggttcctgctttcacagaattattccagggtttatgtgtcagggtggwgacttcacacgccataatggcactggtggcaagtccatctatggggagaaatttgaagatgagaacttcatcctaaagcatacgggtcctggcatcttgtccatggcaaatgctggacccaacacaaatggttcccagtttttcatctgcactgccaagactgagtggttggatggcaagcatgtggtgtttggcaaagtgaaagaaggcatgaatattgtggaggccatggagcgctttgggtccaggaatggcaagaccagcaagaagatcaccattgctgactgtggacaactcgaataagtttgacttgtgttttatcttaaccaccagatcattccttctgtagctcaggagagcaccyctccaccccatttgctcgcagtatcctagaatctttgtgctctcgctgcagttccctttgggttccatgttttccttgttccctcccatgcctagctggattgcagagttaagtttatgattatgaaataaaaactaaataacaattgtcctcgtttgagttaagtgttgatgtaggctttattttaagcagtaatgggttacttctgaaacatcacttgtttgcttaattctacacagtacttagattttttttactttccagtcccaggaagtgtcaatgtttgttgagtggaatattgaaaatgtaggcagcaactgggcatggtggctcactgtctgtaatgtattacctgaggcagaagaccacctgagggtaggagtcaagatcagcctgggcaacatagtgagacgctgtctctacaaaaaataattagcctggcctggtggtgcatgcctagtcctagctgatctggaggctgacgtgggaggattgcttgagcctagagtgagctattatcatgccactgtacagcctgggtgttcacagatcttgtgtctcmaaggtaggcagaggcaggaaaagcaaggagccagaattaagaggttgggtcagtctgcagtgagttcatgcatttagaggtgttcttcaagatgactaatgtcaaaaattgagacatctgttgcggttcttttttttttttttttttyccctggaatgcagkggcgtgatctcagctcactgcagcctccgcctcctgggttcaagtgattctagtgcctcagcctcctgagtagctgggataacgggcgtgtgccaccatgcccagctaatttttgtatttttagtatagatggggtttcatcattttgaccaggctggtctcaaactcttgacctcagctgatgcgcctgccttggcctcccaaactgctgagattacagatgtgagccaccgcaccctacctcattttctgtaacaaagctaagcttgaacactgttgatgttcttgagggaagcatattgggctttaggctgtaggtcaagtttatacatcttaattatggtggaattcctatgtagagtctaaaaagccaggtacttggtgctacagtcagtctccctgcagagggttaaggcgcagactacctgcagtgaggaggtactgcttgtagcatatagagcctctccctagctttggttatggaggctttgaggttttgcaaacctgaccaatttaagccataagatctggtcaaagggatacccttcccactaaggacttggtttctcaggaaattatatgtacagtgcttgctggcagttagatgtcaggacartctaagctgagaaaaccccttctctgcccaccttaacagacctcta

SEQ ID NO: 3380 - DNA, 2278 bp, Homo sapiens
cagccaccgcgacggagcccgcaggcgggaacctgcctccgcgcgttagcgcgcacgcgcgcctcatgtgtcgtccccatcagcgccggcttccgtctataggccagatgcactgtcactctggcgaagtcgcagacccgattggccgggacggaggcgcgagaccgggttgcgggcggggccgaacgtggtataaaaggggcgggaggccaggctcgtgccgttttgcagacgccaccgccgaggaaaaccgtgtrctattagccatggtcaaccccaccgtgttcttcgacattgccgtcgacggcgagcccttgggccgcgtctcctttgaggtaaggggcctggataccaagaagtgactgctcatctaatccataaagctatgttaacagattggagctgtttgcagacaaggtcccaaagacagcagaaaattttcgtgctctgagcactggagagaaaggatttggttataagggttcctgctttcacagaattattccagggtttatgtgtcagggtggwgacttcacacgccataatggcactggtggcaagtccatctatggggagaaatttgaagatgagaacttcatcctaaagcatacgggtcctggcatcttgtccatggcaaatgctggacccaacacaaatggttcccagtttttcatctgcactgccaagactgagtggttggatggcaagcatgtggtgtttggcaaagtgaaagaaggcatgaatattgtggaggccatggagcgctttgggtccaggaatggcaagaccagcaagaagatcaccattgctgactgtggacaactcgaataagtttgacttgtgttttatcttaaccaccagatcattccttctgtagctcaggagagcaccyctccaccccatttgctcgcagtatcctagaatctttgtgctctcgctgcagttccctttgggttccatgttttccttgttccctcccatgcctagctggattgcagagttaagtttatgattatgaaataaaaactaaataacaattgtcctcgtttgagttaagtgttgatgtaggctttattttaagcagtaatgggttacttctgaaacatcacttgtttgcttaattctacacagtacttagattttttttactttccagtcccaggaagtgtcaatgtttgttgagtggaatattgaaaatgtaggcagcaactgggcatggtggctcactgtctgtaatgtattacctgaggcagaagaccacctgagggtaggagtcaagatcagcctgggcaacatagtgagacgctgtctctacaaaaaataattagcctggcctggtggtgcatgcctagtcctagctgatctggaggctgacgtgggaggattgcttgagcctagagtgagctattatcatgccactgtacagcctgggtgttcacagatcttgtgtctcmaaggtaggcagaggcaggaaaagcaaggagccagaattaagaggttgggtcagtctgcagtgagttcatgcatttagaggtgttcttcaagatgactaatgtcaaaaattgagacatctgttgcggttcttttttttttttttttttyccctggaatgcagkggcgtgatctcagctcactgcagcctccgcctcctgggttcaagtgattctagtgcctcagcctcctgagtagctgggataacgggcgtgtgccaccatgcccagctaatttttgtatttttagtatagatggggtttcatcattttgaccaggctggtctcaaactcttgacctcagctgatgcgcctgccttggcctcccaaactgctgagattacagatgtgagccaccgcaccctacctcattttctgtaacaaagctaagcttgaacactgttgatgttcttgagggaagcatattgggctttaggctgtaggtcaagtttatacatcttaattatggtggaattcctatgtagagtctaaaaagccaggtacttggtgctacagtcagtctccctgcagagggttaaggcgcagactacctgcagtgaggaggtactgcttgtagcatatagagcctctccctagctttggttatggaggctttgaggttttgcaaacctgaccaatttaagccataagatctggtcaaagggatacccttcccactaaggacttggtttctcaggaaattatatgtacagtgcttgctggcagttagatgtcaggacartctaagctgagaaaaccccttctctgcccaccttaacagacctcta

SEQ ID NO: 3381 - DNA, 1956 bp, Homo sapiens
cagccaccgcgacggagcccgcaggcgggaacctgcctccgcgcgttagcgcgcacgcgcgcctcatgtgtcgtccccatcagcgccggcttccgtctataggccagatgcactgtcactctggcgaagtcgcagacccgattggccgggacggaggcgcgagaccgggttgcgggcggggccgaacgtggtataaaaggggcgggaggccaggctcgtgccgttttgcagacgccaccgccgaggaaaaccgtgtrctattagccatggtcaaccccaccgtgttcttcgacattgccgtcgacggcgagcccttgggccgcgtctcctttgagctgtttgcagacaaggtcccaaagacagcagaaaattttcgtgctctgagcactggagagaaaggatttggttataagggttcctgctttcacagaattattccagggtttatgtgtcagggtggwgacttcacacgccataatggcactggtggcaagtccatctatggggagaaatttgaagatgagaacttcatcctaaagcatacgggtcctggcatcttgtccatggcaaatgctggacccaacacaaatggttcccagtttttcatctgcactgccaagactgagtggttggatggcaagcatgtggtgtttggcaaagtgaaagaaggcatgaatattgtggaggccatggagcgctttgggtccaggaatggcaagaccagcaagaagatcaccattgctgactgtggacaactcgaataagtttgacttgtgttttatcttaaccaccagatcattccttctgtagctcaggagagcaccyctccaccccatttgctcgcagtatcctagaatctttgtgctctcgctgcagttccctttgggttccatgttttccttgttccctcccatgcctagctggattgcagagttaagtttatgattatgaaataaaaactaaataacaattgtcctcgtttgagttaagtgttgatgtaggctttattttaagcagtaatgggttacttctgaaacatcacttgtttgcttaattctacacagtacttagattttttttactttccagtcccaggaagtgtcaatgtttgttgagtggaatattgaaaatgtaggcagcaactgggcatggtaatttttgtatttttagtatagatggggtttcatcattttgaccaggctggtctcaaactcttgacctcagctgatgcgcctgccttggcctcccaaactgctgagattacagatgtgagccaccgcaccctacctcattttctgtaacaaagctaagcttgaacactgttgatgttcttgagggaagcatattgggctttaggctgtaggtcaagtttatacatcttaattatggtggaattcctatgtagagtctaaaaagccaggtacttggtgctacagtcagtctccctgcagagggttaaggcgcagactacctgcagtgaggaggtactgcttgtagcatatagagcctctccctagctttggttatggaggctttgaggttttgcaaacctgaccaatttaagccataagatctggtcaaagggatacccttcccactaaggacttggtttctcaggaaattatatgtacagtgcttgctggcagttagatgtcaggacartctaagctgagaaaaccccttctctgcccaccttaacagacctctagggttcttaacccagcaatcaagtttgcctatcctagaggtggcggatttgatcatttggtgtgttgggcaatttttkttttactgtctggttccttctgcgtgaattaccaccaccaccacttgtgcatctcagtcttgtgtgttgtctggttacgtattccctgggtgataccattcaatgtcttaatgtacttgtggctcagacctgagtgcaaggtggaaataaacatcaaacatcttttcatt

SEQ ID NO: 3382 - DNA, 1969 bp, Homo sapiens
atggtcaaccccaccgtgttcttcgacattgccgtcgacggcgagcccttgggccgcgtctcctttgaggtcgggcgggcggcggcgtgcgggaatggggcccagaaagtgggccggggtcgggaaaattttcgtgctctgagcactggagagaaaggatttggttataagggttcctgctttcacagaattattccagggtttatgtgtcagggtggwgacttcacacgccataatggcactggtggcaagtccatctatggggagaaatttgaagatgagaacttcatcctaaagcatacgggtcctggcatcttgtccatggcaaatgctggacccaacacaaatggttcccagtttttcatctgcactgccaagactgagtggttggatggcaagcatgtggtgtttggcaaagtgaaagaaggcatgaatattgtggaggccatggagcgctttgggtccaggaatggcaagaccagcaagaagatcaccattgctgactgtggacaactcgaataagtttgacttgtgttttatcttaaccaccagatcattccttctgtagctcaggagagcaccyctccaccccatttgctcgcagtatcctagaatctttgtgctctcgctgcagttccctttgggttccatgttttccttgttccctcccatgcctagctggattgcagagttaagtttatgattatgaaataaaaactaaataacaattgtcctcgtttgagttaagtgttgatgtaggctttattttaagcagtaatgggttacttctgaaacatcacttgtttgcttaattctacacagtacttagattttttttactttccagtcccaggaagtgtcaatgtttgttgagtggaatattgaaaatgtaggcagcaactgggcatggtggctcactgtctgtaatgtattacctgaggcagaagaccacctgagggtaggagtcaagatcagcctgggcaacatagtgagacgctgtctctacaaaaaataattagcctggcctggtggtgcatgcctagtcctagctgatctggaggctgacgtgggaggattgcttgagcctagagtgagctattatcatgccactgtacagcctgggtgttcacagatcttgtgtctcmaaggtaggcagaggcaggaaaagcaaggagccagaattaagaggttgggtcagtctgcagtgagttcatgcatttagaggtgttcttcaagatgactaatgtcaaaaattgagacatctgttgcggttcttttttttttttttttttyccctggaatgcagkggcgtgatctcagctcactgcagcctccgcctcctgggttcaagtgattctagtgcctcagcctcctgagtagctgggataacgggcgtgtgccaccatgcccagctaatttttgtatttttagtatagatggggtttcatcattttgaccaggctggtctcaaactcttgacctcagctgatgcgcctgccttggcctcccaaactgctgagattacagatgtgagccaccgcaccctacctcattttctgtaacaaagctaagcttgaacactgttgatgttcttgagggaagcatattgggctttaggctgtaggtcaagtttatacatcttaattatggtggaattcctatgtagagtctaaaaagccaggtacttggtgctacagtcagtctccctgcagagggttaaggcgcagactacctgcagtgaggaggtactgcttgtagcatatagagcctctccctagctttggttatggaggctttgaggttttgcaaacctgaccaatttaagccataagatctggtcaaagggatacccttcccactaaggacttggtttctcaggaaattatatgtacagtgcttgctggcagttagatgtcaggacartctaagctgagaaaaccccttctctgcccaccttaacagacctcta

SEQ ID NO: 3383 - DNA, 2486 bp, Homo sapiens
atgcgctgtgtgtccctgcttctagatgccgacaaaaggatcaaggtggcgaagcccgtggtggagatggatggtgatgagatgacccgtattatctggcagttcatcaaggagaagctcatcctgccccacgtggacatccagctaaagtattttgacctcgggctcccaaaccgtgaccagactgatgaccaggtcaccattgactctgcactggccacccagaagtacagtgtggctgtcaagtgtgccaccatcacccctgatgaggcccgtgtggaagagttcaagctgaagaagatgtggaaaagtcccaatggaactatccggaacatcctgggggggactgtcttccgggagcccatcatctgcaaaaacatcccacgcctagtccctggctggaccaagcccatcaccattggcaggcacgcccatggcgaccagtacaaggccacagactttgtggcagaccgggccggcactttcaaaatggtcttcaccccaaaagatggcagtggtgtcaaggagtgggaagtgtacaacttccccgcaggcggygtgggcatgggcatgtacaacaccgacgagtccatctcaggttttgcgcacagctgcttccagtatgccatccagaagaaatggccgctgtacatgagcaccaagaacaccatactgaaagcctacgatgggcgtttcaaggacatcttccaggagatctttgacaagcactataagaccgacttcgacaagaataagatctggtatgagcaccggctcattgatgacatggtggctcaggtcctcaagtcttcgggtggctttgtgtgggcctgcaagaactatgacggagatgtgcagtcagacatcctggcccagggctttggctcccttggcctgatgacrtcyrtcctggtctgccctgatgggaagacgattgaggctgaggccgctcatgggacygtcacccgccactatcgggagcaccagaagggccggcccaccagcaccaaccccatcgccagcatctttgcctggacacgtggcctggagcaccgggggaagctggatgggaaccaagacctcatcaggtttgcccagatgctggagaaggtgtgcgtggagacggtggagagtggagccatgaccaaggacctggcgggctgcattcacggcctcagcaatgtgaagctgaacgagcacttcctgaacaccacggacttcctcgacaccatcaagagcaacctggacagagccctgggcaggcagtagggggaggcgccacccatggctgcagtggaggggccagggctgagccggcgggtcctcctgagcgcggcagagggtgagcctcacagcccctctctggaggcctttctaggggatgtttttttataagccagatgtttttaaaagcatatgtgtgttycccctcatggtgacgtgaggcaggagcagtgcgttttacctcagccagtcagtatgttttgcatactgtaatttatattgcccttggaacacatggtgccatatttagctactaaaaagctcttcacaaaattgtctgctgtgtttgtccctgaggggaggaggtagtgggaccctgaggcagaggccctgctagagctggcaggttcccctggggcagaccagagcacctcaggaaggggctgccacggcagggaagggaccaggcagccctgggagcccgcattccacaggggcccactgcggagttctcggacactcagggcacaggcctgtgggttccctggaattttctagcatgatccagtttctgtgtccagttctccattctgagagtcaatcagttcctgataggttgtcattgatttttttcttcgttggttttaaccttctaaacatctccaggccactttcttagcctttttctaggtactaaaaagaggtcctacccacacctgcctcacacttctcctttccaaggctgcctgagtttggaggggcttgggtgtgtgtgaacaagggccctgcattgtctaggcctgcagttcccaggcttgggttcactttcaccatgcattggcaaaactagaaaagtaagcttgtgacaaattgttytcggccgggcacagtggcgcacgcctataatccctgtactttgggaggctgaggtgggtggatcacttgaggccakgagttcgagaccagcctggccaacatggtgaaaccccatctctactcaaaatacaaaaattagccaggcgtggtgatgcgcacctgcagtcccagctactcgggaggctgaggcaggaaratggcttgracctgggaggcagaggttgcagtgagccgagactgcaccactgcactccagcctgggtgacagagcaagactctgtctcaaaaaaaaaaaaaaaaaaaaaaaaaaaaaaaattgctctatgcaagttttttagccccatgtaaaaaggaaaaataaaagttgctctaaagctacatataat

SEQ ID NO: 3384 - DNA, 2662 bp, Homo sapiens
ccagcgttagcccgcggccaggcagccgggaggagcggcgcgcgctcggacctctcccgccctgctcgttcgctctccagcttgggatggccggctacctgcgggtcgtgcgctcgctctgcagagcctcaggctcgcggccggcctgggcgccggcggccctgacagcccccacctcgcaagagcagccgcggcgccactatgccgacaaaaggatcaaggtggcgaagcccgtggtggagatggatggtgatgagatgacccgtattatctggcagttcatcaaggagaagctcatcctgccccacgtggacatccagctaaagtattttgacctcgggctcccaaaccgtgaccagactgatgaccaggtcaccattgactctgcactggccacccagaagtacagtgtggctgtcaagtgtgccaccatcacccctgatgaggcccgtgtggaagagttcaagctgaagaagatgtggaaaagtcccaatggaactatccggaacatcctgggggggactgtcttccgggagcccatcatctgcaaaaacatcccacgcctagtccctggctggaccaagcccatcaccattggcaggcacgcccatggcgaccagtacaaggccacagactttgtggcagaccgggccggcactttcaaaatggtcttcaccccaaaagatggcagtggtgtcaaggagtgggaagtgtacaacttccccgcaggcggygtgggcatgggcatgtacaacaccgacgagtccatctcaggttttgcgcacagctgcttccagtatgccatccagaagaaatggccgctgtacatgagcaccaagaacaccatactgaaagcctacgatgggcgtttcaaggacatcttccaggagatctttgacaagcactataagaccgacttcgacaagaataagatctggtatgagcaccggctcattgatgacatggtggctcaggtcctcaagtcttcgggtggctttgtgtgggcctgcaagaactatgacggagatgtgcagtcagacatcctggcccagggctttggctcccttggcctgatgacrtcyrtcctggtctgccctgatgggaagacgattgaggctgaggccgctcatgggacygtcacccgccactatcgggagcaccagaagggccggcccaccagcaccaaccccatcgccagcatctttgcctggacacgtggcctggagcaccgggggaagctggatgggaaccaagacctcatcaggtttgcccagatgctggagaaggtgtgcgtggagacggtggagagtggagccatgaccaaggacctggcgggctgcattcacggcctcagcaatgtgaagctgaacgagcacttcctgaacaccacggacttcctcgacaccatcaagagcaacctggacagagccctgggcaggcagtagggggaggcgccacccatggctgcagtggaggggccagggctgagccggcgggtcctcctgagcgcggcagagggtgagcctcacagcccctctctggaggcctttctaggggatgtttttttataagccagatgtttttaaaagcatatgtgtgttycccctcatggtgacgtgaggcaggagcagtgcgttttacctcagccagtcagtatgttttgcatactgtaatttatattgcccttggaacacatggtgccatatttagctactaaaaagctcttcacaaaattgtctgctgtgtttgtccctgaggggaggaggtagtgggaccctgaggcagaggccctgctagagctggcaggttcccctggggcagaccagagcacctcaggaaggggctgccacggcagggaagggaccaggcagccctgggagcccgcattccacaggggcccactgcggagttctcggacactcagggcacaggcctgtgggttccctggaattttctagcatgatccagtttctgtgtccagttctccattctgagagtcaatcagttcctgataggttgtcattgatttttttcttcgttggttttaaccttctaaacatctccaggccactttcttagcctttttctaggtactaaaaagaggtcctacccacacctgcctcacacttctcctttccaaggctgcctgagtttggaggggcttgggtgtgtgtgaacaagggccctgcattgtctaggcctgcagttcccaggcttgggttcactttcaccatgcattggcaaaactagaaaagtaagcttgtgacaaattgttytcggccgggcacagtggcgcacgcctataatccctgtactttgggaggctgaggtgggtggatcacttgaggccakgagttcgagaccagcctggccaacatggtgaaaccccatctctactcaaaatacaaaaattagccaggcgtggtgatgcgcacctgcagtcccagctactcgggaggctgaggcaggaaratggcttgracctgggaggcagaggttgcagtgagccgagactgcaccactgcactccagcctgggtgacagagcaagactctgtctcaaaaaaaaaaaaaaaaaaaaaaaaaaaaaaaattgctctatgcaagttttttagccccatgtaaaaaggaaaaataaaagttgctctaaagctacatataat

SEQ ID NO: 3385 - DNA, 995 bp, Homo sapiens
caatgtaggaaaggtgatttctaatggatgccacacgttgtagatctctgacctctattttctcgctggtggtacatctactgcacttacacatatgttgttccttttcatttccagaagattcacttagttccttgatacagaatcagagcttaagactgtcatttcacaagagcattgagcacaatgaaactgtgaatctttgaagcttatgattatgcttcacatttttgtaaacttcaaataaccttggaaaaatttccagattgggtgtagagttatttaattataaagaactattttaggtatagtcaatgattttcaattattatgtcaattacattcgttgtattcacttacggactttatggtaggttacaaaaatatatactttgaaaagaaatrtactctttatgcaaaggaagctatgccatcaacaaacttgacctctaattcccaagtttattacagaaaaatttgtagtgtgaaaaaggcaaacatctccagctcatcttctcaggtatctatgaagattccgtacaaactcctttcaaatttttcccaggaatgctgtcggaactggaccttgatgaaggaaatactttctgactcattggaatttgttatagtcaaadtaagtaaggcacaaatattgaagataaacttggtacagtatgtagtgccttttgttattaaatgcaactttgggtgattacttgacattttgacttcattgatttactaaaagaagttttgaaaattttactgaagaccactgtttttgtttttgctattgtttttaaatttactatatatgatgtttgtagtcatttctatgaaaatgttggcattaagccttttaatgaggggcacaatctgctaccataatattcttttaatgggaaatcaagtaggaatggataattgtgacttttctaggaatggagaccactgaaaatgagacagaaactagtgtgtataaatacattacagta

SEQ ID NO: 3386 - DNA, 462 bp, Homo sapiens
atggcaccggccagagcaggatgctgcyccctgctgctgctgcttctggggctgtgggtggcagaggtcctagtcagagccaagcccaaggacatgacatcatctcagtggtttaaaactcagcatgtgcagcccagccctcaagcatgcaactcagccatgagcatcatcaataagtacacagaacggtgcaaagacctcaacaccttcctgcacgagcccttctccagtgtggccatcacctgccagacccccaacatagcctgcaagaatagctgtaaaaactgccaccagagccacgggcccatgtccctgaccatgggtgagctcacctcagggaagtacccaaactgcaggtacaaagagaagcacctgaacacaccttacatagtggcctgtgaccctccacaacagggtgacccagggtacccacttgttcctgtgcacttggataaagttgtc

SEQ ID NO: 3387 - DNA, 1692 bp, Homo sapiens
caaatcgcaaatatggcgccggagcggctgcggagccgggcgctctccgccttcaagttgcggggcttgctgctccgtggtgaagctattaagtacctcacagaagctcttcagtctatcagtgaattagagcttgaagataaactggaaaagataattaatgcagttgagaagcaacccttgtcatcaaacatgattgaacgatctgtggtggaagcagcagtccaggaatgcagtcagtctgttgatgaaactatagagcmcgttttcaatatcataggagcatttgatattccacgctttgtgtacaattcagaaagaaaaaaatttcttcctctgttaatgaccaaccaccctgcaccaaatttatttggaacaccaagagataaagcagagatgtttcgtgagcgatataccattttgcaccagaggacccacaggcatgaattatttactcctccggtgataggttctcaccctgatgaaagcggaagcaaattccagcttaaaacaatagaaaccttattgggtagtacaaccaaaatcggagatgcgattgttcttggaatgataacrcarttaaaagagggaaaattttttctggaagatcctactggaacagtmcaactagaccttagtaaagctatttccatagtggtttatacacagaggcatgctttgtcttagcagaaggttggtttgaagatcaagtgtttcatgtcaatgcctttggatttccacccactgagccctctagtactactagggcatactatggaaatattaatttttttggaggtccttctaatacatctgtgaagacttctgcaaaactaaaacagctagaagaggagaataaagatgctatgtttgtgtttttatctgatgtttggttggaccaggtggaagtattggaaaaacttcgcataatgtttgctggttattcaccagcacctccaacctgctttattctgtgtggtaatttttcatctgcaccatatggaaaaaatcaagttcaagctttgaaagattccctaaaaactttggcagatataatatgtgaatacccagatattcaccaaagtcgttttgtgtttgtacctggtccagaggatcctggatttggttccatcttaccaaggccaccacttgctgaaagcatcactaatgaattcagacaaagggtaccattttcagtttttactactaatccttgcagaattcagtactgtacacaggaaattactgtcttccgtgaagacttagtaaataaaatgtgcagaaactgcgtccgttttcctagcagcaatttggctattcctaatcactttgtaaagactatcttatcccaaggacatctgactcccctacctstttatgtctgcccagtgtattgggcatatgactatgctttgagagtgyatcctgtgcccgatctacttgtcattgcagacaaatatgatcctttcactacgacaaataccgaatgcctctgcataaaccctggctcttttccaagaagtggattttcattcaaagttttttatccttctaataagacagtagaagatagcaaacttcaaggcttttgagattcttaaagatcatctgaagaaaattcatcagttttctgcttaactctrtatcttatgtgattctgatattacaataaaattatggtaaactttagga

SEQ ID NO: 3388 - DNA, 5088 bp, Homo sapiens
gagcggccgcgccgggtccccgggacggggtggaagtgggggtggggggaggggatcggggccgggccggggccgcgctgcctgcgatgccgggcgcccgccgcagccgctgccgccggagcccgggatggggcgagaggctgcggcggacgccagcatctccccgccggggaccccgggggccgcggagccgccgccgccgctgctgccgccgttgctgagacccagcgggcgatgggatgaagatgagacgctacaagctctttctcatgttctgtatggccggcctgtgcctcatctccttcctgcacttcttcaagaccctgtcctatgtcaccttcccccgagaactggcctccctcagccctaacctggtgtccagctttttctggaacaatgccccggtcacgccccaggccagccccgagccaggaggccctgacctgctgcgtaccccactctactcccactcgcccctgctgcagccgctgccgcccagcaaggcggccgaggagctccaccgggtggacttggtgctgcccgaggacaccaccgagtatttcgtgcgcaccaaggccggcggcgtctgcttcaaacccggcaccaagatgctggagaggccscccccgggacggccggaggagaagcctgagggggccaacggctcctcggcccggcggccaccccggtacctcctgagygcccgggagcgcacggggggccgaggcgcccggcgcaagtgggtggagtgcgtgtgcctgcccggctggcacggacccagctgcggcgtgcccactgtggtgcagtactccaacctgcccaccaaggagcggctggtgcccagggaggtgccgcgccgcgtcatcaacgccatcaacgtcaaccacgagttcgacctgctggacgtgcgcttccacgagctgggcgacgtggtggacgcctttgtggtgtgcgagtccaacttcacggcttatggggagccgcggccgctcaagttccgggagatgctgaccaatggcaccttcgagtacatccgccacaaggtgctctatgtcttcctggaccacttcccgcccggcggccggcaggacggctggatcgccgacgactacctgcgcaccttcctcacccaggacggcgtctcgcggctgcgcaacctgcggcccgacgacgtcttcatcattgacgatgcggacgagatcccggcccgtgacggcgtccttttcctcaagctctacgatggctggaccgagcccttcgccttccacatgcgcaagtcrctctacggcttcttctggaagcagccgggcaccctggaggtggtgtcaggctgcacggtggacatgctgcaggcagtgtatgggctggacggcatccgcctgcgccgccgccagtactacaccatgcccaacttcagacagtatgagaaccgcaccggccacatcctggtgcagtggtcgctgggcagccccctgcacttcgccggctggcactgctcctggtgcttcacgcccgagggcatctacttcaagctcgtgtccgcccagaatggcgacttcccacgctggggtgactacgaggacaagcgggacctgaactacatccgcggcctgatccgcaccgggggctggttcgacggcacgcagcaggagtacccgcctgcagaccccagcgagcacatgtatgcgcccaagtacctgctgaagaactacgaccggttccactacctgctggacaacccctaccaggagcccaggagcacggcggcgggcgggtggcgccacaggggtcccgagggaaggccgcccgcccggggcaaactggacgaggcggaagtctagagctgcatgatctgatagggtttgtgacagggcgggggtggcggcggcccctagcgctatctccctgcctcctgccggctccttggttcttgaggggaccaggagtgggtggggagtgggggtgggggtagggtttccctactgaagcccttgtgaatcaagggtcaggcctttgagctcagaaaatatccctcctgttgggagagggcgcaggccgtgacgtctgggtggcccttatgactgccaagactgctgtggccaggaggtgccactggagtgtgcgtggtggtccctgggtagcgggggagggtaggcaggattggggaagagagcctgcaggatctcaccaggcagcctctggggggtggccaggccgggaaaaagcccaccatttggcatccctgggccttgggctccgtgtgggagaccggcctgccaggaggacccagggctctgtaagtagatgcatttgggtccaggaggaagcgtggacacctcgtagggaagagatgaaaaagccacatcctaccaagaggaggtgctgagggatgctttgcagtgtagtcagaagtgctgggccagatggagacagaactccaccccctgccgcaaaggacaggacctggctgccctgggatgctggtgcctgagtctgtctctgtgcacccctcaggctgtcgtgagccaacacaggggcctggagaaccctgaggagctttccttttggttctaaacccggcgttgacgttccttctccctttcacattgctgtcttgtggactgtgcactcagtccttgcaaggccaagagtccagttgtaggtgtggccttgagggggaagtggggaggagaagactgacatgagtcctctgcacggatccgtctctccctccccatcaccccttccttctgacacccagtcccagctgtccactgtcccaggtgcagtcactgttgtgcccttccttggggcaggctggctgggggccagaaaggggccatgaggctgtcttgggcccaaaaagggacaataaggccagttgtatgcttcctgttcctcatagcttgccttggtggggatgtctttgttggagttgattctgagctgctgtgattaggagaccctgaaatacagtggtttaagcaagatggaagcttgtttctaattagtctagattgagatggcccagagctggtagggcagctctgcgtttcttcatacgcaccttccaattctgggtacacagcggctgctccagcgcccaccctcctgtgtgcatccaagcctgggggaagcagaaatagacaagagggcacacccactttttgctaaaggcatgagccagaattggcaggctcacctctgctggcctctcattggctgggactcagtcacatggccacaagcagctgctagggaacctgggaagtgtagtcttcagcggggccgccatgtgcctggcctcaccttgggagttatcttattgatggaggagaagagaatggatatgggggaccagtagcatctctgggagagggggagggagcagcaataactcagtcgtcggatccagctctcattgtcagagtttccggaacagcttgctcctgtttccctcactgtgcagcccagggctgggggcagtgaggagcttgcagctctgtgggaaggggaaacaccccctcccctcggcccctcagacgctacccaatgatgccggtttgcagagttggcctgtggaatggctcatgtttgtgcgtgtgtgtgtgtatatttatgggcatgggtgcatgcttggtgtgtatttgtacatgtctgtattgctgtgtccctgtaaatacatgcttgtgtatggatggaagaggccaggcccaggcctggcctcttcctcgggcctgtggccacacctcctgcagctccccaaaatgactgaggcagaaagcccttggggagcctagaaagcaaagctaaaggggatgcagggtctgtctgtctgtctgtctttcagtctgaggaatgagaatcctgacctgagggctgtgcagctgagagcccactacctccccagcccctctcggccccagccgcatcatcccacctgtcccctcccccccacctccagtggggctttctccagatgtcttatggttgggggtttcctgatgggccaggagaggagggcatcttcttgcgacagcactgtctgggttaagtgcccagtgagggcatggtgtggggagctggcctcagaggagccgctggtgggcaagcgtgaagtgggctgaggggctctgagccactttgctcccatctaggggactgccccccatggaactcctttgaagtcacagcagccttcctttctgtttgctcttggggctgagaggtggctcaaacactcggggtccctatggctctgggtcaatctaggccaggctgcaccccatggacagggagtctcagggctcctgatcatgcccaggccctggcctggggcctccctccttggcagctttcccacccccacgcccctggcatcctcagttgctatgggatgcccctccagggcaccagctcagggctaagcgaaggaagataggagcagctcagagctgccaggctctgccttcctcacagacctggtggggcaggtcctgttcacagcagcaggagtgaaggcctggccatcggtggagagggcagctgtcagagggctgggggccagggcacrggattgaagagtttcacatatcatcacagcatacactgggaatttggtgggggcagaagaacccagggccactccctcaatatgaagggaaaccaagctgaatgtgaccaccggcacactgctgccatgtcccatgtccacctttctccccgggaataactggccctgagacccctagacccaaggaggcctgtccatgccaagcatccgggaagcatggctggccttatccacccatgggtcacgtcggttcccaggggcagcatgggagatctttgggggcaacagggagagtctgggtggggagacgggacttgtccaagcagaaggcaggaccctgggaaatgcataatgtaaggacatcaataatagtattattttttttgtaagggaaaatcaatatgtacattctgaaatcattttctctgtaaatggttggatttcatttcacccttaaagggatgcttaaaggagaagataatattaataataaaaacagctacaaagtctgaatt

SEQ ID NO: 3389 - DNA, 1034 bp, Homo sapiens
actctgtcaccgcccctgggaagagtggaacccatacttgctggtctgakccatgcacaagrcgrggctgctaggcctctgtgcchgggcttggaaktcggtgcggatggccagctccrggatgacccrccgggacccgctcgcraataaggtggccctggtaacggcctccaccgacgggatcggcttcgccatcgcccggcgtttggcccaggacggggcccatgtggtcgtcagcagccggaagcagcagaatgtggaccaggcggtggccacgctgcagggggaggggctgagcgtgacgggcaccgtgtgccatgtggggaaggcggaggaccgggagcggctggtggccacggctgtgaagcttcatggaggtatcgatatcctagtctccaatgctgctgtcaaccctttctttggaagcataatggatgtcactgaggaggtgtgggacaagctctggatggacaaggaaaaagaggaaagcatgaaagaaaccctgcggataagaaggttaggcgagccagaggattgtgctggcatcgtgtctttcctgtgctctgaagatgccagctacatcactggggaaacagtgrtggtgggtggaggaaccccgtcccgcctctgaggaccsggagacagcccacaggccagagttgggctctagctcctggtgctgttccygcattcacccactggcctttcccacctctgctcaccttactgttcacctcatmaaatcagttctgccctgtgaaaagatccagccttccctgccgtcaaggtggcgtcttactcgggattyctgctgttgttgtggccttgggtaaaggcctcccctgagaacacaggacaggcctgctgacaaggctgagtctaccttggcaaagaccaagatattttttccygggccmctggggaatytgaggggtgatgggaragaaggaacctggagtggaaggagcagagttgcaaattaacarcttgcaaatgaggtgcaaataaaatgcagatgattgcgcggctttgaa

SEQ ID NO: 3390 - DNA, 1297 bp, Homo sapiens
actctgtcaccgcccctgggaagagtggaacccatacttgctggtctgakccatgcacaagrcgrggctgctaggcctctgtgcchgggcttggaaktcggtgcggatggccagctccrggatgacccrccgggacccgctcgcraataaggtggccctggtaacggcctccaccgacgggatcggcttcgccatcgcccggcgtttggcccaggacggggcccatgtggtcgtcagcagccggaagcagcagaatgtggaccaggcggtggccacgctgcagggggaggggctgagcgtgacgggcaccgtgtgccatgtggggaaggcggaggaccgggagcggctggtggccacggctgtgaagcttcatggaggtatcgatatcctagtctccaatgctgctgtcaaccctttctttggaagcataatggatgtcactgaggaggtgtgggacaagactctggacattaatgtgaaggccccagccctgatgacaaaggcagtggtgccagaaatggagaaaygaggaggcggctcagtggtgatcgtgtcttccatagcagccttcagtccatctcctggcttcagtccttacaatgtcagtaaaacagccttgctgggcctcaacaataccctggccatagagctggccccaaggaacattagggtgaactgcctgcacctggacttatcaagactagcttcagcaggatgctctggatggacaaggaaaaagaggaaagcatgaaagaaaccctgcggataagaaggttaggcgagccagaggattgtgctggcatcgtgtctttcctgtgctctgaagatgccagctacatcactggggaaacagtgrtggtgggtggaggaaccccgtcccgcctctgaggaccsggagacagcccacaggccagagttgggctctagctcctggtgctgttccygcattcacccactggcctttcccacctctgctcaccttactgttcacctcatmaaatcagttctgccctgtgaaaagatccagccttccctgccgtcaaggtggcgtcttactcgggattyctgctgttgttgtggccttgggtaaaggcctcccctgagaacacaggacaggcctgctgacaaggctgagtctaccttggcaaagaccaagatattttttccygggccmctggggaatytgaggggtgatgggaragaaggaacctggagtggaaggagcagagttgcaaattaacarcttgcaaatgaggtgcaaataaaatgcagatgattgcgcggctttgaatccaat

SEQ ID NO: 3391 - DNA, 1219 bp, Homo sapiens
tatgtacttagaatttgagttctgataatttatttttytatgggaggtggggaggtttattttttaaattgcagtccaaaggagtaaatttgatgttacattggacagtttattcagataccacaaactttacagatttaattagatagataatggatgatgttaaaaactaagcagcatcttaagtttaaatttttatttttatttctttttctgtcatcattatttatgaaaactggttgaaaatgaagttaaaagattttctgtacatcataagattggacagaaatattatttaccttaaaactttttctgagtaaaaatttaaacataaactagaactcagcctgaatttttttttaaaccatctttggaagcacatataaaagtagagtaaatacatcgaatgtagcttacctactgcatttgaagaaaatcttttgtgtatgtctgtaagctatttgtgtgttttgaaacagtttaccagaatagactgaaactggtagaaacaggcataagtaactctgcagtggtagttgtattgaaaactggaatggtagtctctttcaaaatcttgaagagatggaaactaatgaatcttttttttttttggtaaaatagtatttttttttgttcacttaaatgaaattatttgtactttaagttttgttccaggaaattacttcagttgtagctaatttattggcaccctttactaacaaatttctgttctgtattaagattagtattagaaaaaaaaggagatgtatggaaattaagaaagcaacaaaaattataagaataattgcccttataaagaagtcattatatgaaaaagatacttgcacacgcatgtttatagcggcacaattcgcaatggcaaaaatgtggaaccaacccaaatacccatcaatcaacgagttaataaagaaactgtggcatatgtatacgatggaatattactcagccataaaaaggaatgaattaatggcattcgcagtgacctggatgagattggagactgttattctaagtgaagtaactcgggaatggaaaaccaaacatcctatgttctcactcataagtgggagctaaaccacgagtatgtaaaggcataagaatgacacaatggactttggggattcaaggggagagggtgggtagagggtgagggataaaagatgttgggtgcaatgtatactgctcaggtgatgagtac

SEQ ID NO: 3392 - DNA, 1013 bp, Homo sapiens
cgaggcaccgcggcgagcttggctgcttctggggcctgtgtggccctgtgtgtcggaaagatggagcaagaagccgagcccgaggggcggccgcgacccctctgaccgagatcctgctgctttcgcagccaggagcaccgtccctccccggattagtgcgtacgagcgcccagtgccctggcccggagagtggaatgrtccccgaggcccagggcgtcgtgcttccgcgcgccccgtgaaggaaactggggagtcttgagggacccccgactccaagcgcgaaaaccccggatggtgaggagcaggcaaatgtgcaataccaacatgtctgtacctactgatggtgctgtaaccacctcacagattccagcttcggaacaagagaccctggttacttcacaatcacaagaaagtgaagactattctcagccatcaacttctagtagcattatttatagcagccaagaagatgtgaaagagtttgaaagggaagaaacccaagacaaagaagagagtgtggaatctagtttgccccttaatgccattgaaccttgtgtgatttgtcaaggtcgacctaaaaatggttgcattgtccatggcaaaacaggacatcttatggcctgctttacatgtgcaaagaagctaaagaaaaggaataagccctgcccagtatgtagacaaccaattcaaatgattgtgctaacttatttcccctagttgayctgtctataagagaattatatatttctaactatataaccctaggaatttagacaacctgaaatttattcacatatatcaaagtgagaaaatgcctcaattcacatagatttcttctctttagtataattgacctactttggtagtggaatagtgaatacttactataatttgacttgaatatgtagctcatcctttacaccaactcctaattttaaataatttctactctgtcttaaatgagaagtacttggtttttttttttcttaaatatgtatatgacatttaaatgt

SEQ ID NO: 3393 - DNA, 5180 bp, Homo sapiens
cgaggcaccgcggcgagcttggctgcttctggggcctgtgtggccctgtgtgtcggaaagatggagcaagaagccgagcccgaggggcggccgcgacccctctgaccgagatcctgctgctttcgcagccaggagcaccgtccctccccggattagtgcgtacgagcgcccagtgccctggcccggagagtggaatgrtccccgaggcccagggcgtcgtgcttccgcgcgccccgtgaaggaaactggggagtcttgagggacccccgactccaagcgcgaaaaccccggatggtgaggagcaggcaaatgtgcaataccaacatgtctgtacctactgatggtgctgtaaccacctcacagattccagcttcggaacaagagaccctggatcttgatgctggtgtaagtgaacattcaggtgattggttggatcaggattcagtttcagatcagtttagtgtagaatttgaagttgaatctctcgactcagaagattatagccttagtgaagaaggacaagaactctcagatgaagatgatgaggtatatcaagttactgtgtatcaggcaggggagagtgatacagattcatttgaagaagatcctgaaatttccttagctgactattggaaatgcacttcatgcaatgaaatgaatcccccccttccatcacattgcaacagatgttgggcccttcgtgagaattggcttcctgaagataaagggaaagataaaggggaaatctctgagaaagccaaactggaaaactcaacacaagctgargagggctttgatgttcctgattgtaaaaaaactatagtgaatgattccagagagtcatgtgttgaggaaaatgatgataaaattacacaagcttcacaatcacaagaaagtgaagactattctcagccatcaacttctagtagcattatttatagcagccaagaagatgtgaaagagtttgaaagggaagaaacccaagacaaagaagagagtgtggaatctagtttgccccttaatgccattgaaccttgtgtgatttgtcaaggtcgacctaaaaatggttgcattgtccatggcaaaacaggacatcttatggcctgctttacatgtgcaaagaagctaaagaaaaggaataagccctgcccagtatgtagacaaccaattcaaatgattgtgctaacttatttcccctagttgayctgtctataagagaattatatatttctaactatataaccctaggaatttagacaacctgaaatttattcacatatatcaaagtgagaaaatgcctcaattcacatagatttcttctctttagtataattgacctactttggtagtggaatagtgaatacttactataatttgacttgaatatgtagctcatcctttacaccaactcctaattttaaataatttctactctgtcttaaatgagaagtacttggtttttttttttcttaaatatgtatatgacatttaaatgtaacttattattttttttgagaccgagtcttgctctgttacccaggctggagtgcagtggcgtgatcttggctcactgcaagctctgcctcccgggttcgcaccattctcctgcctcagcctcccaattagcttggcctacagtcatctgccaccacacctggctaattttttgtacttttagtagagacagggtttcaccgtgttagccaggatggtctcgatctcctgacctcgtgatccgcccacctcggcctcccaaagtgctgggattacaggcatgagccaccgcgtccggcctaaatgtcacttagtacctttgatataaagagaaaatgtgtgaaagatttagttttttgtttttttgtttgtttgtttgtttgtttgttttgagatgagtctctctgtcgcccaggctggagtgcagtgtcatgatctagcagtctccgcttcccgggttcaagccattctcctggctcagcctctggagcagctgggattacaggcatgcaccaccatgcccagctaatttttgtatttttagtagagatagggtttcaccatgttggccaggctggtcacgaactcctgacctcaagtgaggtcacccgcctcggcctcccgaagtgctgggattgcagatgtgagccaccatgtccagccaagaattagtatttaaattttagatactcttttttttttttttttttttttttgagacagagtcttgctccatcacccatgctagagtgcagtggagtgatctcggctcactgcaacttccgccttctgggttcaagctattctcctgcctcagccttccaagtaactgggattacaggcatgtaccaccataccagctgatttttttgtatttttagtaaagacagggtttcaccatgttagccaggctgatcttgaactcctaaactcaagtgatctactcacctcagcctcccaaaatgctgggattacagatgtgaggcacctggcctcagatttttgatactcttaaaccttctgatccttagtttctctctccaaaatactctttctaggttaaaaaaaaaaaggctcttatatttggtgctatgtaaatgaaaatgttttttaggttttcttgatttaacaatagaracagggtctccctgtgttgcccaggctggtctcgaactcctgggctcaagagatcctcctgtctkggcctcgcaaagtgctaagtaggattacaggcgtkagccaccacacccggctgtaaaaatgtacttattctccagcctcttttgtataaaccatagtaagggatgggagtaatgatgttatctgtgaaaatagccaccatttacccgtaagacaaaacttgttaaagcctcctgagtctaacctagattacatcaggccctttttcacacacaaaaaaatcctttatgggatttaatggaatctgttgtttccccctaagttgaaaaacaactctaaracactttaaagtaccttcttggcctgggttacatggttcccagcctaggtttcagacttttgcttaaggccagttttagaaacccgtgaattcagaaaagttaattcagaaatttgataaacagaattgttatttaaaaactaactggaaagattgttaagttctttctgaattattcagaaattatgcatcattttccttcaagaatgacrgggtcagcatgtggaattccaagatacctcttgacttcctctcaagctccgtgtttggtcagtggaggcccatccgagctcagcactgagaagtgttagtttctttgggacccatctaccctgaccayatcatgatgttcatctgcagctgttgcaaggtgttcagattgtataaacataaatgtcacaaaaactttaaaagaagtgcaattctcaaaaggttaggtggactaaagcattctgtaaagcaactgctaataatgagcttacagtggatttgaatttgaaaaatatagtaacaagcctgtcaaatatctgcaagaactatggaataaaactactgatgcagtgaagacagttgaaaagatcaaacaaatgccaagctatatttataatgaacaaattcaagaaaaaggactacggaaagttcaggacatcaaagaagtcaggcaaaactcatcttgacccctgttgcaggcaaaggaacgcagctggaagaaaagatgatataacagttaacaggatgcagacatggcagaggtttcctaaaaatctcattatctataaccatttctatatttacatttgaaaatctcctttggagacttagaacctctaaattattgacttattttttatataaggtcactccgatgaaaggtgattacaaaatcatctacattgctgtctacaaaacagataatatggatgtttgatcgcatctcattgttaactctttactgatatgtttgtaaatacagaagtgaaatgtggacataaaatagttacgctatttggttaatggtactagacaacatgtaattaatgacattcaaaaatttatggctagtgatatatataaagtaaaattttctttgcagtaaaatatgccctttattatagaagggaggatataaggaaccaacagtttkkatgaaaatagctcaaataatatcttttattttgattttaatatttcttattttggtttattagtgtcttagaacaaaatggccttatataatgaagcctagttatgctggactgttttgatctcttttaattgttctgacagatagttggggatgagagccgaataaggtttgcctgaaataactgacactatataatttctgctttggcaaatactaagttctaacttgtcattcctggtagaacaagctttatttttcgagcctagcaawgatctagaagcagatgttatctcagtgccttttgcaatttgttgtgtgggtttttttttttttaaagccacacaataattttggaaaacaatgtatgggtagaacatgtgtctgttaattgcacacaaaaccacttttaatgggtacagagttaaatttgaaggaataagttctagctgaagtattatgaactccaaataatgctttgaggacctccaaaggtaaaagtactaatccctttggccatttattgagagagasagagagagagagtagggtgactatagttaatgtattgaatgttcttgctacaaataaatgatatttgagctgatgggtgtgctaattacactgatttgatcaatacccattgtatgtgaaacagtacatacaccatatttacaattatgtatttaacatttaaaatttctaatataagtatctctcaaactgtggattaacttcttgatttatatttaaatatgaatcttaagcaaaacagtgaaaataaccatcttgatttagtgtttttctcccatatgtgaattgtatatacttaggtgargacaataaaatcaactgaactgtaagcttagaataggactgaggtaattctgcacagcaactttactaatggtacattgttgcttcaaaactctctctctctctctctgtctgtctcaataaatggccaaagggattagtagtttacctgtggaggtcctccaagcattrtttggagttgataatacttcagctacaaccaagcagaatctcttttttttggag

SEQ ID NO: 3394 - DNA, 5255 bp, Homo sapiens
cgaggcaccgcggcgagcttggctgcttctggggcctgtgtggccctgtgtgtcggaaagatggagcaagaagccgagcccgaggggcggccgcgacccctctgaccgagatcctgctgctttcgcagccaggagcaccgtccctccccggattagtgcgtacgagcgcccagtgccctggcccggagagtggaatgrtccccgaggcccagggcgtcgtgcttccgcgcgccccgtgaaggaaactggggagtcttgagggacccccgactccaagcgcgaaaaccccggatggtgaggagcaggcaaatgtgcaataccaacatgtctgtacctactgatggtgctgtaaccacctcacagattccagcttcggaacaagagaccctggttagaccaaagccattgcttttgaagttattaaagtctgttggtgcacaaaaagacacttatactatgaaagaggatcttgatgctggtgtaagtgaacattcaggtgattggttggatcaggattcagtttcagatcagtttagtgtagaatttgaagttgaatctctcgactcagaagattatagccttagtgaagaaggacaagaactctcagatgaagatgatgaggtatatcaagttactgtgtatcaggcaggggagagtgatacagattcatttgaagaagatcctgaaatttccttagctgactattggaaatgcacttcatgcaatgaaatgaatcccccccttccatcacattgcaacagatgttgggcccttcgtgagaattggcttcctgaagataaagggaaagataaaggggaaatctctgagaaagccaaactggaaaactcaacacaagctgargagggctttgatgttcctgattgtaaaaaaactatagtgaatgattccagagagtcatgtgttgaggaaaatgatgataaaattacacaagcttcacaatcacaagaaagtgaagactattctcagccatcaacttctagtagcattatttatagcagccaagaagatgtgaaagagtttgaaagggaagaaacccaagacaaagaagagagtgtggaatctagtttgccccttaatgccattgaaccttgtgtgatttgtcaaggtcgacctaaaaatggttgcattgtccatggcaaaacaggacatcttatggcctgctttacatgtgcaaagaagctaaagaaaaggaataagccctgcccagtatgtagacaaccaattcaaatgattgtgctaacttatttcccctagttgayctgtctataagagaattatatatttctaactatataaccctaggaatttagacaacctgaaatttattcacatatatcaaagtgagaaaatgcctcaattcacatagatttcttctctttagtataattgacctactttggtagtggaatagtgaatacttactataatttgacttgaatatgtagctcatcctttacaccaactcctaattttaaataatttctactctgtcttaaatgagaagtacttggtttttttttttcttaaatatgtatatgacatttaaatgtaacttattattttttttgagaccgagtcttgctctgttacccaggctggagtgcagtggcgtgatcttggctcactgcaagctctgcctcccgggttcgcaccattctcctgcctcagcctcccaattagcttggcctacagtcatctgccaccacacctggctaattttttgtacttttagtagagacagggtttcaccgtgttagccaggatggtctcgatctcctgacctcgtgatccgcccacctcggcctcccaaagtgctgggattacaggcatgagccaccgcgtccggcctaaatgtcacttagtacctttgatataaagagaaaatgtgtgaaagatttagttttttgtttttttgtttgtttgtttgtttgtttgttttgagatgagtctctctgtcgcccaggctggagtgcagtgtcatgatctagcagtctccgcttcccgggttcaagccattctcctggctcagcctctggagcagctgggattacaggcatgcaccaccatgcccagctaatttttgtatttttagtagagatagggtttcaccatgttggccaggctggtcacgaactcctgacctcaagtgaggtcacccgcctcggcctcccgaagtgctgggattgcagatgtgagccaccatgtccagccaagaattagtatttaaattttagatactcttttttttttttttttttttttttgagacagagtcttgctccatcacccatgctagagtgcagtggagtgatctcggctcactgcaacttccgccttctgggttcaagctattctcctgcctcagccttccaagtaactgggattacaggcatgtaccaccataccagctgatttttttgtatttttagtaaagacagggtttcaccatgttagccaggctgatcttgaactcctaaactcaagtgatctactcacctcagcctcccaaaatgctgggattacagatgtgaggcacctggcctcagatttttgatactcttaaaccttctgatccttagtttctctctccaaaatactctttctaggttaaaaaaaaaaaggctcttatatttggtgctatgtaaatgaaaatgttttttaggttttcttgatttaacaatagaracagggtctccctgtgttgcccaggctggtctcgaactcctgggctcaagagatcctcctgtctkggcctcgcaaagtgctaagtaggattacaggcgtkagccaccacacccggctgtaaaaatgtacttattctccagcctcttttgtataaaccatagtaagggatgggagtaatgatgttatctgtgaaaatagccaccatttacccgtaagacaaaacttgttaaagcctcctgagtctaacctagattacatcaggccctttttcacacacaaaaaaatcctttatgggatttaatggaatctgttgtttccccctaagttgaaaaacaactctaaracactttaaagtaccttcttggcctgggttacatggttcccagcctaggtttcagacttttgcttaaggccagttttagaaacccgtgaattcagaaaagttaattcagaaatttgataaacagaattgttatttaaaaactaactggaaagattgttaagttctttctgaattattcagaaattatgcatcattttccttcaagaatgacrgggtcagcatgtggaattccaagatacctcttgacttcctctcaagctccgtgtttggtcagtggaggcccatccgagctcagcactgagaagtgttagtttctttgggacccatctaccctgaccayatcatgatgttcatctgcagctgttgcaaggtgttcagattgtataaacataaatgtcacaaaaactttaaaagaagtgcaattctcaaaaggttaggtggactaaagcattctgtaaagcaactgctaataatgagcttacagtggatttgaatttgaaaaatatagtaacaagcctgtcaaatatctgcaagaactatggaataaaactactgatgcagtgaagacagttgaaaagatcaaacaaatgccaagctatatttataatgaacaaattcaagaaaaaggactacggaaagttcaggacatcaaagaagtcaggcaaaactcatcttgacccctgttgcaggcaaaggaacgcagctggaagaaaagatgatataacagttaacaggatgcagacatggcagaggtttcctaaaaatctcattatctataaccatttctatatttacatttgaaaatctcctttggagacttagaacctctaaattattgacttattttttatataaggtcactccgatgaaaggtgattacaaaatcatctacattgctgtctacaaaacagataatatggatgtttgatcgcatctcattgttaactctttactgatatgtttgtaaatacagaagtgaaatgtggacataaaatagttacgctatttggttaatggtactagacaacatgtaattaatgacattcaaaaatttatggctagtgatatatataaagtaaaattttctttgcagtaaaatatgccctttattatagaagggaggatataaggaaccaacagtttkkatgaaaatagctcaaataatatcttttattttgattttaatatttcttattttggtttattagtgtcttagaacaaaatggccttatataatgaagcctagttatgctggactgttttgatctcttttaattgttctgacagatagttggggatgagagccgaataaggtttgcctgaaataactgacactatataatttctgctttggcaaatactaagttctaacttgtcattcctggtagaacaagctttatttttcgagcctagcaawgatctagaagcagatgttatctcagtgccttttgcaatttgttgtgtgggtttttttttttttaaagccacacaataattttggaaaacaatgtatgggtagaacatgtgtctgttaattgcacacaaaaccacttttaatgggtacagagttaaatttgaaggaataagttctagctgaagtattatgaactccaaataatgctttgaggacctccaaaggtaaaagtactaatccctttggccatttattgagagagasagagagagagagtagggtgactatagttaatgtattgaatgttcttgctacaaataaatgatatttgagctgatgggtgtgctaattacactgatttgatcaatacccattgtatgtgaaacagtacatacaccatatttacaattatgtatttaacatttaaaatttctaatataagtatctctcaaactgtggattaacttcttgatttatatttaaatatgaatcttaagcaaaacagtgaaaataaccatcttgatttagtgtttttctcccatatgtgaattgtatatacttaggtgargacaataaaatcaactgaactgtaagcttagaataggactgaggtaattctgcacagcaactttactaatggtacattgttgcttcaaaactctctctctctctctctgtctgtctcaataaatggccaaagggattagtagtttacctgtggaggtcctccaagcattrtttggagttgataatacttcagctacaaccaagcagaatctcttttttttggag

SEQ ID NO: 3395 - DNA, 4946 bp, Homo sapiens
cgaggcaccgcggcgagcttggctgcttctggggcctgtgtggccctgtgtgtcggaaagatggagcaagaagccgagcccgaggggcggccgcgacccctctgaccgagatcctgctgctttcgcagccaggagcaccgtccctccccggattagtgcgtacgagcgcccagtgccctggcccggagagtggaatgrtccccgaggcccagggcgtcgtgcttccgcgcgccccgtgaaggaaactggggagtcttgagggacccccgactccaagcgcgaaaaccccggatggtgaggagcaggcaaatgtgcaataccaacatgtctgtacctactgatggtgctgtaaccacctcacagattccagcttcggaacaagagaccctggactattggaaatgcacttcatgcaatgaaatgaatcccccccttccatcacattgcaacagatgttgggcccttcgtgagaattggcttcctgaagataaagggaaagataaaggggaaatctctgagaaagccaaactggaaaactcaacacaagctgargagggctttgatgttcctgattgtaaaaaaactatagtgaatgattccagagagtcatgtgttgaggaaaatgatgataaaattacacaagcttcacaatcacaagaaagtgaagactattctcagccatcaacttctagtagcattatttatagcagccaagaagatgtgaaagagtttgaaagggaagaaacccaagacaaagaagagagtgtggaatctagtttgccccttaatgccattgaaccttgtgtgatttgtcaaggtcgacctaaaaatggttgcattgtccatggcaaaacaggacatcttatggcctgctttacatgtgcaaagaagctaaagaaaaggaataagccctgcccagtatgtagacaaccaattcaaatgattgtgctaacttatttcccctagttgayctgtctataagagaattatatatttctaactatataaccctaggaatttagacaacctgaaatttattcacatatatcaaagtgagaaaatgcctcaattcacatagatttcttctctttagtataattgacctactttggtagtggaatagtgaatacttactataatttgacttgaatatgtagctcatcctttacaccaactcctaattttaaataatttctactctgtcttaaatgagaagtacttggtttttttttttcttaaatatgtatatgacatttaaatgtaacttattattttttttgagaccgagtcttgctctgttacccaggctggagtgcagtggcgtgatcttggctcactgcaagctctgcctcccgggttcgcaccattctcctgcctcagcctcccaattagcttggcctacagtcatctgccaccacacctggctaattttttgtacttttagtagagacagggtttcaccgtgttagccaggatggtctcgatctcctgacctcgtgatccgcccacctcggcctcccaaagtgctgggattacaggcatgagccaccgcgtccggcctaaatgtcacttagtacctttgatataaagagaaaatgtgtgaaagatttagttttttgtttttttgtttgtttgtttgtttgtttgttttgagatgagtctctctgtcgcccaggctggagtgcagtgtcatgatctagcagtctccgcttcccgggttcaagccattctcctggctcagcctctggagcagctgggattacaggcatgcaccaccatgcccagctaatttttgtatttttagtagagatagggtttcaccatgttggccaggctggtcacgaactcctgacctcaagtgaggtcacccgcctcggcctcccgaagtgctgggattgcagatgtgagccaccatgtccagccaagaattagtatttaaattttagatactcttttttttttttttttttttttttgagacagagtcttgctccatcacccatgctagagtgcagtggagtgatctcggctcactgcaacttccgccttctgggttcaagctattctcctgcctcagccttccaagtaactgggattacaggcatgtaccaccataccagctgatttttttgtatttttagtaaagacagggtttcaccatgttagccaggctgatcttgaactcctaaactcaagtgatctactcacctcagcctcccaaaatgctgggattacagatgtgaggcacctggcctcagatttttgatactcttaaaccttctgatccttagtttctctctccaaaatactctttctaggttaaaaaaaaaaaggctcttatatttggtgctatgtaaatgaaaatgttttttaggttttcttgatttaacaatagaracagggtctccctgtgttgcccaggctggtctcgaactcctgggctcaagagatcctcctgtctkggcctcgcaaagtgctaagtaggattacaggcgtkagccaccacacccggctgtaaaaatgtacttattctccagcctcttttgtataaaccatagtaagggatgggagtaatgatgttatctgtgaaaatagccaccatttacccgtaagacaaaacttgttaaagcctcctgagtctaacctagattacatcaggccctttttcacacacaaaaaaatcctttatgggatttaatggaatctgttgtttccccctaagttgaaaaacaactctaaracactttaaagtaccttcttggcctgggttacatggttcccagcctaggtttcagacttttgcttaaggccagttttagaaacccgtgaattcagaaaagttaattcagaaatttgataaacagaattgttatttaaaaactaactggaaagattgttaagttctttctgaattattcagaaattatgcatcattttccttcaagaatgacrgggtcagcatgtggaattccaagatacctcttgacttcctctcaagctccgtgtttggtcagtggaggcccatccgagctcagcactgagaagtgttagtttctttgggacccatctaccctgaccayatcatgatgttcatctgcagctgttgcaaggtgttcagattgtataaacataaatgtcacaaaaactttaaaagaagtgcaattctcaaaaggttaggtggactaaagcattctgtaaagcaactgctaataatgagcttacagtggatttgaatttgaaaaatatagtaacaagcctgtcaaatatctgcaagaactatggaataaaactactgatgcagtgaagacagttgaaaagatcaaacaaatgccaagctatatttataatgaacaaattcaagaaaaaggactacggaaagttcaggacatcaaagaagtcaggcaaaactcatcttgacccctgttgcaggcaaaggaacgcagctggaagaaaagatgatataacagttaacaggatgcagacatggcagaggtttcctaaaaatctcattatctataaccatttctatatttacatttgaaaatctcctttggagacttagaacctctaaattattgacttattttttatataaggtcactccgatgaaaggtgattacaaaatcatctacattgctgtctacaaaacagataatatggatgtttgatcgcatctcattgttaactctttactgatatgtttgtaaatacagaagtgaaatgtggacataaaatagttacgctatttggttaatggtactagacaacatgtaattaatgacattcaaaaatttatggctagtgatatatataaagtaaaattttctttgcagtaaaatatgccctttattatagaagggaggatataaggaaccaacagtttkkatgaaaatagctcaaataatatcttttattttgattttaatatttcttattttggtttattagtgtcttagaacaaaatggccttatataatgaagcctagttatgctggactgttttgatctcttttaattgttctgacagatagttggggatgagagccgaataaggtttgcctgaaataactgacactatataatttctgctttggcaaatactaagttctaacttgtcattcctggtagaacaagctttatttttcgagcctagcaawgatctagaagcagatgttatctcagtgccttttgcaatttgttgtgtgggtttttttttttttaaagccacacaataattttggaaaacaatgtatgggtagaacatgtgtctgttaattgcacacaaaaccacttttaatgggtacagagttaaatttgaaggaataagttctagctgaagtattatgaactccaaataatgctttgaggacctccaaaggtaaaagtactaatccctttggccatttattgagagagasagagagagagagtagggtgactatagttaatgtattgaatgttcttgctacaaataaatgatatttgagctgatgggtgtgctaattacactgatttgatcaatacccattgtatgtgaaacagtacatacaccatatttacaattatgtatttaacatttaaaatttctaatataagtatctctcaaactgtggattaacttcttgatttatatttaaatatgaatcttaagcaaaacagtgaaaataaccatcttgatttagtgtttttctcccatatgtgaattgtatatacttaggtgargacaataaaatcaactgaactgtaagcttagaataggactgaggtaattctgcacagcaactttactaatggtacattgttgcttcaaaactctctctctctctctctgtctgtctcaataaatggccaaagggattagtagtttacctgtggaggtcctccaagcattrtttggagttgataatacttcagctacaaccaagcagaatctcttttttttggag

SEQ ID NO: 3396 - DNA, 4542 bp, Homo sapiens
cgaggcaccgcggcgagcttggctgcttctggggcctgtgtggccctgtgtgtcggaaagatggagcaagaagccgagcccgaggggcggccgcgacccctctgaccgagatcctgctgctttcgcagccaggagcaccgtccctccccggattagtgcgtacgagcgcccagtgccctggcccggagagtggaatgrtccccgaggcccagggcgtcgtgcttccgcgcgccccgtgaaggaaactggggagtcttgagggacccccgactccaagcgcgaaaaccccggatggtgaggagcaggcaaatgtgcaataccaacatgtctgtacctactgatggtgctgtaaccacctcacagattccagcttcggaacaagagaccctggttagaccaaagccattgcttttgaagttattaaagtctgttggtgcacaaaaagacacttatactatgaaagaggttcttttttatcttggccagtatattatgactaaacgattatatgatgagaagcaacaacatatttcaaatgattgtgctaacttatttcccctagttgayctgtctataagagaattatatatttctaactatataaccctaggaatttagacaacctgaaatttattcacatatatcaaagtgagaaaatgcctcaattcacatagatttcttctctttagtataattgacctactttggtagtggaatagtgaatacttactataatttgacttgaatatgtagctcatcctttacaccaactcctaattttaaataatttctactctgtcttaaatgagaagtacttggtttttttttttcttaaatatgtatatgacatttaaatgtaacttattattttttttgagaccgagtcttgctctgttacccaggctggagtgcagtggcgtgatcttggctcactgcaagctctgcctcccgggttcgcaccattctcctgcctcagcctcccaattagcttggcctacagtcatctgccaccacacctggctaattttttgtacttttagtagagacagggtttcaccgtgttagccaggatggtctcgatctcctgacctcgtgatccgcccacctcggcctcccaaagtgctgggattacaggcatgagccaccgcgtccggcctaaatgtcacttagtacctttgatataaagagaaaatgtgtgaaagatttagttttttgtttttttgtttgtttgtttgtttgtttgttttgagatgagtctctctgtcgcccaggctggagtgcagtgtcatgatctagcagtctccgcttcccgggttcaagccattctcctggctcagcctctggagcagctgggattacaggcatgcaccaccatgcccagctaatttttgtatttttagtagagatagggtttcaccatgttggccaggctggtcacgaactcctgacctcaagtgaggtcacccgcctcggcctcccgaagtgctgggattgcagatgtgagccaccatgtccagccaagaattagtatttaaattttagatactcttttttttttttttttttttttttgagacagagtcttgctccatcacccatgctagagtgcagtggagtgatctcggctcactgcaacttccgccttctgggttcaagctattctcctgcctcagccttccaagtaactgggattacaggcatgtaccaccataccagctgatttttttgtatttttagtaaagacagggtttcaccatgttagccaggctgatcttgaactcctaaactcaagtgatctactcacctcagcctcccaaaatgctgggattacagatgtgaggcacctggcctcagatttttgatactcttaaaccttctgatccttagtttctctctccaaaatactctttctaggttaaaaaaaaaaaggctcttatatttggtgctatgtaaatgaaaatgttttttaggttttcttgatttaacaatagaracagggtctccctgtgttgcccaggctggtctcgaactcctgggctcaagagatcctcctgtctkggcctcgcaaagtgctaagtaggattacaggcgtkagccaccacacccggctgtaaaaatgtacttattctccagcctcttttgtataaaccatagtaagggatgggagtaatgatgttatctgtgaaaatagccaccatttacccgtaagacaaaacttgttaaagcctcctgagtctaacctagattacatcaggccctttttcacacacaaaaaaatcctttatgggatttaatggaatctgttgtttccccctaagttgaaaaacaactctaaracactttaaagtaccttcttggcctgggttacatggttcccagcctaggtttcagacttttgcttaaggccagttttagaaacccgtgaattcagaaaagttaattcagaaatttgataaacagaattgttatttaaaaactaactggaaagattgttaagttctttctgaattattcagaaattatgcatcattttccttcaagaatgacrgggtcagcatgtggaattccaagatacctcttgacttcctctcaagctccgtgtttggtcagtggaggcccatccgagctcagcactgagaagtgttagtttctttgggacccatctaccctgaccayatcatgatgttcatctgcagctgttgcaaggtgttcagattgtataaacataaatgtcacaaaaactttaaaagaagtgcaattctcaaaaggttaggtggactaaagcattctgtaaagcaactgctaataatgagcttacagtggatttgaatttgaaaaatatagtaacaagcctgtcaaatatctgcaagaactatggaataaaactactgatgcagtgaagacagttgaaaagatcaaacaaatgccaagctatatttataatgaacaaattcaagaaaaaggactacggaaagttcaggacatcaaagaagtcaggcaaaactcatcttgacccctgttgcaggcaaaggaacgcagctggaagaaaagatgatataacagttaacaggatgcagacatggcagaggtttcctaaaaatctcattatctataaccatttctatatttacatttgaaaatctcctttggagacttagaacctctaaattattgacttattttttatataaggtcactccgatgaaaggtgattacaaaatcatctacattgctgtctacaaaacagataatatggatgtttgatcgcatctcattgttaactctttactgatatgtttgtaaatacagaagtgaaatgtggacataaaatagttacgctatttggttaatggtactagacaacatgtaattaatgacattcaaaaatttatggctagtgatatatataaagtaaaattttctttgcagtaaaatatgccctttattatagaagggaggatataaggaaccaacagtttkkatgaaaatagctcaaataatatcttttattttgattttaatatttcttattttggtttattagtgtcttagaacaaaatggccttatataatgaagcctagttatgctggactgttttgatctcttttaattgttctgacagatagttggggatgagagccgaataaggtttgcctgaaataactgacactatataatttctgctttggcaaatactaagttctaacttgtcattcctggtagaacaagctttatttttcgagcctagcaawgatctagaagcagatgttatctcagtgccttttgcaatttgttgtgtgggtttttttttttttaaagccacacaataattttggaaaacaatgtatgggtagaacatgtgtctgttaattgcacacaaaaccacttttaatgggtacagagttaaatttgaaggaataagttctagctgaagtattatgaactccaaataatgctttgaggacctccaaaggtaaaagtactaatccctttggccatttattgagagagasagagagagagagtagggtgactatagttaatgtattgaatgttcttgctacaaataaatgatatttgagctgatgggtgtgctaattacactgatttgatcaatacccattgtatgtgaaacagtacatacaccatatttacaattatgtatttaacatttaaaatttctaatataagtatctctcaaactgtggattaacttcttgatttatatttaaatatgaatcttaagcaaaacagtgaaaataaccatcttgatttagtgtttttctcccatatgtgaattgtatatacttaggtgargacaataaaatcaactgaactgtaagcttagaataggactgaggtaattctgcacagcaactttactaatggtacattgttgcttcaaaactctctctctctctctctgtctgtctcaataaatggccaaagggattagtagtttacctgtggaggtcctccaagcattrtttggagttgataatacttcagctacaaccaagcagaatctcttttttttggag

SEQ ID NO: 3397 - DNA, 5510 bp, Homo sapiens
cgaggcaccgcggcgagcttggctgcttctggggcctgtgtggccctgtgtgtcggaaagatggagcaagaagccgagcccgaggggcggccgcgacccctctgaccgagatcctgctgctttcgcagccaggagcaccgtccctccccggattagtgcgtacgagcgcccagtgccctggcccggagagtggaatgrtccccgaggcccagggcgtcgtgcttccgcgcgccccgtgaaggaaactggggagtcttgagggacccccgactccaagcgcgaaaaccccggatggtgaggagcaggcaaatgtgcaataccaacatgtctgtacctactgatggtgctgtaaccacctcacagattccagcttcggaacaagagaccctggttaaatcatcggactcaggtacatctgtgagtgagaacaggtgtcaccttgaaggtgggagtgatcaaaaggaccttgtacaagagcttcaggaagagaaaccttcatcttcacatttggtttctagaccatctacctcatctagaaggagagcaattagtgagacagaagaaaattcagatgaattatctggtgaacgacaaagaaaacgccacaaatctgatagtatttccctttcctttgatgaaagcytggctctgtgtgtaataagggagatatgttgtgaaagaagcagtagcagtgaatctacagggacgccatcgaatccggatcttgatgctggtgtaagtgaacattcaggtgattggttggatcaggattcagtttcagatcagtttagtgtagaatttgaagttgaatctctcgactcagaagattatagccttagtgaagaaggacaagaactctcagatgaagatgatgaggtatatcaagttactgtgtatcaggcaggggagagtgatacagattcatttgaagaagatcctgaaatttccttagctgactattggaaatgcacttcatgcaatgaaatgaatcccccccttccatcacattgcaacagatgttgggcccttcgtgagaattggcttcctgaagataaagggaaagataaaggggaaatctctgagaaagccaaactggaaaactcaacacaagctgargagggctttgatgttcctgattgtaaaaaaactatagtgaatgattccagagagtcatgtgttgaggaaaatgatgataaaattacacaagcttcacaatcacaagaaagtgaagactattctcagccatcaacttctagtagcattatttatagcagccaagaagatgtgaaagagtttgaaagggaagaaacccaagacaaagaagagagtgtggaatctagtttgccccttaatgccattgaaccttgtgtgatttgtcaaggtcgacctaaaaatggttgcattgtccatggcaaaacaggacatcttatggcctgctttacatgtgcaaagaagctaaagaaaaggaataagccctgcccagtatgtagacaaccaattcaaatgattgtgctaacttatttcccctagttgayctgtctataagagaattatatatttctaactatataaccctaggaatttagacaacctgaaatttattcacatatatcaaagtgagaaaatgcctcaattcacatagatttcttctctttagtataattgacctactttggtagtggaatagtgaatacttactataatttgacttgaatatgtagctcatcctttacaccaactcctaattttaaataatttctactctgtcttaaatgagaagtacttggtttttttttttcttaaatatgtatatgacatttaaatgtaacttattattttttttgagaccgagtcttgctctgttacccaggctggagtgcagtggcgtgatcttggctcactgcaagctctgcctcccgggttcgcaccattctcctgcctcagcctcccaattagcttggcctacagtcatctgccaccacacctggctaattttttgtacttttagtagagacagggtttcaccgtgttagccaggatggtctcgatctcctgacctcgtgatccgcccacctcggcctcccaaagtgctgggattacaggcatgagccaccgcgtccggcctaaatgtcacttagtacctttgatataaagagaaaatgtgtgaaagatttagttttttgtttttttgtttgtttgtttgtttgtttgttttgagatgagtctctctgtcgcccaggctggagtgcagtgtcatgatctagcagtctccgcttcccgggttcaagccattctcctggctcagcctctggagcagctgggattacaggcatgcaccaccatgcccagctaatttttgtatttttagtagagatagggtttcaccatgttggccaggctggtcacgaactcctgacctcaagtgaggtcacccgcctcggcctcccgaagtgctgggattgcagatgtgagccaccatgtccagccaagaattagtatttaaattttagatactcttttttttttttttttttttttttgagacagagtcttgctccatcacccatgctagagtgcagtggagtgatctcggctcactgcaacttccgccttctgggttcaagctattctcctgcctcagccttccaagtaactgggattacaggcatgtaccaccataccagctgatttttttgtatttttagtaaagacagggtttcaccatgttagccaggctgatcttgaactcctaaactcaagtgatctactcacctcagcctcccaaaatgctgggattacagatgtgaggcacctggcctcagatttttgatactcttaaaccttctgatccttagtttctctctccaaaatactctttctaggttaaaaaaaaaaaggctcttatatttggtgctatgtaaatgaaaatgttttttaggttttcttgatttaacaatagaracagggtctccctgtgttgcccaggctggtctcgaactcctgggctcaagagatcctcctgtctkggcctcgcaaagtgctaagtaggattacaggcgtkagccaccacacccggctgtaaaaatgtacttattctccagcctcttttgtataaaccatagtaagggatgggagtaatgatgttatctgtgaaaatagccaccatttacccgtaagacaaaacttgttaaagcctcctgagtctaacctagattacatcaggccctttttcacacacaaaaaaatcctttatgggatttaatggaatctgttgtttccccctaagttgaaaaacaactctaaracactttaaagtaccttcttggcctgggttacatggttcccagcctaggtttcagacttttgcttaaggccagttttagaaacccgtgaattcagaaaagttaattcagaaatttgataaacagaattgttatttaaaaactaactggaaagattgttaagttctttctgaattattcagaaattatgcatcattttccttcaagaatgacrgggtcagcatgtggaattccaagatacctcttgacttcctctcaagctccgtgtttggtcagtggaggcccatccgagctcagcactgagaagtgttagtttctttgggacccatctaccctgaccayatcatgatgttcatctgcagctgttgcaaggtgttcagattgtataaacataaatgtcacaaaaactttaaaagaagtgcaattctcaaaaggttaggtggactaaagcattctgtaaagcaactgctaataatgagcttacagtggatttgaatttgaaaaatatagtaacaagcctgtcaaatatctgcaagaactatggaataaaactactgatgcagtgaagacagttgaaaagatcaaacaaatgccaagctatatttataatgaacaaattcaagaaaaaggactacggaaagttcaggacatcaaagaagtcaggcaaaactcatcttgacccctgttgcaggcaaaggaacgcagctggaagaaaagatgatataacagttaacaggatgcagacatggcagaggtttcctaaaaatctcattatctataaccatttctatatttacatttgaaaatctcctttggagacttagaacctctaaattattgacttattttttatataaggtcactccgatgaaaggtgattacaaaatcatctacattgctgtctacaaaacagataatatggatgtttgatcgcatctcattgttaactctttactgatatgtttgtaaatacagaagtgaaatgtggacataaaatagttacgctatttggttaatggtactagacaacatgtaattaatgacattcaaaaatttatggctagtgatatatataaagtaaaattttctttgcagtaaaatatgccctttattatagaagggaggatataaggaaccaacagtttkkatgaaaatagctcaaataatatcttttattttgattttaatatttcttattttggtttattagtgtcttagaacaaaatggccttatataatgaagcctagttatgctggactgttttgatctcttttaattgttctgacagatagttggggatgagagccgaataaggtttgcctgaaataactgacactatataatttctgctttggcaaatactaagttctaacttgtcattcctggtagaacaagctttatttttcgagcctagcaawgatctagaagcagatgttatctcagtgccttttgcaatttgttgtgtgggtttttttttttttaaagccacacaataattttggaaaacaatgtatgggtagaacatgtgtctgttaattgcacacaaaaccacttttaatgggtacagagttaaatttgaaggaataagttctagctgaagtattatgaactccaaataatgctttgaggacctccaaaggtaaaagtactaatccctttggccatttattgagagagasagagagagagagtagggtgactatagttaatgtattgaatgttcttgctacaaataaatgatatttgagctgatgggtgtgctaattacactgatttgatcaatacccattgtatgtgaaacagtacatacaccatatttacaattatgtatttaacatttaaaatttctaatataagtatctctcaaactgtggattaacttcttgatttatatttaaatatgaatcttaagcaaaacagtgaaaataaccatcttgatttagtgtttttctcccatatgtgaattgtatatacttaggtgargacaataaaatcaactgaactgtaagcttagaataggactgaggtaattctgcacagcaactttactaatggtacattgttgcttcaaaactctctctctctctctctgtctgtctcaataaatggccaaagggattagtagtttacctgtggaggtcctccaagcattrtttggagttgataatacttcagctacaaccaagcagaatctcttttttttggag

SEQ ID NO: 3398 - DNA, 998 bp, Homo sapiens
cgaggcaccgcggcgagcttggctgcttctggggcctgtgtggccctgtgtgtcggaaagatggagcaagaagccgagcccgaggggcggccgcgacccctctgaccgagatcctgctgctttcgcagccaggagcaccgtccctccccggattagtgcgtacgagcgcccagtgccctggcccggagagtggaatgrtccccgaggcccagggcgtcgtgcttccgcgcgccccgtgaaggaaactggggagtcttgagggacccccgactccaagcgcgaaaaccccggatggtgaggagcaggcaaatgtgcaataccaacatgtctgtacctactgatggtgctgtaaccacctcacagattccagcttcggaacaagagaccctggttagaccaaagccattgcttttgaagttattaaagtctgttggtgcacaaaaagacacttatactatgaaagagtttgaaagggaagaaacccaagacaaagaagagagtgtggaatctagtttgccccttaatgccattgaaccttgtgtgatttgtcaaggtcgacctaaaaatggttgcattgtccatggcaaaacaggacatcttatggcctgctttacatgtgcaaagaagctaaagaaaaggaataagccctgcccagtatgtagacaaccaattcaaatgattgtgctaacttatttcccctagttgayctgtctataagagaattatatatttctaactatataaccctaggaatttagacaacctgaaatttattcacatatatcaaagtgagaaaatgcctcaattcacatagatttcttctctttagtataattgacctactttggtagtggaatagtgaatacttactataatttgacttgaatatgtagctcatcctttacaccaactcctaattttaaataatttctactctgtcttaaatgagaagtacttggtttttttttttcttaaatatgtatatgacatttaaatgt

SEQ ID NO: 3399 - DNA, 5759 bp, Homo sapiens
accgcggcgagcttggctgcttctggggcctgtgtggccctgtgtgtcggaaagatggagcaagaagccgagcccgaggggcggccgcgacccctctgaccgagatcctgctgctttcgcagccaggagcaccgtccctccccggattagtgcgtacgagcgcccagtgccctggcccggagagtggaatgrtccccgaggcccagggcgtcgtgcttccgcgcgccccgtgaaggaaactggggagtcttgagggacccccgactccaagcgcgaaaaccccggatggtgaggagcaggcaaatgtgcaataccaacatgtctgtacctactgatggtgctgtaaccacctcacagattccagcttcggaacaagagaccctggttagaccaaagccattgcttttgaagttattaaagtctgttggtgcacaaaaagacacttatactatgaaagaggttcttttttatcttggccagtatattatgactaaacgattatatgatgagaagcaacaacatattgtatattgttcaaatgatcttctaggagatttgtttggcgtgccaagcttctctgtgaaagagcacaggaaaatatataccatgatctacaggaacttggtagtagtcaatcagcaggaatcatcggactcaggtacatctgtgagtgagaacaggtgtcaccttgaaggtgggagtgatcaaaaggaccttgtacaagagcttcaggaagagaaaccttcatcttcacatttggtttctagaccatctacctcatctagaaggagagcaattagtgagacagaagaaaattcagatgaattatctggtgaacgacaaagaaaacgccacaaatctgatagtatttccctttcctttgatgaaagcytggctctgtgtgtaataagggagatatgttgtgaaagaagcagtagcagtgaatctacagggacgccatcgaatccggatcttgatgctggtgtaagtgaacattcaggtgattggttggatcaggattcagtttcagatcagtttagtgtagaatttgaagttgaatctctcgactcagaagattatagccttagtgaagaaggacaagaactctcagatgaagatgatgaggtatatcaagttactgtgtatcaggcaggggagagtgatacagattcatttgaagaagatcctgaaatttccttagctgactattggaaatgcacttcatgcaatgaaatgaatcccccccttccatcacattgcaacagatgttgggcccttcgtgagaattggcttcctgaagataaagggaaagataaaggggaaatctctgagaaagccaaactggaaaactcaacacaagctgargagggctttgatgttcctgattgtaaaaaaactatagtgaatgattccagagagtcatgtgttgaggaaaatgatgataaaattacacaagcttcacaatcacaagaaagtgaagactattctcagccatcaacttctagtagcattatttatagcagccaagaagatgtgaaagagtttgaaagggaagaaacccaagacaaagaagagagtgtggaatctagtttgccccttaatgccattgaaccttgtgtgatttgtcaaggtcgacctaaaaatggttgcattgtccatggcaaaacaggacatcttatggcctgctttacatgtgcaaagaagctaaagaaaaggaataagccctgcccagtatgtagacaaccaattcaaatgattgtgctaacttatttcccctagttgayctgtctataagagaattatatatttctaactatataaccctaggaatttagacaacctgaaatttattcacatatatcaaagtgagaaaatgcctcaattcacatagatttcttctctttagtataattgacctactttggtagtggaatagtgaatacttactataatttgacttgaatatgtagctcatcctttacaccaactcctaattttaaataatttctactctgtcttaaatgagaagtacttggtttttttttttcttaaatatgtatatgacatttaaatgtaacttattattttttttgagaccgagtcttgctctgttacccaggctggagtgcagtggcgtgatcttggctcactgcaagctctgcctcccgggttcgcaccattctcctgcctcagcctcccaattagcttggcctacagtcatctgccaccacacctggctaattttttgtacttttagtagagacagggtttcaccgtgttagccaggatggtctcgatctcctgacctcgtgatccgcccacctcggcctcccaaagtgctgggattacaggcatgagccaccgcgtccggcctaaatgtcacttagtacctttgatataaagagaaaatgtgtgaaagatttagttttttgtttttttgtttgtttgtttgtttgtttgttttgagatgagtctctctgtcgcccaggctggagtgcagtgtcatgatctagcagtctccgcttcccgggttcaagccattctcctggctcagcctctggagcagctgggattacaggcatgcaccaccatgcccagctaatttttgtatttttagtagagatagggtttcaccatgttggccaggctggtcacgaactcctgacctcaagtgaggtcacccgcctcggcctcccgaagtgctgggattgcagatgtgagccaccatgtccagccaagaattagtatttaaattttagatactcttttttttttttttttttttttttgagacagagtcttgctccatcacccatgctagagtgcagtggagtgatctcggctcactgcaacttccgccttctgggttcaagctattctcctgcctcagccttccaagtaactgggattacaggcatgtaccaccataccagctgatttttttgtatttttagtaaagacagggtttcaccatgttagccaggctgatcttgaactcctaaactcaagtgatctactcacctcagcctcccaaaatgctgggattacagatgtgaggcacctggcctcagatttttgatactcttaaaccttctgatccttagtttctctctccaaaatactctttctaggttaaaaaaaaaaaggctcttatatttggtgctatgtaaatgaaaatgttttttaggttttcttgatttaacaatagaracagggtctccctgtgttgcccaggctggtctcgaactcctgggctcaagagatcctcctgtctkggcctcgcaaagtgctaagtaggattacaggcgtkagccaccacacccggctgtaaaaatgtacttattctccagcctcttttgtataaaccatagtaagggatgggagtaatgatgttatctgtgaaaatagccaccatttacccgtaagacaaaacttgttaaagcctcctgagtctaacctagattacatcaggccctttttcacacacaaaaaaatcctttatgggatttaatggaatctgttgtttccccctaagttgaaaaacaactctaaracactttaaagtaccttcttggcctgggttacatggttcccagcctaggtttcagacttttgcttaaggccagttttagaaacccgtgaattcagaaaagttaattcagaaatttgataaacagaattgttatttaaaaactaactggaaagattgttaagttctttctgaattattcagaaattatgcatcattttccttcaagaatgacrgggtcagcatgtggaattccaagatacctcttgacttcctctcaagctccgtgtttggtcagtggaggcccatccgagctcagcactgagaagtgttagtttctttgggacccatctaccctgaccayatcatgatgttcatctgcagctgttgcaaggtgttcagattgtataaacataaatgtcacaaaaactttaaaagaagtgcaattctcaaaaggttaggtggactaaagcattctgtaaagcaactgctaataatgagcttacagtggatttgaatttgaaaaatatagtaacaagcctgtcaaatatctgcaagaactatggaataaaactactgatgcagtgaagacagttgaaaagatcaaacaaatgccaagctatatttataatgaacaaattcaagaaaaaggactacggaaagttcaggacatcaaagaagtcaggcaaaactcatcttgacccctgttgcaggcaaaggaacgcagctggaagaaaagatgatataacagttaacaggatgcagacatggcagaggtttcctaaaaatctcattatctataaccatttctatatttacatttgaaaatctcctttggagacttagaacctctaaattattgacttattttttatataaggtcactccgatgaaaggtgattacaaaatcatctacattgctgtctacaaaacagataatatggatgtttgatcgcatctcattgttaactctttactgatatgtttgtaaatacagaagtgaaatgtggacataaaatagttacgctatttggttaatggtactagacaacatgtaattaatgacattcaaaaatttatggctagtgatatatataaagtaaaattttctttgcagtaaaatatgccctttattatagaagggaggatataaggaaccaacagtttkkatgaaaatagctcaaataatatcttttattttgattttaatatttcttattttggtttattagtgtcttagaacaaaatggccttatataatgaagcctagttatgctggactgttttgatctcttttaattgttctgacagatagttggggatgagagccgaataaggtttgcctgaaataactgacactatataatttctgctttggcaaatactaagttctaacttgtcattcctggtagaacaagctttatttttcgagcctagcaawgatctagaagcagatgttatctcagtgccttttgcaatttgttgtgtgggtttttttttttttaaagccacacaataattttggaaaacaatgtatgggtagaacatgtgtctgttaattgcacacaaaaccacttttaatgggtacagagttaaatttgaaggaataagttctagctgaagtattatgaactccaaataatgctttgaggacctccaaaggtaaaagtactaatccctttggccatttattgagagagasagagagagagagtagggtgactatagttaatgtattgaatgttcttgctacaaataaatgatatttgagctgatgggtgtgctaattacactgatttgatcaatacccattgtatgtgaaacagtacatacaccatatttacaattatgtatttaacatttaaaatttctaatataagtatctctcaaactgtggattaacttcttgatttatatttaaatatgaatcttaagcaaaacagtgaaaataaccatcttgatttagtgtttttctcccatatgtgaattgtatatacttaggtgargacaataaaatcaactgaactgtaagcttagaataggactgaggtaattctgcacagcaactttactaatggtacattgttgcttcaaaactctctctctctctctctgtctgtctcaataaatggccaaagggattagtagtttacctgtggaggtcctccaagcattrtttggagttgataatacttcagctacaaccaagcagaatctcttttttttggag

SEQ ID NO: 3400 - DNA, 1349 bp, Homo sapiens
cgaggcaccgcggcgagcttggctgcttctggggcctgtgtggccctgtgtgtcggaaagatggagcaagaagccgagcccgaggggcggccgcgacccctctgaccgagatcctgctgctttcgcagccaggagcaccgtccctccccggattagtgcgtacgagcgcccagtgccctggcccggagagtggaatgrtccccgaggcccagggcgtcgtgcttccgcgcgccccgtgaaggaaactggggagtcttgagggacccccgactccaagcgcgaaaaccccggatggtgaggagcaggcaaatgtgcaataccaacatgtctgtacctactgatggtgctgtaaccacctcacagattccagcttcggaacaagagaccctggttagaccaaagccattgcttttgaagttattaaagtctgttggtgcacaaaaagacacttatactatgaaagaggttcttttttatcttggccagtatattatgactaaacgattatatgatgagaagcaacaacatattgtatattgttcaaatgatcttctaggagatttgtttggcgtgccaagcttctctgtgaaagagcacaggaaaatatataccatgatctacaggaacttggtagtagtcaatcagcaggaatcatcggactcaggtacatctgtgagtgagaacaggtgtcaccttgaaggtgggagtgatcaaaaggaccttgtacaagagcttcaggaagagaaaccttcatcttcacatttggtttctagaccatctacctcatctagaaggagagcaattagtgagacagagtttgaaagggaagaaacccaagacaaagaagagagtgtggaatctagtttgccccttaatgccattgaaccttgtgtgatttgtcaaggtcgacctaaaaatggttgcattgtccatggcaaaacaggacatcttatggcctgctttacatgtgcaaagaagctaaagaaaaggaataagccctgcccagtatgtagacaaccaattcaaatgattgtgctaacttatttcccctagttgayctgtctataagagaattatatatttctaactatataaccctaggaatttagacaacctgaaatttattcacatatatcaaagtgagaaaatgcctcaattcacatagatttcttctctttagtataattgacctactttggtagtggaatagtgaatacttactataatttgacttgaatatgtagctcatcctttacaccaactcctaattttaaataatttctactctgtcttaaatgagaagtacttggtttttttttttcttaaatatgtatatgacatttaaatgt

SEQ ID NO: 3401 - DNA, 4688 bp, Homo sapiens
cgaggcaccgcggcgagcttggctgcttctggggcctgtgtggccctgtgtgtcggaaagatggagcaagaagccgagcccgaggggcggccgcgacccctctgaccgagatcctgctgctttcgcagccaggagcaccgtccctccccggattagtgcgtacgagcgcccagtgccctggcccggagagtggaatgrtccccgaggcccagggcgtcgtgcttccgcgcgccccgtgaaggaaactggggagtcttgagggacccccgactccaagcgcgaaaaccccggatggtgaggagcaggcaaatgtgcaataccaacatgtctgtacctactgatggtgctgtaaccacctcacagattccagcttcggaacaagagaccctggttagtaaagaaagtgaagactattctcagccatcaacttctagtagcattatttatagcagccaagaagatgtgaaagagtttgaaagggaagaaacccaagacaaagaagagagtgtggaatctagtttgccccttaatgccattgaaccttgtgtgatttgtcaaggtcgacctaaaaatggttgcattgtccatggcaaaacaggacatcttatggcctgctttacatgtgcaaagaagctaaagaaaaggaataagccctgcccagtatgtagacaaccaattcaaatgattgtgctaacttatttcccctagttgayctgtctataagagaattatatatttctaactatataaccctaggaatttagacaacctgaaatttattcacatatatcaaagtgagaaaatgcctcaattcacatagatttcttctctttagtataattgacctactttggtagtggaatagtgaatacttactataatttgacttgaatatgtagctcatcctttacaccaactcctaattttaaataatttctactctgtcttaaatgagaagtacttggtttttttttttcttaaatatgtatatgacatttaaatgtaacttattattttttttgagaccgagtcttgctctgttacccaggctggagtgcagtggcgtgatcttggctcactgcaagctctgcctcccgggttcgcaccattctcctgcctcagcctcccaattagcttggcctacagtcatctgccaccacacctggctaattttttgtacttttagtagagacagggtttcaccgtgttagccaggatggtctcgatctcctgacctcgtgatccgcccacctcggcctcccaaagtgctgggattacaggcatgagccaccgcgtccggcctaaatgtcacttagtacctttgatataaagagaaaatgtgtgaaagatttagttttttgtttttttgtttgtttgtttgtttgtttgttttgagatgagtctctctgtcgcccaggctggagtgcagtgtcatgatctagcagtctccgcttcccgggttcaagccattctcctggctcagcctctggagcagctgggattacaggcatgcaccaccatgcccagctaatttttgtatttttagtagagatagggtttcaccatgttggccaggctggtcacgaactcctgacctcaagtgaggtcacccgcctcggcctcccgaagtgctgggattgcagatgtgagccaccatgtccagccaagaattagtatttaaattttagatactcttttttttttttttttttttttttgagacagagtcttgctccatcacccatgctagagtgcagtggagtgatctcggctcactgcaacttccgccttctgggttcaagctattctcctgcctcagccttccaagtaactgggattacaggcatgtaccaccataccagctgatttttttgtatttttagtaaagacagggtttcaccatgttagccaggctgatcttgaactcctaaactcaagtgatctactcacctcagcctcccaaaatgctgggattacagatgtgaggcacctggcctcagatttttgatactcttaaaccttctgatccttagtttctctctccaaaatactctttctaggttaaaaaaaaaaaggctcttatatttggtgctatgtaaatgaaaatgttttttaggttttcttgatttaacaatagaracagggtctccctgtgttgcccaggctggtctcgaactcctgggctcaagagatcctcctgtctkggcctcgcaaagtgctaagtaggattacaggcgtkagccaccacacccggctgtaaaaatgtacttattctccagcctcttttgtataaaccatagtaagggatgggagtaatgatgttatctgtgaaaatagccaccatttacccgtaagacaaaacttgttaaagcctcctgagtctaacctagattacatcaggccctttttcacacacaaaaaaatcctttatgggatttaatggaatctgttgtttccccctaagttgaaaaacaactctaaracactttaaagtaccttcttggcctgggttacatggttcccagcctaggtttcagacttttgcttaaggccagttttagaaacccgtgaattcagaaaagttaattcagaaatttgataaacagaattgttatttaaaaactaactggaaagattgttaagttctttctgaattattcagaaattatgcatcattttccttcaagaatgacrgggtcagcatgtggaattccaagatacctcttgacttcctctcaagctccgtgtttggtcagtggaggcccatccgagctcagcactgagaagtgttagtttctttgggacccatctaccctgaccayatcatgatgttcatctgcagctgttgcaaggtgttcagattgtataaacataaatgtcacaaaaactttaaaagaagtgcaattctcaaaaggttaggtggactaaagcattctgtaaagcaactgctaataatgagcttacagtggatttgaatttgaaaaatatagtaacaagcctgtcaaatatctgcaagaactatggaataaaactactgatgcagtgaagacagttgaaaagatcaaacaaatgccaagctatatttataatgaacaaattcaagaaaaaggactacggaaagttcaggacatcaaagaagtcaggcaaaactcatcttgacccctgttgcaggcaaaggaacgcagctggaagaaaagatgatataacagttaacaggatgcagacatggcagaggtttcctaaaaatctcattatctataaccatttctatatttacatttgaaaatctcctttggagacttagaacctctaaattattgacttattttttatataaggtcactccgatgaaaggtgattacaaaatcatctacattgctgtctacaaaacagataatatggatgtttgatcgcatctcattgttaactctttactgatatgtttgtaaatacagaagtgaaatgtggacataaaatagttacgctatttggttaatggtactagacaacatgtaattaatgacattcaaaaatttatggctagtgatatatataaagtaaaattttctttgcagtaaaatatgccctttattatagaagggaggatataaggaaccaacagtttkkatgaaaatagctcaaataatatcttttattttgattttaatatttcttattttggtttattagtgtcttagaacaaaatggccttatataatgaagcctagttatgctggactgttttgatctcttttaattgttctgacagatagttggggatgagagccgaataaggtttgcctgaaataactgacactatataatttctgctttggcaaatactaagttctaacttgtcattcctggtagaacaagctttatttttcgagcctagcaawgatctagaagcagatgttatctcagtgccttttgcaatttgttgtgtgggtttttttttttttaaagccacacaataattttggaaaacaatgtatgggtagaacatgtgtctgttaattgcacacaaaaccacttttaatgggtacagagttaaatttgaaggaataagttctagctgaagtattatgaactccaaataatgctttgaggacctccaaaggtaaaagtactaatccctttggccatttattgagagagasagagagagagagtagggtgactatagttaatgtattgaatgttcttgctacaaataaatgatatttgagctgatgggtgtgctaattacactgatttgatcaatacccattgtatgtgaaacagtacatacaccatatttacaattatgtatttaacatttaaaatttctaatataagtatctctcaaactgtggattaacttcttgatttatatttaaatatgaatcttaagcaaaacagtgaaaataaccatcttgatttagtgtttttctcccatatgtgaattgtatatacttaggtgargacaataaaatcaactgaactgtaagcttagaataggactgaggtaattctgcacagcaactttactaatggtacattgttgcttcaaaactctctctctctctctctgtctgtctcaataaatggccaaagggattagtagtttacctgtggaggtcctccaagcattrtttggagttgataatacttcagctacaaccaagcagaatctcttttttttggag

SEQ ID NO: 3402 - DNA, 1087 bp, Homo sapiens
ctttcacagtcggtgccgcatccccagcccgccgccatggccgcctacaaactggtgctgatccggcacggcgagagcgcatggaacctggagaaccrcttcagckgcyggtamgacgccgayctgagcccggcgggccacgaggaggcgaagcgcggcgggcaggcgctacgagatgytggctatgagtttgacatctgcttcacctcagtgcagaagagagcgatccggaccctctggacagtgctagatgccattgatcagatgtggctgccagtggtgaggacttggcgcctcaatgagcggcactatgggggtctaaccggtctcaataaagcagaaactgctgcaaagcatggtgaggcccaggtgaagatctggaggcgctcctatgatgtcccaccacctccgatggagcccgaccatcctttctacagcaacatcagtaaggatcgtaggtatgcagacctcacagaagatcagctaccctcctgtgagagtctgaaggatactattgccagagctctgccttctggaatgaagaaatagttccccagtcaaggaggggaaacgtgtactgattgggggctctagtcattccagtggaagacgaatgtaacctgcgtggtgatgtgacaactgtttcctccctgaccccagaggatctggctctaggttgggatcaatcctgaatttcgttatgtgttaatttacttttattaaaaaagtatagtatatataaataatacaaaacaataacccttctggggtttcttgtggcggttgaaatagtcccacatgtggtcatcagaaaataagccattcctcataccaatataggatcagctccttgacctctgaggggcaggagtgcttcctggtgtgtgtattaraatcccttcctgccttgtttcatggcagtgaaatgcctcttggtcctgtccaagtgtatctttcactgatttctgaatcatgttctagttgcttgaccctgccacatgggtccagtgttcatctgagcataactgtactaaatcctttttccatatcagtataataaaggagtgatgtgcaaaaaaaaaaaaaa

SEQ ID NO: 3403 - DNA, 892 bp, Homo sapiens
atggccgcctacaaactggtgctgatccggcacggcgagagcgcatggaacctggagaaccrcttcagckgcyggtamgacgccgayctgagcccggcgggccacgaggaggcgaagcgcggcgggcaggcgctacgagatgytggctatgagtttgacatctgcttcacctcagtgaagatctggaggcgctcctatgatgtcccaccacctccgatggagcccgaccatcctttctacagcaacatcagtaaggatcgtaggtatgcagacctcacagaagatcagctaccctcctgtgagagtctgaaggatactattgccagagctctgccttctggaatgaagaaatagttccccagtcaaggaggggaaacgtgtactgattgggggctctagtcattccagtggaagacgaatgtaacctgcgtggtgatgtgacaactgtttcctccctgaccccagaggatctggctctaggttgggatcaatcctgaatttcgttatgtgttaatttacttttattaaaaaagtatagtatatataaataatacaaaacaataacccttctggggtttcttgtggcggttgaaatagtcccacatgtggtcatcagaaaataagccattcctcataccaatataggatcagctccttgacctctgaggggcaggagtgcttcctggtgtgtgtattaraatcccttcctgccttgtttcatggcagtgaaatgcctcttggtcctgtccaagtgtatctttcactgatttctgaatcatgttctagttgcttgaccctgccacatgggtccagtgttcatctgagcataactgtactaaatcctttttccatatcagtataataaaggagtgatgtgcaaaaaaaaaaaaaa

SEQ ID NO: 3404 - DNA, 346 bp, Homo sapiens
cgctcctatgatgtcccaccacctccgatggagcccgaccatcctttctacagcaacatcagtaaggatcgtaggtatgcagacctcacagaagatcagctaccctcctgtgagagtctgaaggatactattgggcaggagtgcttcctggtgtgtgtattaraatcccttcctgccttgtttcatggcagtgaaatgcctcttggtcctgtccaagtgtatctttcactgatttctgaatcatgttctagttgcttgaccctgccacatgggtccagtgttcatctgagcataactgtactaaatcctttttccatatcagtataataaaggagtgatgtgcaaa

SEQ ID NO: 3405 - DNA, 1133 bp, Homo sapiens
gcagaactgagcccaggccacagtaccctattcacgctcttgtttcagggggcaatggcggcttyctgtgttctactgcacactgggcagaagatgcctctgattggtctgggtacctggaagagtgagcctggtcaggtaaaagcagctgttaagtatgcccttagcgtaggctaccgccacattgattgtgctgctatctacggcartgagcctgagattggggaggccctgaaggaggacgtgggaccaggcaaggcggtgcctcgggaggagctgtttgtgacatccaagctgtggaacaccaagcaccaccccgaggatgtggagcctgccctccggaagactctggctgacctccagctggagtatctggacctgtacctgatgcactggccttatgcctttgagcggggagacaaccccttccccaagaatgctgatgggactatatgctacgactccacccactacaaggagacttggaaggctctggaggcactggtggctaaggggctggtgcaggcgctgggcctgtccaacttcaacagtcggcagattgatgacatactcagtgtggcctccgtgcgtccagctgtcttgcaggtggaatgccacccatacttggctcaaaatgagctaattgcccactgccaagcacgtggcctggaggtaactgcttatagccctttgggctcctctgatcgtgcatggcgtgatcctgatgagcctgtcctgctggaggaaccagtagtcctggcattggctgaaaagtatggccgatctccagctcagatcttgctcaggtggcaggtccagcggaaagtgatctgcatccccaaaagtatcactccttctcgaatccttcagaacatcaaggtgtttgacttcacctttagcccagaagagatgaagcagctaaatgccctgaacaaaaattggagatatattgtgcctatgcttacggtggatgggaagagagtcccaagggatgcagggcatcctctgtacccctttaatgacccgtactgagaccacagcttcttggcctcccttccagctctgcagctaatgaggtcctgccacaacggaaagagggagttaataaagccattggagcatccatattgctt

SEQ ID NO: 3406 - DNA, 1357 bp, Homo sapiens
ctggccccgccccttgcaccgcccacgtggccagcgccacctgcctcattgtgcccaggagttctccaaacccgcgctgcggagtgagtgaccaagttccggccagttcgacctcgaggatccagaggtggagacggtactacctcccagctctgttttccatccccttcaggtccttcctcgggaggcggcgaaggcggtccaccctgcgcgtgatccttyatgcccggcccctgcccctccctccgggtggaacttccccctcaccgcyagacttaagctgaggatcgttggatctctggcggggtgcagaactgagcccaggccacagtaccctattcacgctctgtgcttgtgccaaggtaaaagcagctgttaagtatgcccttagcgtaggctaccgccacattgattgtgctgctatctacggcartgagcctgagattggggaggccctgaaggaggacgtgggaccaggcaaggcggtgcctcgggaggagctgtttgtgacatccaagctgtggaacaccaagcaccaccccgaggatgtggagcctgccctccggaagactctggctgacctccagctggagtatctggacctgtacctgatgcactggccttatgcctttgagcggggagacaaccccttccccaagaatgctgatgggactatatgctacgactccacccactacaaggagacttggaaggctctggaggcactggtggctaaggggctggtgcaggcgctgggcctgtccaacttcaacagtcggcagattgatgacatactcagtgtggcctccgtgcgtccagctgtcttgcaggtggaatgccacccatacttggctcaaaatgagctaattgcccactgccaagcacgtggcctggaggtaactgcttatagccctttgggctcctctgatcgtgcatggcgtgatcctgatgagcctgtcctgctggaggaaccagtagtcctggcattggctgaaaagtatggccgatctccagctcagatcttgctcaggtggcaggtccagcggaaagtgatctgcatccccaaaagtatcactccttctcgaatccttcagaacatcaaggtgtttgacttcacctttagcccagaagagatgaagcagctaaatgccctgaacaaaaattggagatatattgtgcctatgcttacggtggatgggaagagagtcccaagggatgcagggcatcctctgtacccctttaatgacccgtactgagaccacagcttcttggcctcccttccagctctgcagctaatgaggtcctgccacaacggaaagagggagttaataaagccattggagcatccatattgctt

SEQ ID NO: 3407 - DNA, 1461 bp, Homo sapiens
agcaaaaggcgaggctggccccgccccttgcaccgcccacgtggccagcgccacctgcctcattgtgcccaggagttctccaaacccgcgctgcggagtgagtgaccaagttccggccagttcgacctcgaggatccagaggtggagacggtactacctcccagctctgttttccatccccttcaggtccttcctcgggaggcggcgaaggcggtccaccctgcgcgtgatccttyatgcccggcccctgcccctccctccgggtggaacttccccctcaccgcyagacttaagctgaggatcgttggatctctggcggggtgcagaactgagcccaggccacagtaccctattcacgctctgtgcttgtgccaagggggcaatggcggcttyctgtgttctactgcacactgggcagaagatgcctctgattggtctgggtacctggaagagtgagcctggtcaggtaaaagcagctgttaagtatgcccttagcgtaggctaccgccacattgattgtgctgctatctacggcartgagcctgagattggggaggccctgaaggaggacgtgggaccaggcaaggcggtgcctcgggaggagctgtttgtgacatccaagctgtggaacaccaagcaccaccccgaggatgtggagcctgccctccggaagactctggctgacctccagctggagtatctggacctgtacctgatgcactggccttatgcctttgagcggggagacaaccccttccccaagaatgctgatgggactatatgctacgactccacccactacaaggagacttggaaggctctggaggcactggtggctaaggggctggtgcaggcgctgggcctgtccaacttcaacagtcggcagattgatgacatactcagtgtggcctccgtgcgtccagctgtcttgcaggtggaatgccacccatacttggctcaaaatgagctaattgcccactgccaagcacgtggcctggaggtaactgcttatagccctttgggctcctctgatcgtgcatggcgtgatcctgatgagcctgtcctgctggaggaaccagtagtcctggcattggctgaaaagtatggccgatctccagctcagatcttgctcaggtggcaggtccagcggaaagtgatctgcatccccaaaagtatcactccttctcgaatccttcagaacatcaaggtgtttgacttcacctttagcccagaagagatgaagcagctaaatgccctgaacaaaaattggagatatattgtgcctatgcttacggtggatgggaagagagtcccaagggatgcagggcatcctctgtacccctttaatgacccgtactgagaccacagcttcttggcctcccttccagctctgcagctaatgaggtcctgccacaacggaaagagggagttaataaagccattggagcatccatattgctt

SEQ ID NO: 3408 - DNA, 1486 bp, Homo sapiens
ctggccccgccccttgcaccgcccacgtggccagcgccacctgcctcattgtgcccaggagttctccaaacccgcgctgcggagtccttcctcgggaggcggcgaaggcggtccaccctgcgcgtgatccttyatgcccggcccctgcccctccctccgggtggaacttccccctcaccgcyagacttaagctgaggatcgttggatctctggcggggtgcagaactgagcccaggccacagtaccctattcacgctctgtgcttgtgccaaggtttcaagtgatcctcccgcctcagcctgcccaggtgctgagattacatgtatgagccactgcacctggaaaggagccagaaatgtgaagtgctagctgaaggatgagcagcagctagccaggcaaagggggcaatggcggcttyctgtgttctactgcacactgggcagaagatgcctctgattggtctgggtacctggaagagtgagcctggtcaggtaaaagcagctgttaagtatgcccttagcgtaggctaccgccacattgattgtgctgctatctacggcartgagcctgagattggggaggccctgaaggaggacgtgggaccaggcaaggcggtgcctcgggaggagctgtttgtgacatccaagctgtggaacaccaagcaccaccccgaggatgtggagcctgccctccggaagactctggctgacctccagctggagtatctggacctgtacctgatgcactggccttatgcctttgagcggggagacaaccccttccccaagaatgctgatgggactatatgctacgactccacccactacaaggagacttggaaggctctggaggcactggtggctaaggggctggtgcaggcgctgggcctgtccaacttcaacagtcggcagattgatgacatactcagtgtggcctccgtgcgtccagctgtcttgcaggtggaatgccacccatacttggctcaaaatgagctaattgcccactgccaagcacgtggcctggaggtaactgcttatagccctttgggctcctctgatcgtgcatggcgtgatcctgatgagcctgtcctgctggaggaaccagtagtcctggcattggctgaaaagtatggccgatctccagctcagatcttgctcaggtggcaggtccagcggaaagtgatctgcatccccaaaagtatcactccttctcgaatccttcagaacatcaaggtgtttgacttcacctttagcccagaagagatgaagcagctaaatgccctgaacaaaaattggagatatattgtgcctatgcttacggtggatgggaagagagtcccaagggatgcagggcatcctctgtacccctttaatgacccgtactgagaccacagcttcttggcctcccttccagctctgcagctaatgaggtcctgccacaacggaaagagggagttaataaagccattggagcatccatattgctt

SEQ ID NO: 3409 - DNA, 1358 bp, Homo sapiens
ctggccccgccccttgcaccgcccacgtggccagcgccacctgcctcattgtgcccaggagttctccaaacccgcgctgcggagtccttcctcgggaggcggcgaaggcggtccaccctgcgcgtgatccttyatgcccggcccctgcccctccctccgggtggaacttccccctcaccgcyagacttaagctgaggatcgttggatctctggcggggtgcagaactgagcccaggccacagtaccctattcacgctctgtgcttgtgccaagggggcaatggcggcttyctgtgttctactgcacactgggcagaagatgcctctgattggtctgggtacctggaagagtgagcctggtcaggtaaaagcagctgttaagtatgcccttagcgtaggctaccgccacattgattgtgctgctatctacggcartgagcctgagattggggaggccctgaaggaggacgtgggaccaggcaaggcggtgcctcgggaggagctgtttgtgacatccaagctgtggaacaccaagcaccaccccgaggatgtggagcctgccctccggaagactctggctgacctccagctggagtatctggacctgtacctgatgcactggccttatgcctttgagcggggagacaaccccttccccaagaatgctgatgggactatatgctacgactccacccactacaaggagacttggaaggctctggaggcactggtggctaaggggctggtgcaggcgctgggcctgtccaacttcaacagtcggcagattgatgacatactcagtgtggcctccgtgcgtccagctgtcttgcaggtggaatgccacccatacttggctcaaaatgagctaattgcccactgccaagcacgtggcctggaggtaactgcttatagccctttgggctcctctgatcgtgcatggcgtgatcctgatgagcctgtcctgctggaggaaccagtagtcctggcattggctgaaaagtatggccgatctccagctcagatcttgctcaggtggcaggtccagcggaaagtgatctgcatccccaaaagtatcactccttctcgaatccttcagaacatcaaggtgtttgacttcacctttagcccagaagagatgaagcagctaaatgccctgaacaaaaattggagatatattgtgcctatgcttacggtggatgggaagagagtcccaagggatgcagggcatcctctgtacccctttaatgacccgtactgagaccacagcttcttggcctcccttccagctctgcagctaatgaggtcctgccacaacggaaagagggagttaataaagccattggagcatccatattgctt

SEQ ID NO: 3410 - DNA, 1213 bp, Homo sapiens
gtttcaagtgatcctcccgcctcagcctgcccaggtgctgagattacatgtatgagccactgcacctggaaaggagccagaaatgtgaagtgctagctgaaggatgagcagcagctagccaggcaaagggggcaatggcggcttyctgtgttctactgcacactgggcagaagatgcctctgattggtctgggtacctggaagagtgagcctggtcaggtaaaagcagctgttaagtatgcccttagcgtaggctaccgccacattgattgtgctgctatctacggcartgagcctgagattggggaggccctgaaggaggacgtgggaccaggcaaggcggtgcctcgggaggagctgtttgtgacatccaagctgtggaacaccaagcaccaccccgaggatgtggagcctgccctccggaagactctggctgacctccagctggagtatctggacctgtacctgatgcactggccttatgcctttgagcggggagacaaccccttccccaagaatgctgatgggactatatgctacgactccacccactacaaggagacttggaaggctctggaggcactggtggctaaggggctggtgcaggcgctgggcctgtccaacttcaacagtcggcagattgatgacatactcagtgtggcctccgtgcgtccagctgtcttgcaggtggaatgccacccatacttggctcaaaatgagctaattgcccactgccaagcacgtggcctggaggtaactgcttatagccctttgggctcctctgatcgtgcatggcgtgatcctgatgagcctgtcctgctggaggaaccagtagtcctggcattggctgaaaagtatggccgatctccagctcagatcttgctcaggtggcaggtccagcggaaagtgatctgcatccccaaaagtatcactccttctcgaatccttcagaacatcaaggtgtttgacttcacctttagcccagaagagatgaagcagctaaatgccctgaacaaaaattggagatatattgtgcctatgcttacggtggatgggaagagagtcccaagggatgcagggcatcctctgtacccctttaatgacccgtactgagaccacagcttcttggcctcccttccagctctgcagctaatgaggtcctgccacaacggaaagagggagttaataaagccattggagcatccatattgctt

SEQ ID NO: 3411 - DNA, 688 bp, Homo sapiens
cagactttgtagctgtttttattattaatattatcttctcctttaagcatccctttaagggtgaaatgaaatccaaccatttacagagaaaatgatttcagaatgtacatattgattttcccttacaaaaaaaataatactattattgatgtccttacattatgcatttcccagggtcctgccttctgcttggacaagtcccgtctccccacccagactctccctgttgcccccaaagatctcccatgctgcccctgggaaccgacgtgacccatgggtggataaggccagccatgcttcccggatgcttggcatggacaggcctccttgggtctaggggtctcagggccagttattcccggggagaaaggtggacatgggacatggcagcagtgtgccggtggtcacattcagcttggtttcccttcatattgagggagtggccctgggttcttctgcccccaccaaattcccagtgtatgctgtgatgatatgtgaaactcttcaatccygtgccctggcccccagccctctgacagctgccctctccaccgatggccaggccttcactcctgctgctgtgaacaggacctgccccaccaggtctgtgaggaaggcagagcctggcagctctgagctgctcctatcttccttcgcttagccctgagctggtgccctggaggggcat

SEQ ID NO: 3412 - DNA, 4104 bp, Homo sapiens
gaagtgcagcacagaaagggggtccgtgggggacrgtagaagcctggaggaggagcttgagtccagccactgtctgggtactgccagccatcgggcccaggtctctggggttgtcttaccgcagtgagtaccacgcggtactacagagaccggctgcccgtgtgcccggcaggtggagccgcccgcatcagcggcctcggggaatggaagcggagaacgcgggcagctattcccttcagcaagctcaagctttttatacgtttccatttcaacaactgatggctgaagctcctaatatggcagttgtgaatgaacagcaaatgccagaagaagttccagccccagctcctgctcaggaaccagtgcaagaggctccaaaaggaagaaaaagaaaacccagaacaacagaaccaaaacaaccagtggaacccaaaaaacctgttgagtcaaaaaaatctggcaagtctgcaaaatcaaaagaaaaacaagaaaaaattacagacacatttaaagtaaaaagaaaagtagaccgttttaatggtgtttcagaagctgaacttctgaccaagactctccccgatattttgaccttcaatctggacattgtcattattggcataaacccgggactaatggctgcttacaaagggcatcattaccctggacctggaaaccatttttggaagtgtttgtttatgtcagggctcagtgaggtccagctgaaccatatggatgatcacactctaccagggaagtatggtattggatttaccaacatggtggaaaggaccacgcccggcagcaaagatctctccagtaaagaatttcgtgaaggaggacgtattctagtacagaaattacagaaatatcagccacgaatagcagtgtttaatggaaaatgtatttatgaaatttttagtaaagaagtttttggagtaaaggttaagaacttggaatttgggcttcagccccataagattccagacacagaaactctctgctatgttatgccatcatccagtgcaagatgtgctcagtttcctcgagcccaagacaaagttcattactacataaaactgaaggacttaagagatcagttgaaaggcattgaacgaaatatggacgttcaagaggtgcaatatacatttgacctacagcttgcccaagaggatgcaaagaagatggctgttaaggaagaaaaatatgatccaggttatgaggcagcatatggtggtgcttacggagaaaatccatgcagcagtgaaccttgtggcttctcttcaaatgggctaattgagagcvtggagttaagaggagaatcagctttcagtggcattcctaatgggcagtggatgacccagtcatttacagaccaaattccttcctttagtaatcactgtggaacacaagaacaggaagaagaaagccatgcttaagaatggtgcttctcagctctgcttaaatgctgcagttttaatgcagttgtcaacaagtagaacctcagtttgctaactgaagtgttttattagtattttactctagtggtgtaattgtaatgtagaacagttgtgtggtagtgtgaaccgtatgaacctaagtagtttggaagaaaaagtagggtttttgtatactagcttttgtatttgaattaattatcattccagctttttatatactatatttcatttatgaagaaattgattttcttttgggagtcacttttaatctgtaattttaaaatacaagtctgaatatttatagttgattcttaactgtgcataaacctagatataccattatcccttttatacctaagaagggcatgctaataattaccactgtcaaagaggcaaaggtgttgatttttgtatatgaagttaagcctcagtggagtctcatttgttagtttttagtggtaactaagsgtaaactcagggttccctgagctatatgcacactcagacctctttgctttaccagtggtgtttgtgagttgctcagtagtaaaaactggcccttacctgacagagccctggctttgacctgctcagccctgtgtgttaatcctctagtagccarttaactactctggggtggcaggttccagagaatgcagtagaccttttgccactcatctgtgttttacttgagacatgtaaatatgatagggaaggaactgaatttctccattcatatttataaccattctagttttatcttccttggctttaagagtgtgccatggaaagtgataagaaatgaacttctaggctaagcaaaaagatgctggagatatttgatactctcatttaaactggtgctttatgtacatgagatgtactaaaataagtaatatagaatttttcttgctaggtaaatccagtaagccaataattttaaagattctttatctgcatcattgctgtttgttactataaattaaatgaacctcatggaaaggttgaggtgtatacctttgtgattttctaatgagttttccatggtgctacaaataatccagactaccaggtctggtagatattaaagctgggtactaagaaatgttatttgcatcctctcagttactcctgaatattctgatttcatacgtacccagggagcatgctgttttgtcaatcaatataaaatatttatgaggtctcccccacccccaggaggttatatgattgctcttctctttataataagagaaacaaattcttattgtgaatcttaacatgctttttagctgtggctatgatggattttattttttcctaggtcaagctgtgtaaaagtcatttatgttatttaaatgatgtactgtactgctgtttacatggacgttttgtgcgggtgctttgaagtgccttgcatcagggattaggagcaattaaattattttttcacgggactgtgtaaagcatgtaactaggtattgctttggtatataactattgtagctttacaagagattgttttatttgaatggggaaaataccctttaaattatgacrgacatccactagagatgggtttgaggattttccaagcgtgtaataatgatgtttttcctaacatgacagatgagtagtaaatgttgatatatcctrtacatgacagtgtgagactttttcattaaataatattgaaagattttaaaattcatttgaaagtctgatggcttttacaataaaagatattaagaattgttatccttaacttacgggctttttctatagcaagactgagtggtattctttcccctttaaacctgaggtcagtttaccttctattatatttaacatgtagaatagtaacatgataaaaatcataaaaatgatgaatattttatttttcagacgtccatattttaaatgtaatagttttataaaagaaaaggttggcaacctgttaaggagatcttcatgtgaaaaatacatgtagaagttttaaaaatttgtggatataattgtcattcagaattaagcaggttgattgctgttatctagatgggtctcttcctttatgtttttcagtcacataatcttgatttccatagttatcacatgtacttaaagaagttaatcaatgcctatatggtccaaggtataatttgcacacagtagtttttggtttttatattgtggatcatatgtatcaaaggtaatattcataaagaacaatgttatagttggctacaaagggacaattccacatttctatacagggaatattttaagggtagagttatatcagctatggtgattgagtttaaatatccctgcagggtcaggaacaaaccagctttcccataagtcgttgtgaacactagggaagtcccaaggtttatgtcttccattccagtggagtaatttagcttcctgcagaaaatgctccgaatatctggcatctggattccagccttcattgtgtatagagaaaaaataataggcttgttagagaataacatttttgtattataaattgaatacaagttcatagtttaaaaaaaggtaaacaaataaaaaggttatacagtgaattttctacccaccccaggtctccaaatcaaccactgttagtctcttgtgaatccttcta

SEQ ID NO: 3413 - DNA, 2813 bp, Homo sapiens
gaagtgcagcacagaaagggggtccgtgggggacrgtagaagcctggaggaggagcttgagtccagccactgtctgggtactgccagccatcgggcccaggtctctggggttgtcttaccgcagtgagtaccacgcggtactacagagaccggctgcccgtgtgcccggcaggtggagccgcccgcatcagcggcctcggggaatggaagcggagaacgcgggcagctattcccttcagcaagctcaagctttttatacgtttccatttcaacaactgatggctgaagctcctaatatggcagttgtgaatgaacagcaaatgccagaagaagttccagccccagctcctgctcaggaaccagtgcaagaggctccaaaaggaagaaaaagaaaacccagaacaacagaaccaaaacaaccagtggaacccaaaaaacctgttgagtcaaaaaaatctggcaagtctgcaaaatcaaaagaaaaacaagaaaaaattacagacacatttaaagtaaaaagaaaagtagaccgttttaatggtgtttcagaagctgaacttctgaccaagactctccccgatattttgaccttcaatctggacattgtcattattggcataaacccgggactaatggctgcttacaaagggcatcattaccctggacctggaaaccatttttggaagtgtttgtttatgtcagggctcagtgaggtccagctgaaccatatggatgatcacactctaccagggaagtatggtattggatttaccaacatggtggaaaggaccacgcccggcagcaaagatctctccagtaaagaatttcgtgaaggaggacgtattctagtacagaaattacagaaatatcagccacgaatagcagtgtttaatggaaaatgtatttatgaaatttttagtaaagaagtttttggagtaaaggttaagaacttggaatttgggcttcagccccataagattccagacacagaaactctctgctatgttatgccatcatccagtgcaagatgtgctcagtttcctcgagcccaagacaaagttcattactacataaaactgaaggacttaagagatcagttgaaaggcattgaacgaaatatggacgttcaagaggtgcaatatacatttgacctacagcttgcccaagaggatgcaaagaagatggctgttaaggaagaaaaatatgatccaggttatgaggcagcatatggtggtgcttacggagaaaatccatgcagcagtgaaccttgtggcttctcttcaaatgggctaattgagagcvtggagttaagaggagaatcagctttcagtggcattcctaatgggcagtggatgacccagtcatttacagaccaaattccttcctttagtaatcactgtggaacacaagaacaggaagaagaaagccatgcttaagaatggtgcttctcagctctgcttaaatgctgcagttttaatgcagttgtcaacaagtagaacctcagtttgctaactgaagtgttttattagtattttactctagtggtgtaattgtaatgtagaacagttgtgtggtagtgtgaaccgtatgaacctaagtagtttggaagaaaaagtagggtttttgtatactagcttttgtatttgaattaattatcattccagctttttatatactatatttcatttatgaagaaattgattttcttttgggagtcacttttaatctgtaattttaaaatacaagtctgaatatttatagttgattcttaactgtgcataaacctagatataccattatcccttttatacctaagaagggcatgctaataattaccactgtcaaagaggcaaaggtgttgatttttgtatatgaagttaagcctcagtggagtctcatttgttagtttttagtggtaactaagsgtaaactcagggttccctgagctatatgcacactcagacctctttgctttaccagtggtgtttgtgagttgctcagtagtaaaaactggcccttacctgacagagccctggctttgacctgctcagccctgtgtgttaatcctctagtagccarttaactactctggggtggcaggttccagagaatgcagtagaccttttgccactcatctgtgttttacttgagacatgtaaatatgatagggaaggaactgaatttctccattcatatttataaccattctagttttatcttccttggctttaagagtgtgccatggaaagtgataagaaatgaacttctaggctaagcaaaaagatgctggagatatttgatactctcatttaaactggtgctttatgtacatgagatgtactaaaataagtaatatagaatttttcttgctaggtaaatccagtaagccaataattttaaagattctttatctgcatcattgctgtttgttactataaattaaatgaacctcatggaaaggttgaggtgtatacctttgtgattttctaatgagttttccatggtgctacaaataatccagactaccaggtctggtagatattaaagctgggtactaagaaatgttatttgcatcctctcagttactcctgaatattctgatttcatacgtacccagggagcatgctgttttgtcaatcaatataaaatatttatgaggagaaacaaattcttattgtgaatcttaacatgctttttagctgtggctatgatggattttattttttcctaggtcaagctgtgtaaaagtcatttatgttatttaaatgatgtactgtactgctgtttacatggacgttttgtgcgggtgcttt

SEQ ID NO: 3414 - DNA, 2915 bp, Homo sapiens
ctccgaggaggcggaagtgcagcacagaaagggggtccgtgggggacrgtagaagcctggaggaggagcttgagtccagccactgtctgggtactgccagccatcgggcccaggtctctggggttgtcttaccgcagtgagtaccacgcggtactacagagaccggctgcccgtgtgcccggcaggtggagccgcccgcatcagcggcctcggggaatggaagcggagaacgcgggcagagtttcactctgttgcccaagatggartacagtggtgcgatcaccgttcactgcaacctctgcttcccgagtttaagcgattctcatgcctattcccttcagcaagctcaagctttttatacgtttccatttcaacaactgatggctgaagctcctaatatggcagttgtgaatgaacagcaaatgccagaagaagttccagccccagctcctgctcaggaaccagtgcaagaggctccaaaaggaagaaaaagaaaacccagaacaacagaaccaaaacaaccagtggaacccaaaaaacctgttgagtcaaaaaaatctggcaagtctgcaaaatcaaaagaaaaacaagaaaaaattacagacacatttaaagtaaaaagaaaagtagaccgttttaatggtgtttcagaagctgaacttctgaccaagactctccccgatattttgaccttcaatctggacattgtcattattggcataaacccgggactaatggctgcttacaaagggcatcattaccctggacctggaaaccatttttggaagtgtttgtttatgtcagggctcagtgaggtccagctgaaccatatggatgatcacactctaccagggaagtatggtattggatttaccaacatggtggaaaggaccacgcccggcagcaaagatctctccagtaaagaatttcgtgaaggaggacgtattctagtacagaaattacagaaatatcagccacgaatagcagtgtttaatggaaaatgtatttatgaaatttttagtaaagaagtttttggagtaaaggttaagaacttggaatttgggcttcagccccataagattccagacacagaaactctctgctatgttatgccatcatccagtgcaagatgtgctcagtttcctcgagcccaagacaaagttcattactacataaaactgaaggacttaagagatcagttgaaaggcattgaacgaaatatggacgttcaagaggtgcaatatacatttgacctacagcttgcccaagaggatgcaaagaagatggctgttaaggaagaaaaatatgatccaggttatgaggcagcatatggtggtgcttacggagaaaatccatgcagcagtgaaccttgtggcttctcttcaaatgggctaattgagagcvtggagttaagaggagaatcagctttcagtggcattcctaatgggcagtggatgacccagtcatttacagaccaaattccttcctttagtaatcactgtggaacacaagaacaggaagaagaaagccatgcttaagaatggtgcttctcagctctgcttaaatgctgcagttttaatgcagttgtcaacaagtagaacctcagtttgctaactgaagtgttttattagtattttactctagtggtgtaattgtaatgtagaacagttgtgtggtagtgtgaaccgtatgaacctaagtagtttggaagaaaaagtagggtttttgtatactagcttttgtatttgaattaattatcattccagctttttatatactatatttcatttatgaagaaattgattttcttttgggagtcacttttaatctgtaattttaaaatacaagtctgaatatttatagttgattcttaactgtgcataaacctagatataccattatcccttttatacctaagaagggcatgctaataattaccactgtcaaagaggcaaaggtgttgatttttgtatatgaagttaagcctcagtggagtctcatttgttagtttttagtggtaactaagsgtaaactcagggttccctgagctatatgcacactcagacctctttgctttaccagtggtgtttgtgagttgctcagtagtaaaaactggcccttacctgacagagccctggctttgacctgctcagccctgtgtgttaatcctctagtagccarttaactactctggggtggcaggttccagagaatgcagtagaccttttgccactcatctgtgttttacttgagacatgtaaatatgatagggaaggaactgaatttctccattcatatttataaccattctagttttatcttccttggctttaagagtgtgccatggaaagtgataagaaatgaacttctaggctaagcaaaaagatgctggagatatttgatactctcatttaaactggtgctttatgtacatgagatgtactaaaataagtaatatagaatttttcttgctaggtaaatccagtaagccaataattttaaagattctttatctgcatcattgctgtttgttactataaattaaatgaacctcatggaaaggttgaggtgtatacctttgtgattttctaatgagttttccatggtgctacaaataatccagactaccaggtctggtagatattaaagctgggtactaagaaatgttatttgcatcctctcagttactcctgaatattctgatttcatacgtacccagggagcatgctgttttgtcaatcaatataaaatatttatgaggagaaacaaattcttattgtgaatcttaacatgctttttagctgtggctatgatggattttattttttcctaggtcaagctgtgtaaaagtcatttatgttatttaaatgatgtactgtactgctgtttacatggacgttttgtgcgggtgcttt

SEQ ID NO: 3415 - DNA, 925 bp, Homo sapiens
atccccagcccgccgccatggccgcctacaaactggtgctgatccggcacggcgagagcgcatggaacctggagaaccgcttcagckgctggtacgacgccgayctgagcccggcgggccacgaggaggcgaagcgcggcgggcaggcgctacgagatgctggctatgagtttgacatctgcttcacctcagtgcagaagagagcgatccggaccctctggacagtgctagatgccattgatcagatgtggctgccagtggtgaggacttggcccaggtgaagatctggaggcgctcctatgatgtcccaccacctccgatggagcccgaccatcctttctacagcaacatcagtaaggatcgcaggtrtgcagacctcacagaasatcagctaccctcctgtgagagtctgaaggatactattgccagagctctgcccttctggaatgaaraaatagttccccagatcaaggaggggaaacgtgtactgattgcagcccatggcaacagcctccggggcattgtcaagcatctggagggtctctctgaagaggctatcatggagctgaacctgccgactggkattcccattgtctatgaattggacaagaacttgaagcctatcaagcccatgcagtttctgggggatgargagacggtgcgcaaagccatggaagctgtggctgcccagggcaaggccaagaagtgaaggccggggcaggagtgcttcctggtttgtgtattagaatcccttcctgccttgtttcatggcagtgaaatgcctcttggtcctgtccaagtgtatctttcactgatttctgaatcatgttctagttgcttgaccctgccacatgggtccagtgttcatytgagcataactgtactaaatcctttttccatatcagtataataaaggagtgatgtg

SEQ ID NO: 3416 - DNA, 1313 bp, Homo sapiens
gactccggaatctgctaatcccagtcggtgccgcatccccagcccgccgccatggccgcctacaaactggtgctgatccggcacggcgagagcgcatggaacctggagaaccgcttcagckgctggtacgacgccgayctgagcccggcgggccacgaggaggcgaagcgcggcgggcaggcgctacgagatgctggctatgagtttgacatctgcttcacctcagtgcagaagagagcgatccggaccctctggacagtgctagatgccattgatcagatgtggctgccagtggtgaggacttggcgcctcaatgagcggcactatgggggtctaaccggtctcaataaagcasaaactgctgcaaagcatggtgaggcccaggtgaagatctggaggcgctcctatgatgtcccaccacctccgatggagcccgaccatcctttctacagcaacatcagtaaggatcgcaggtrtgcagacctcacagaasatcagctaccctcctgtgagagtctgaaggatactattgccagagctctgcccttctggaatgaaraaatagttccccagatcaaggaggggaaacgtgtactgattgcagcccatggcaacagcctccggggcattgtcaagcatctggagggtctctctgaagaggctatcatggagctgaacctgccgactggkattcccattgtctatgaattggacaagaacttgaagcctatcaagcccatgcagtttctgggggatgargagacggtgcgcaaagccatggaagctgtggctgcccagggcaaggccaagaagtgaaggccggcggggargatactgtccccaggagcaccctccctgcccatcttgtccctctgcccctcccacstgcacatgtcacactgaccacatctgtagacatcttgagttgtagctgcagatggggaccagtggctcccattttcattttagccattttgtcgcctgcacccactcccttcatacaatctagtcagaatagcagttctagagcacaggttctcagtctaagctatggaaaagctccccttatccaacagagtttaaaagtagtgacttgggtttttgcgatgcttcctggtttgtgtattagaatcccttcctgccttgtttcatggcagtgaaatgcctcttggtcctgtccaagtgtatctttcactgatttctgaatcatgttctagttgcttgaccctgccacatgggtccagtgttcatytgagcataactgtactaaatcctttttccatatcagtataataaaggagtgatgtgcaata

SEQ ID NO: 3417 - DNA, 1866 bp, Homo sapiens
ccatatacctgataagaagttaatatccaaaatatataagaaactcatacaactcaatagcaaaaaaacaaataacttgatttaaaaataggcaaaggactccggaatctgctaatcccagtcggtgccgcatccccagcccgccgccatggccgcctacaaactggtgctgatccggcacggcgagagcgcatggaacctggagaaccgcttcagckgctggtacgacgccgayctgagcccggcgggccacgaggaggcgaagcgcggcgggcaggcgctacgagatgctggctatgagtttgacatctgcttcacctcagtgcagaagagagcgatccggaccctctggacagtgctagatgccattgatcagatgtggctgccagtggtgaggacttggcgcctcaatgagcggcactatgggggtctaaccggtctcaataaagcasaaactgctgcaaagcatggtgaggcccaggtgaagatctggaggcgctcctatgatgtcccaccacctccgatggagcccgaccatcctttctacagcaacatcagtaaggatcgcaggtrtgcagacctcacagaasatcagctaccctcctgtgagagtctgaaggatactattgccagagctctgcccttctggaatgaaraaatagttccccagatcaaggaggggaaacgtgtactgattgcagcccatggcaacagcctccggggcattgtcaagcatctggagggtctctctgaagaggctatcatggagctgaacctgccgactggkattcccattgtctatgaattggacaagaacttgaagcctatcaagcccatgcagtttctgggggatgargagacggtgcgcaaagccatggaagctgtggctgcccagggcaaggccaagaagtgaaggccggcggggargatactgtccccaggagcaccctccctgcccatcttgtccctctgcccctcccacstgcacatgtcacactgaccacatctgtagacatcttgagttgtagctgcagatggggaccagtggctcccattttcattttagccattttgtcgcctgcacccactcccttcatacaatctagtcagaatagcagttctagagcacaggttctcagtctaagctatggaaaagctccccttatccaacagagtttaaaagtagtgacttgggtttttgcgagtgctttgtttactaaggactttggggaggaaccatgctaagccatgaccagtgagragaagcaacagagcctgtctgtccccatgagcggagtctgtcctctgctcttctgcagtcaggtcactgcctactgcctgggggctctagtcattccagtggaagacgaatgtaacctgcgtggtgatgtgacaactgtttcctccctgaccccagaggatctggctctaggttgggatcaatcctgaatttcgttatgtgttaatttacttttattaaaaaagtatagtatatataaataatacaaaacaataacccttctggggtttcttgtggcggttgaaatagtcccacatgtggtcatcagaaaataagccattcctcataccaatataggatcagctccttgacctctgaggggcaggagtgcttcctggtttgtgtattagaatcccttcctgccttgtttcatggcagtgaaatgcctcttggtcctgtccaagtgtatctttcactgatttctgaatcatgttctagttgcttgaccctgccacatgggtccagtgttcatytgagcataactgtactaaatcctttttccatatcagtataataaaggagtgatgtgcaatagcaaaaaaaaaaaaaaaaaaaaaaaawtaggc

SEQ ID NO: 3418 - DNA, 1364 bp, Homo sapiens
atggccgcctacaaactggtgctgatccggcacggcgagagcgcatggaacctggagaaccgcttcagckgctggtacgacgccgayctgagcccggcgggccacgaggaggcgaagcgcggcgggcaggcgctacgagatgctggctatgagtttgacatctgcttcacctcagtgaagatctggaggcgctcctatgatgtcccaccacctccgatggagcccgaccatcctttctacagcaacatcagtaaggatcgcaggtrtgcagacctcacagaasatcagctaccctcctgtgagagtctgaaggatactattgccagagctctgcccttctggaatgaaraaatagttccccagatcaaggaggggaaacgtgtactgattgcagcccatggcaacagcctccggggcattgtcaagcatctggagggtctctctgaagaggctatcatggagctgaacctgccgactggkattcccattgtctatgaattggacaagaacttgaagcctatcaagcccatgcagtttctgggggatgargagacggtgcgcaaagccatggaagctgtggctgcccagggcaaggccaagaagtgaaggccggcggggargatactgtccccaggagcaccctccctgcccatcttgtccctctgcccctcccacstgcacatgtcacactgaccacatctgtagacatcttgagttgtagctgcagatggggaccagtggctcccattttcattttagccattttgtcgcctgcacccactcccttcatacaatctagtcagaatagcagttctagagcacaggttctcagtctaagctatggaaaagctccccttatcctaaggactttggggaggaaccatgctaagccatgaccagtgagragaagcaacagagcctgtctgtccccatgagcggagtctgtcctctgctcttctgcagtcaggtcactgcctactgcctgggggctctagtcattccagtggaagacgaatgtaacctgcgtggtgatgtgacaactgtttcctccctgaccccagaggatctggctctaggttgggatcaatcctgaatttcgttatgtgttaatttacttttattaaaaaagtatagtatatataaataatacaaaacaataacccttctggggtttcttgtggcggttgaaatagtcccacatgtggtcatcagaaaataagccattcctcataccatgtatctttcactgatttctgaatcatgttctagttgcttgaccctgccacatgggtccagtgttcatytgagcataactgtactaaatcctttttccatatcagtataataaaggagtgatgtgcaat

SEQ ID NO: 3419 - DNA, 2056 bp, Homo sapiens
aattcttccctccgagacccagcccgctgcttgccacttccctctccaaacgctggcgggggtgggtggcagcaccgaggcgattttcttcgtctttttttcctccgggttttgtcatggaaacgctgacacaacctccagacggcggccgagcccggccgrggactgagggcttttgggaccctgcgggagcgcggcgcgcacaccgcactccccgggcaacagctggacgcgaccatatcccgggtaggggcggggggagcgcgacgctccgccccggcgctagggtccctccctcctcccggctctccgcaggcgccctcccctcgccgggggccgcgagttgcatttggtaaaacccagccccggaatatatagatcgttggagcgcaatgaagtagcctttggagagaagggagagggcccgtcggacagycacagcggccagcgcagcggcagcggcggcggcaccaccatcaccgctcgcaccccagccgcccggcccgcgaccaggcagcggcggccgccggcgggatcggaggaggcggcggacgactccgatcctccctctgagccttgctcagctctgccccgcgcctcccgggctccggtccgcgcggcggggtccctgctcctgcgccccgggcgcgcttcccggacaccccggtccccgcagccaggacaaagccatgaagccagcgctgctggaagtgatgaggatgaacagaatctgccggatggtgctggccacttgcttgggatcctttatcctggtcatcttctatttccaaagtatgttgcacccagtcatgcggaggaatccctttggtgtggacatctgctgccggaaggggtcccgaagccccctgcaggaactctacaacccaatccagctggagctctcaaacactgctgtcctgcaccagatgcggcgggaccaggtgacagacacgtgccgagccaacagcgccacaagccgtaagcggagggtgctgacccccaacgacctgaagcacttggtggtggatgaggaccacgagctcatctactgctacgtgcccaaggtggcctgcaccaactggaagcggctcatgatggtcctgaccgggcgggggaagtacagcgaccccatggagatcccggccaacgaggcacacgtctccgccaacctgaagaccctgaaccagtacagcatcccagaaatcaaccaccgcttgaaaagctacatgaagttcctgtttgtccgggagcccttcgagaggctagtgtccgcctaccgcaacaagttcacccagaagtacaacatctccttccacaagcggtacggcaccaagatcatcaaacgccagcggaagaacgccacccaggaggccctgcgcaaaggggacgatgtcaaattcgaggagtttgtggcctatctcatcgacccacacacccagcgggaggagcctttcaacgaacactggcaaaccgtctactcactctgccatccctgccacatccactatgacctcgtgggcaagtacgagacactggaagaggattctaattacgtcctgcagctggcaggagtgggcagctacctgaagttccccacctatgcaaagtctacgagaactactgatgaaatgaccacagaattcttccagaacatcagctcagagcaccaaacgcagctgtacgaagtctacaaactcgattttttaatgttcaattactcagtgccaagctacctgaaattggaataaagggggtggggagagggagagaatcatgctttttaatttaagatttttatttgtcaaaagaattatatggatattgggttattttgtaaattaatatttctttggggatgatgctgcgagcagcatagtgagaattatttaaaatccttcgtagggaaggacagctgtctttgcaggggaaataggatgggtcgtccttgtctgtagaagtgaatactgcaacactgtctcaaaggtttcttgtgttctggtgaattccatgaattgtgcattccataaattctaattaatattatttatagttattt

SEQ ID NO: 3420 - DNA, 1911 bp, Homo sapiens
atgcttagggcactggaatccctggtggcactgggatcactgtgccaggttttagccatcccagaggtgccagagagatgcaaatggcagcgccagtccttggaggagccagtctggggcccctggctgatgttggcagaagacacatccctctctcccttcaaggatgctgaagagctctctgtctactactaccctgggcccacttttctctccaacaaggtgcagaaaagggcatcgttgccaggtttgcaagatcgtaacaagacagtgcattgtaggcgccctcccctcgccgggggccgcgagttgcatttggtaaaacccagccccggaatatatagatcgttggagcgcaatgaagtagcctttggagagaagggagagggcccgtcggacagycacagcggccagcgcagcggcagcggcggcggcaccaccatcaccgctcgcaccccagccgcccggcccgcgaccaggcagcggcggccgccggcgggatcggaggaggcggcggagcggcgaggaggaggagcaggagcgcgcagccagcgggtccacgcatctcagcacttccagaccaactccggcaccttccacacccctgcccgggctgggggctccgagagcggccgcgaagcgactccgatcctccctctgagccttgctcagctctgccccgcgcctcccgggctccgagcccctgctgtggaacaggagttccagaccagtgttgtctccggggacattgacacagcagccaagtttattggtgttggggcagccacagttggtgtgggtggttcaggggctggcattggagcggtgtttggcagcctgatcattggctgtgccagaaacctgtctctcaagcagcagctcttcttctatgccattctgggctttgccctgtctgaggtcatggggctcttctgtttgatggttgccttcctcatcctcttcaccatatatggaaaaagagacctggaggagttttccaagatgttgtcaggttataagaagagctacctggataaagaggaaaataaggtgaaaatgccagcactagctgccctcagagarccatcttatgctgaccgcatgtggttctcttatggttcctatgggcttgagccaggaccaaaacctaagaccctgagccagccaaccagtgatattgctttccccatccagaatgaggaaaaagggggacttgaggctgtaccggggttggtggggagtgtgttgttgctgctctgctgtctagcagctaccgttgccatggagcagcaagagagctctgtggctgagtgcatcatagctcttaggtacagcagacctattggattgatcagcagcagaactgttatgcctgggttggaggaagaggacgggttgcgaaaggaacttcctttgcatgcggtcagwgtgctgggccatctgaacagccccctccacrgtctgcaacatttctacattctgatagaaacagttagtggtcttgacgtgtctgacaacctacaaaaccaacatatcctggggtttgatctctctggtggtgtcagaggagtccaaatcatgcggaggaatccctttggtgtggacatctgctgccggaaggggtcccgaagccccctgcaggaactctacaacccaatccaggtgcagaggcggctggmcatcagggtggacggtttcctgggacccagtgaagagtatggcgcttttgtcccaagtctccgattcatgctgatgcccgatgtttcccccagaagttccttccggaaagcrataaatgagctggagtttgaaaagaagtgtgacttcttcaaggaactggcagatactaggggagttcagaagcagctgacatccaattattcacggtcatgsgggaaagggattgaatga

SEQ ID NO: 3421 - DNA, 9175 bp, Homo sapiens
atggtcttgcttctttgtytatcttgtctgattttctcctgtctgaccttttcctggttaaaaatctgggggaaaatgacggactccaagccgatcaccaagagtaaatcagaagcaaacctcatcccgagccaggagccctttccagcctctgataactcaggggagacaccgcagagaaatggggagggccacactctgcccaagacacccagccaggccgagccagcctcccacaaaggccccaaagatgcyggtcggcggagaaactccctaccaccctcccaccagaagcccccaagaaaccccctttcttccagtgacgcagcaccctccccagagcttcaagccaacgggactgggacacaaggtctggaggccacagataccaatggcctgtcctcctcagccaggccccagggccagcaagctggctccccctccaaagaagacaagaagcaggcaaacatcaagaggcagctgatgaccaacttcatcctgggctcttttgatgactactcctcygacgaggactctgttgctggctcatctcgtgagtctacccggaagggcagccgggccagcttgggggccctgtccctggaggcttatctgaccacaggtgaagctgagacccgcgtccccactatgaggccgagcatgtcgggactccacctggtgaagaggggacgggaacacaagaagctggacctgcacagagactttaccgtggcttctcccgctgagtttgtcacacgctttgggggggatcgggtcatcgagaaggtgcttattgccaacaacgggattgccgcygtgaagtgcatgcgctccatccgcaggtgggcctatgagatgttccgcaacgagcgggccatccggtttgttgtgatggtgacccccgaggaccttaaggccaacgcagagtacatcaagatggcggatcattacgtccccgtcccaggagggcccaataacaacaactatgccaacgtggagctgattgtggacattgccaagagaatccccgtgcaggcggtgtgggctggctggggccatgcttcagaaaaccctaaacttccggagctgctgtgcaagaatggagttgctttcttaggccctcccagtgaggccatgtgggccttaggagataagatcgcctccaccgttgtcgcccagacgctacaggtcccaaccctgccctggagtggaagcggcctgacagtggagtggacagaagatgatctgcagcagggaaaaagaatcagtgtcccagaagatgtttatgacaagggttgcgtgaaagacgtagatgagggcttggaggcagcagaaagaattggttttccattgatgatcaaagcttctgaaggtggcggagggaagggaatccggaaggctgagagtgcggaggacttcccgatccttttcagacaagtacagagtgagatcccaggctcgcccatctttctcatgaagctggcccagcacgcccgtcacctggaagttcagatcctcgctgaccagtatgggaatgctgtgtctctgtttggtcgcgactgctccatccagcggcggcatcagaagatcgtkgaggaagcaccggccaccatcgccccgctggccatattcgagttcatggagcagtgtgccrtccgcctggccaagaccgtgggctatgtgagtgcagggacagtggaatacctctatagtcaggatggcagcttccacttcttggagctgaatcctcgcttgcaggtggaacatccctgcacagaaatgattgctgaygttaatctgccggccgcccagctacagggttttaagccgagctccgggactgtccaggaactgaatttccggagcagcaagaacgtgtggggttacttcagcgtggccgctactggaggcctgcacgagtttgcggattcccaatttgggcactgcttctcctggggagagaaccgggaagaggccatttcgaacatggtggtggctttgaaggaactgtccatccgaggygactttaggactaccgtggaatacctcattaacctcctggagaccgagagcttccagaacaacgacatcgacaccgggtggttggactacctcattgctgagaaagtgcaggcggagaaaccggatatcatgcttggggtggtatgcggggccttgaacgtggccgatgcgatgttcagaacgtgcatgacagatttcttacactccctggaaaggggccaggtcctcccagcggattcactactgaacctcgtagatgtggaattaatttacggaggtgttaagtacattctcaaggtggcccggcagtctctgaccrtgttcgttctcatcatgaatggctgccacatcgagattgatgcccaccggctgaatgatggggggctcctgctctcctacaatgggaacagctacaccacctacatgaaggaagaggttgacagttaccgaattaccatcggcaataagacgtgtgtgtttgagaaggagaacgatcctacagtcctgagatccccctcggctgggaagctgacacagtacacagtggaggatgggggccacgttgaggctgggagcagctacgctgagatggaggtgatgaagatgatcatgaccctgaacgttcaggaaagaggccgggtgaagtacatcaagcgtccaggtgccgtgctggaagcaggctgcgtggtggccaggctggagctcgatgacccttctaaagtccacccggctgaaccrttcacaggagaactccctgcccagcagacactgcccatcctcggagagaaactgcaccaggtcttccacagcgtcctggaaaacctcaccaaygtcatgagtggcttttgtctgccagagcccgtttttagcataaagctgaaggagtgggtgcagaagctcatgatgaccctccggcacccgtcactgccgctgctggagctgcaggagatcatgaccagcgtggcaggccgcatccccgcccctgtggagaagtctgtccgcagggtgatggcccagtatgccagcaacatcacctcggtgctgtgccagttccccagccagcagatagccaccatcctggactgccatgcagccaccctgcagcggaaggctgatcgagaggtcttcttcatcaacacccagagcatcgtgcagttggtccagagataccgcagcgggatccgcggctatatgaaaacagtggtgttggatctcctgagaagatacttgcgtgttgagcaccattttcagcaaggcaagagatgctgatgccaacaccagtgggatggtggggggcgtgaggagcctgagctttacctctgtgtggtgttttgtctcccccagcccactacgacaagtgtgtgataaacctcagggagcagttcaagccagacatgtcccaggtgctggactgcatcttctcccacgcacaggtggccaagaagaaccagctggtgatcatgttgatcgatgagctgtgtggcccagacccttccctgtcggacgagctgatctccatcctcaacgagctcactcagctgagcaaaagcgagcactgcaaagtggccctcagagcccggcagatcctgattgcctcccacctcccctcctacgagctgcggcataaccaggtggagtccattttcctgtctgccattgacatgtacggccaccagttctgccccgagaacctcaagaaattaatactttcggaaacaaccatcttcgacgtcctgcctactttcttctatcacgcaaacaaagtcgtgtgcatggcgtccttggaggtttacgtgcggaggggctacatcgcctatgagttaaacagcctgcagcaccggcagctcccggacrgcacctgcgtggtagaattccagttcatgctgccgtcctcccacccaaaccggatgaccgtgcccatcagcatcaccaaccctgacctgctgaggcacagcacagagctcttcatggacagcggcttctccccactgtgccagcgcatgggagccatggtagccttcaggagattcgaggacttcaccagaaattttgatgaagtcatctcttgcttcgccaacgtgcccaaagacacccccctcttcagcgaggcccgcacctccctatactccgaggatgactgcaagagcctcagagaagagcccatccacattctgaatgtgtccatccagtgtgcagaccacctggaggatgaggcactggtgccgattttacggacattcgtacagtccaagaaaaatatccttgtggattatggactccgacgaatcacattcttgattgcccaagagaaagaatttcccaagtttttcacattcagagcaagagatgagtttgcagaagatcgcatttaccgtcacttggaacctgccctggccttccagctggaactyaaccggatgcgtaacttcgatctgaccgccgtgccctgtgccaaccacaagatgcacctttacctgggtgctgccaaggtgaaggaaggtgtggaagtgacggaccataggttcttcatccgcgccatcatcaggcactctgacctgatcacaaaggaagcctccttcgaatacctgcagaacgagggtgagcggctgctcctggaggccatggacgagctggaggtggcgttcaataacaccagcgtgcgcaccgactgcaaccacatcttcctcaacttcgtgcccactgtcatcatggaccccttcaagatcgaggagtccgtgcgctacatggttatgcgctacggcagccggctgtggaaactccgtgtgctacaggctgaggtcaagatcaacatccgccagaccaccaccggcagtgccgttcccatccgcctgttcatcaccaatgagtcgggctactacctggacatcagcctctacaaagaagtgactgactccagatctggaaatatcatgtttcactccttcggcaacaagcaagggcsccagcacgggatgctgatcaatactscctacgtcaccaaggatctgctccaggccaagcgattccaggcccagaccctgggaaccacctacatctatgacttcccggaaatgttcaggcaggcaagctctctttaaactgtggggctccccagacaagtatcccaaagacatcctgacatacactgaattagtgttggactctcagggccagctggtggagatgaaccgacttcctggtggaaatgaggtgggcatggtggccttcaaaatgaggtttaagacccaggagtacccggaaggacgggatgtgatcgtcatcggcaatgacatcacctttcgcattggatcctttggccctggagaggaccttctgtacctgcgggcatccragatggcccgggcagagggcattcccaaaatttacgtggcagccaacagtggcgcccgtattggcatggcagaggagatcaaacacatgttccacgtggcttgggtggacccagaagacccccacaaaggatttaaatacctgtacctgactccccaagactacaccagaatcagctccctgaactccgtccactgtaaacacatcgaggaaggaggagagtccagatacatgatcacggatatcatcrggaaggatgatggcttgggcgtggagaatctgaggggctcaggcatgattgctggggagtcctctctggcttacgaagagatcgtcaccattagcttggtgacctgccgagccattgggattggggcctacttggtgaggctgggccagcgagtgatccaggtggagaattcccacatcatcctcacaggagcaagtgctctcaacaaggtcctgggaagagaggtctacacatccaacaaccagctgggtggcgttcagatcatgcattacaatggtgtctcccacatcaccgtgccagatgactttgagggggtttataccatcctggagtggctgtcctatatgccaaaggataatcacagccctgtccctatcatcacacccaytgaccccattgacagagaaattgaattcctcccatccagagctccctacgacccccggtggatgcttgcaggaaggcctcacccaactctgaagggaacgtggcagagcggattctttgaccayggcagtttcaaggaaatcatggcaccctgggcgcagaccgtggtgacaggacgagcaaggcttggggggattcccgtgggagtgattgctgtggagacacggactgtggaggtggcagtccctgcagaccctgccaacctggattctgaggccaagataattcagcaggcaggacaggtgtggttcccagactcagcctacaaaacygcccaggccrtcaaggacttcaaccgggagaagttgcccctgatgatctttgccaactggagggggttctccggtggcatgaaagacatgtatgaccaggtgctgaagtttggagcctacatcgtggacggccttagacaatacaaacagcccatcctgatctatatcccgccctatgcggagctccggggaggctcctgggtggtcatagatgccaccatcaaccckctgtgcatagaaatgtatgcagacaaagagagcaggggtggtgttctggaaccagaggggacagtggagattaagttccgaaagaaagatctgataaagtccatgagaaggatcgatccagcttacaagaagctcatggaacagctaggggaacctgatctctccgacaaggaccgaaaggacctggagggccggctaaaggctcgcgaggacctgctgctccccatctaccaccaggtggcggtgcagttcgccgacttccatgacacacccggccggatgctggagaagggcgtcatatctgacatcctggagtggaagaccgcacgcaccttcctgtattggcgtctgcgccgcctcctcctggaggaccaggtcaagcaggagatcctgcaggccagcggggagctgagtcacgtgcatatccagtccatgctgcgtcgctggttcgtggagacggagggggctgtcaaggcctacttgtgggacaacaaccaggtggttgtgcagtggctggaacagcactggcaggcaggggatggcccgcgctccaccatccgtgagaacatcacgtacctgaagcacgactctgtcctcaagaccatccgaggcctggttgaagaaaaccccgaggtggccgtggactgtgtgatatacctgagccagcacatcagcccagctgagcgggcgcaggtcgttcacctgctgtctaccatggacagcccggcctccacctgaccgtggcccrcccagccactcccgggaccacggcaaaaggaaccacccagacccaccacccgtacaccctcagcagaccctgaagacttgcttttaaacaaagaaaatcctgggcacttctgcagggctgctggttccgagctgacacccgtcttaayaaaaggcccaggagtgcctcttccaaacaaaaacagcctcctctccatagctgggaagtttattttgttttgtctctgaagacagcagttttattgcatcactaaatctaatcaagctaaaacatccctgtttccttttgcaaaacagtgcctggcatgtgggatccaggcgttctttaggatccttggataccacatcgtgaaatcttttatttttttactctgagaccagcaccagatgtaagtaagcatctcatatatttcagccaaataaatgggccaagggaaaaaaatatatatatatagacaggactagagaaaacctatttttgtaatgatgtttctttggatactgtctagtcacccagaaaaatgtatggatgaattttttttttttttttttgagacaaagtctcactgtgtcatgcaggctggagtgcagtggcatgatctcactgcaacctccatctcctgtctcagcctcctagataactgggattacaggtgcccaccaccatgcccggctaatttttgtatttttggtagagacagagtttcaccaggttggtcaggctggtctcaaactcttgacttcaggtaatccacccaccttggcctcccaaagtgmtgggattacaggcatgagccaccatcttcagccagatgatttttttattgagagagtgaaatgctattttgttccccaaatggcgctagtgaatcactaggagggtcccactgataggccatgtttagcactggttgccagggattctctttttgagagagggaaagcaaaatgaatggaagtacccagctggaggtttcagggcttctggaggatgctctcgcatagctcgaggtcctctgcccacctcttctctccaaggaaaatgaggactgccccttccccctgcaggattggcccccagcctgcgcatgcaccctcctcttgcccaagtggggagcacagaggcggagaggaatcccttaccacacccacggcccagcttgctcacgagtgtcacctctgtgacggtcaccactgctcccttggagggccacttgagttactgttgcttcctcgcctgctggcttgatgagcaccgatggtgggatctgaccccgaggggcagagctgtcggtgactgaggactggactgtggtgaccatgccgatttgctcagggagaacgttgcaatgcacccagcagctcctggctctgcaggcggcacagcctggggccctgtgatcctctggtttcttccaytggggcggagtcggggrtggagggagctggccacaacccactgctctgatgggtggtttgtccaargatgctgaatgtaatgcctggtcaatgtggaagcccatgaggttgcccagggaagcctccaaaagctgggatgcttgagggtatccaagttgaaaaagacaaaatctgaccatcagccagtgacagtcctggcaaatgaaggtggggcggggcagtgaggggtgggagaaggtgaatgattcattattccaccccgaggtttgctggggtgaggggaagaatcgatgctgctttgggaactgaaggtttttctgttgggaaggccctcttggttttggagagaaagacaagttatgagtagctgctaccctggaacggtgggcagagagcctactaggaaatgtgcagaataaactattttttgaaggaaaca

SEQ ID NO: 3422 - DNA, 9023 bp, Homo sapiens
atggtcttgcttctttgtytatcttgtctgattttctcctgtctgaccttttcctggttaaaaatctgggggaaaatgacggactccaagccgatcaccaagagtaaatcagaagcaaacctcatcccgagccaggagccctttccagcctctgataactcaggggagacaccgcagagaaatggggagggccacactctgcccaagacacccagccaggccgagccagcctcccacaaaggccccaaagatgcyggtcggcggagaaactccctaccaccctcccaccagaagcccccaagaaaccccctttcttccagtgacgcagcaccctccccagagcttcaagccaacgggactgggacacaaggtctggaggccacagataccaatggcctgtcctcctcagccaggccccagggccagcaagctggctccccctccaaagaagacaagaagcaggcaaacatcaagaggcagctgatgaccaacttcatcctgggctcttttgatgactactcctcygacgaggactctgttgctggctcatctcgtgagtctacccggaagggcagccgggccagcttgggggccctgtccctggaggcttatctgaccacaggtgaagctgagacccgcgtccccactatgaggccgagcatgtcgggactccacctggtgaagaggggacgggaacacaagaagctggacctgcacagagactttaccgtggcttctcccgctgagtttgtcacacgctttgggggggatcgggtcatcgagaaggtgcttattgccaacaacgggattgccgcygtgaagtgcatgcgctccatccgcaggtgggcctatgagatgttccgcaacgagcgggccatccggtttgttgtgatggtgacccccgaggaccttaaggccaacgcagagtacatcaagatggcggatcattacgtccccgtcccaggagggcccaataacaacaactatgccaacgtggagctgattgtggacattgccaagagaatccccgcggtgtgggctggctggggccatgcttcagaaaaccctaaacttccggagctgctgtgcaagaatggagttgctttcttaggccctcccagtgaggccatgtgggccttaggagataagatcgcctccaccgttgtcgcccagacgctacaggtcccaaccctgccctggagtggaagcggcctgacagtggagtggacagaagatgatctgcagcagggaaaaagaatcagtgtcccagaagatgtttatgacaagggttgcgtgaaagacgtagatgagggcttggaggcagcagaaagaattggttttccattgatgatcaaagcttctgaaggtggcggagggaagggaatccggaaggctgagagtgcggaggacttcccgatccttttcagacaagtacagagtgagatcccaggctcgcccatctttctcatgaagctggcccagcacgcccgtcacctggaagttcagatcctcgctgaccagtatgggaatgctgtgtctctgtttggtcgcgactgctccatccagcggcggcatcagaagatcgtkgaggaagcaccggccaccatcgccccgctggccatattcgagttcatggagcagtgtgccrtccgcctggccaagaccgtgggctatgtgagtgcagggacagtggaatacctctatagtcaggatggcagcttccacttcttggagctgaatcctcgcttgcaggtggaacatccctgcacagaaatgattgctgaygttaatctgccggccgcccagctacagatcgccatgggcgtgccactgcaccggctgaaggatatccggcttctgtatggagagtcaccatggggagtgactcccatttcttttgaaaccccctcaaaccctcccctcgcccgaggccacgtcattgccrccagaatcaccagcgaaaacccagacgaggcaaccgagctccgggactgtccaggaactgaatttccggagcagcaagaacgtgtggggttacttcagcgtggccgctactggaggcctgcacgagtttgcggattcccaatttgggcactgcttctcctggggagagaaccgggaagaggccatttcgaactgtccatccgaggygactttaggactaccgtggaatacctcattaacctcctggagaccgagagcttccagaacaacgacatcgacaccgggtggttggactacctcattgctgagaaagtgcagaaaccggatatcatgcttggggtggtatgcggggccttgaacgtggccgatgcgatgttcagaacgtgcatgacagatttcttacactccctggaaaggggccaggtcctcccagcggattcactactgaacctcgtagatgtggaattaatttacggaggtgttaagtacattctcaaggtggcccggcagtctctgaccrtgttcgttctcatcatgaatggctgccacatcgagattgatgcccaccggctgaatgatggggggctcctgctctcctacaatgggaacagctacaccacctacatgaaggaagaggttgacagttaccgaattaccatcggcaataagacgtgtgtgtttgagaaggagaacgatcctacagtcctgagatccccctcggctgggaagctgacacagtacacagtggaggatgggggccacgttgaggctgggagcagctacgctgagatggaggtgatgaagatgatcatgaccctgaacgttcaggaaagaggccgggtgaagtacatcaagcgtccaggtgccgtgctggaagcaggctgcgtggtggccaggctggagctcgatgacccttctaaagtccacccggctgaaccrttcacaggagaactccctgcccagcagacactgcccatcctcggagagaaactgcaccaggtcttccacagcgtcctggaaaacctcaccaaygtcatgagtggcttttgtctgccagagcccgtttttagcataaagctgaaggagtgggtgcagaagctcatgatgaccctccggcacccgtcactgccgctgctggagctgcaggagatcatgaccagcgtggcaggccgcatccccgcccctgtggagaagtctgtccgcagggtgatggcccagtatgccagcaacatcacctcggtgctgtgccagttccccagccagcagatagccaccatcctggactgccatgcagccaccctgcagcggaaggctgatcgagaggtcttcttcatcaacacccagagcatcgtgcagttggtccagaggatgtggttgtcacctgaatcgtcgcatgcattgcaccagggtggcaagagatgctgatgccaacaccagtgggatggtggggggcgtgaggagcctgagctttacctctgtgtggtgttttgtctcccccagcccactacgacaagtgtgtgataaacctcagggagcagttcaagccagacatgtcccaggtgctggactgcatcttctcccacgcacaggtggccaagaagaaccagctggtgatcatgttgatcctgtgtggcccagacccttccctgtcggacgagctgatctccatcctcaacgagctcactcagctgagcaaaagcgagcactgcaaagtggccctcagagcccggcagttcccttagaaattaatactttcggaaacaaccatcttcgacgtcctgcctactttcttctatcacgcaaacaaagtcgtgtgcatggcgtccttggagttaaacagcctgcagcaccggcagctcccggacrgcacctgcgtggtagaattccagttcatgctgccgtcctcccacccaaaccggcacagcacagagctcttcatggacagcggcttctccccactgtgccagcgcatgggagccatggtagccttcaggagattcgaggacttcaccagtcatctcttgcttcgccaacgtgcccaaagacacccccctcttcagcgaggcccgcacctccctatactccgaggatgactgcaagcctcagagaagagcccatccacattctgaatgtgtccatccagtgtgcagaccacctggaggatgaggcactggtgccgattttacggacattcgtacagtccaagaaaaatatccttgtggattatggactccgacgaatcacattcttgattgcccaagagaaagaatttcccaagtttttcacattcagagcaagagatgagtttgcagaagatcgcatttaccgtcacttggaacctgccctggccttccagctggaactyaaccggatgcgtaacttcgatctgaccgccgtgccctgtgccaaccacaagatgcacctttacctgggtgctgccaaggtgaaggaaggtgtggaagtgacggaccataggttcttcatccgcgccatcatcaggcactctgacctgatcacaaaggaagcctccttcgaatacctgcagaacgagggtgagcggctgctcctggaggccatggacgagctggaggtggcgttcaataacaccagcgtgcgcaccgactgcaaccacatcttcctcaacttcgtgcccactgtcatcatggaccccttcaagatcgaggagtccgtgcgctacatggttatgcgctacggcagccggctgtggaaactccgtgtgctacaggctgaggtcaagatcaacatccgccagaccaccaccggcagtgccgttcccatccgcctgttcatcaccaatgagtcgggctactacctggacatcagcctctacaaagaagtgactgactccagatctggaaatatcatgtttcactccttcggcaacaagcaagggcsccagcacgggatgctgatcaatactscctacgtcaccaaggatctgctccaggccaagcgattccaggcccagaccctgggaaccacctacatctatgacttcccggaaatgttcaggcaggcaaacaagtatcccaaagacatcctgacatacactgaattagtgttggactctcagggccagctggtggagatgaaccgacttcctggtggaaatgaggtgggcatggtggccttcaaaatgaggtttaagacccaggagtacccggaaggacgggatgtgatcgtcatcggcaatgacatcacctttcgcattggatcctttggccctggagaggaccttctgtacctgcgggcatccragatggcccgggcagagggcattcccaaaatttacgtggcagccaacagtggcgcccgtattggcatggcagaggagatcaaacacatgttccacgtggcttgggtggacccagaagacccccacaaaggatttaaatacctgtacctgactccccaagactacaccagaatcagctccctgaactccgtccactgtaaacacatcgaggaaggaggagagtccagatacatgatcacggatatcatcrggaaggatgatggcttgggcgtggagaatctgaggggctcaggcatgattgctggggagtcctctctggcttacgaagagatcgtcaccattagcttggtgacctgccgagccattgggattggggcctacttggtgaggctgggccagcgagtgatccaggtggagaattcccacatcatcctcacaggagcaagtgctctcaacaaggtcctgggaagagaggtctacacatccaacaaccagctgggtggcgttcagatcatgcattacaatggtgtctcccacatcaccgtgccagatgactttgagggggtttataccatcctggagtggctgtcctatatgccaaaggataatcacagccctgtccctatcatcacacccaytgaccccattgacagagaaattgaattcctcccatccagagctccctacgacccccggtggatgcttgcaggaaggcctcacccaactctgaagggaacgtggcagagcggattctttgaccayggcagtttcaaggaaatcatggcaccctgggcgcagaccgtggtgacaggacgagcaaggcttggggggattcccgtgggagtgattgctgtggagacacggactgtggaggtggcagtccctgcagaccctgccaacctggattctgaggccaagataattcagcaggcaggacaggtgtggttcccagactcagcctacaaaacygcccaggccrtcaaggacttcaaccgggagaagttgcccctgatgatctttgccaactggagggggttctccggtggcatgaaagacatgtatgaccaggtgctgaagtttggagcctacatcgtggacggccttagacaatacaaacagcccatcctgatctatatcccgccctatgcggagctccggggaggctcctgggtggtcatagatgccaccatcaaccckctgtgcatagaaatgtatgcagacaaagagagcaggggtggtgttctggaaccagaggggacagtggagattaagttccgaaagaaagatctgataaagtccatgagaaggatcgatccagcttacaagaagctcatggaacagctaggggaacctgatctctccgacaaggaccgaaaggacctggagggccggctaaaggctcgcgaggacctgctgctccccatctaccaccaggtggcggtgcagttcgccgacttccatgacacacccggccggatgctggagaagggcgtcatatctgacatcctggagtggaagaccgcacgcaccttcctgtattggcgtctgcgccgcctcctcctggaggaccaggtcaagcaggagatcctgcaggccagcggggagctgagtcacgtgcatatccagtccatgctgcgtcgctggttcgtggagacggagggggctgtcaaggcctacttgtgggacaacaaccaggtggttgtgcagtggctggaacagcactggcaggcaggggatggcccgcgctccaccatccgtgagaacatcacgtacctgaagcacgactctgtcctcaagaccatccgaggcctggttgaagaaaaccccgaggtggccgtggactgtgtgatatacctgagccagcacatcagcccagctgagcgggcgcaggtcgttcacctgctgtctaccatggacagcccggcctccacctgaccgtggcccrcccagccactcccgggaccacggcaaaaggaaccacccagacccaccacccgtacaccctcagcagaccctgaagacttgcttttaaacaaagaaaatcctgggcacttctgcagggctgctggttccgagctgacacccgtcttaayaaaaggcccaggagtgcctcttccaaacaaaaacagcctcctctccatagctgggaagtttattttgttttgtctctgaagacagcagttttattgcatcactaaatctaatcaagctaaaacatccctgtttccttttgcaaaacagtgcctggcatgtgggatccaggcgttctttaggatccttggataccacatcgtgaaatcttttatttttttactctgagaccagcaccagatgtaagtaagcatctcatatatttcagccaaataaatgggccaagggaaaaaaatatatatatatagacaggactagagaaaacctatttttgtaatgatgtttctttggatactgtctagtcacccagaaaaatgtatggatgaattttttttttttttttttgagacaaagtctcactgtgtcatgcaggctggagtgcagtggcatgatctcactgcaacctccatctcctgtctcagcctcctagataactgggattacaggtgcccaccaccatgcccggctaatttttgtatttttggtagagacagagtttcaccaggttggtcaggctggtctcaaactcttgacttcaggtaatccacccaccttggcctcccaaagtgmtgggattacaggcatgagccaccatcttcagccagatgatttttttattgagagagtgaaatgctattttgttccccaaatggcgctagtgaatcactaggagggtcccactgataggccatgtttagcactggttgccagggattctctttttgagagagggaaagcaaaatgaatggaagtacccagctggaggtttcagggcttctggaggatgctctcgcatagctcgaggtcctctgcccacctcttctctccaaggaaaatgaggactgccccttccccctgcaggattggcccccagcctgcgcatgcaccctcctcttgcccaagtggggagcacagaggcggagaggaatcccttaccacacccacggcccagcttgctcacgagtgtcacctctgtgacggtcaccactgctcccttggagggccacttgagttactgttgcttcctcgcctgctggcttgatgagcaccgatggtgggatctgaccccgaggggcagagctgtcggtgactgaggactggactgtggtgaccatgccgatttgctcagggagaacgttgcaatgcacccagcagctcctggctctgcaggcggcacagcctggggccctgtgatcctctggtttcttccaytggggcggagtcggggrtggagggagctggccacaacccactgctctgatgggtggtttgtccaargatgctgaatgtaatgcctggtcaatgtggaagcccatgaggttgcccagggaagcctccaaaagctgggatgcttgagggtatccaagttgaaaaagacaaaatctgaccatcagccagtgacagtcctggcaaatgaaggtggggcggggcagtgaggggtgggagaaggtgaatgattcattattccaccccgaggtttgctggggtgaggggaagaatcgatgctgctttgggaactgaaggtttttctgttgggaaggccctcttggttttggagagaaagacaagttatgagtagctgctaccctggaacggtgggcagagagcctactaggaaatgtgcagaataaactattttttgaaggaaaca

SEQ ID NO: 3423 - DNA, 9325 bp, Homo sapiens
atggtcttgcttctttgtytatcttgtctgattttctcctgtctgaccttttcctggttaaaaatctgggggaaaatgacggactccaagccgatcaccaagagtaaatcagaagcaaacctcatcccgagccaggagccctttccagcctctgataactcaggggagacaccgcagagaaatggggagggccacactctgcccaagacacccagccaggccgagccagcctcccacaaaggccccaaagatgcyggtcggcggagaaactccctaccaccctcccaccagaagcccccaagaaaccccctttcttccagtgacgcagcaccctccccagagcttcaagccaacgggactgggacacaaggtctggaggccacagataccaatggcctgtcctcctcagccaggccccagggccagcaagctggctccccctccaaagaagacaagaagcaggcaaacatcaagaggcagctgatgaccaacttcatcctgggctcttttgatgactactcctcygacgaggactctgttgctggctcatctcgtgagtctacccggaagggcagccgggccagcttgggggccctgtccctggaggcttatctgaccacaggtgaagctgagacccgcgtccccactatgaggccgagcatgtcgggactccacctggtgaagaggggacgggaacacaagaagctggacctgcacagagactttaccgtggcttctcccgctgagtttgtcacacgctttgggggggatcgggtcatcgagaaggtgcttattgccaacaacgggattgccgcygtgaagtgcatgcgctccatccgcaggtgggcctatgagatgttccgcaacgagcgggccatccggtttgttgtgatggtgacccccgaggaccttaaggccaacgcagagtacatcaagatggcggatcattacgtccccgtcccaggagggcccaataacaacaactatgccaacgtggagctgattgtggacattgccaagagaatcccctgtttgcaggcggtgtgggctggctggggccatgcttcagaaaaccctaaacttccggagctgctgtgcaagaatggagttgctttcttaggccctcccagtgaggccatgtgggccttaggagataagatcgcctccaccgttgtcgcccagacgctacaggtcccaaccctgccctggagtggaagcggcctgacagtggagtggacagaagatgatctgcagcagggaaaaagaatcagtgtcccagaagatgtttatgacaagggttgcgtgaaagacgtagatgagggcttggaggcagcagaaagaattggttttccattgatgatcaaagcttctgaaggtggcggagggaagggaatccggaaggctgagagtgcggaggacttcccgatccttttcagacaagtacagagtgagatcccaggctcgcccatctttctcatgaagctggcccagcacgcccgtcacctggaagttcagatcctcgctgaccagtatgggaatgctgtgtctctgtttggtcgcgactgctccatccagcggcggcatcagaagatcgtkgaggaagcaccggccaccatcgccccgctggccatattcgagttcatggagcagtgtgccrtccgcctggccaagaccgtgggctatgtgagtgcagggacagtggaatacctctatagtcaggatggcagcttccacttcttggagctgaatcctcgcttgcaggtggaacatccctgcacagaaatgattgctgaygttaatctgccggccgcccagctacagatcgccatgggcgtgccactgcaccggctgaaggatatccggcttctgtatggagagtcaccatggggagtgactcccatttcttttgaaaccccctcaaaccctcccctcgcccgaggccacgtcattgccrccagaatcaccagcgaaaacccagacgagggttttaagccgagctccgggactgtccaggaactgaatttccggagcagcaagaacgtgtggggttacttcagcgtggccgctactggaggcctgcacgagtttgcggattcccaatttgggcactgcttctcctggggagagaaccgggaagaggccatttcgaacatggtggtggctttgaaggaactgtccatccgaggygactttaggactaccgtggaatacctcattaacctcctggagaccgagagcttccagaacaacgacatcgacaccgggtggttggactacctcattgctgagaaagtgcagaaaccggatatcatgcttggggtggtatgcggggccttgaacgtggccgatgcgatgttcagaacgtgcatgacagatttcttacactccctggaaaggggccaggtcctcccagcggattcactactgaacctcgtagatgtggaattaatttacggaggtgttaagtacattctcaaggtggcccggcagtctctgaccrtgttcgttctcatcatgaatggctgccacatcgagattgatgcccaccggctgaatgatggggggctcctgctctcctacaatgggaacagctacaccacctacatgaaggaagaggttgacagttaccgaattaccatcggcaataagacgtgtgtgtttgagaaggagaacgatcctacagtcctgagatccccctcggctgggaagctgacacagtacacagtggaggatgggggccacgttgaggctgggagcagctacgctgagatggaggtgatgaagatgatcatgaccctgaacgttcaggaaagaggccgggtgaagtacatcaagcgtccaggtgccgtgctggaagcaggctgcgtggtggccaggctggagctcgatgacccttctaaagtccacccggctgaaccrttcacaggagaactccctgcccagcagacactgcccatcctcggagagaaactgcaccaggtcttccacagcgtcctggaaaacctcaccaaygtcatgagtggcttttgtctgccagagcccgtttttagcataaagctgaaggagtgggtgcagaagctcatgatgaccctccggcacccgtcactgccgctgctggagctgcaggagatcatgaccagcgtggcaggccgcatccccgcccctgtggagaagtctgtccgcagggtgatggcccagtatgccagcaacatcacctcggtgctgtgccagttccccagccagcagatagccaccatcctggactgccatgcagccaccctgcagcggaaggctgatcgagaggtcttcttcatcaacacccagagcatcgtgcagttggtccagagataccgcagcgggatccgcggctatatgaaaacagtggtgttggatctcctgagaagatacttgcgtgttgagcaccattttcagcaaggcaagagatgctgatgccaacaccagtgggatggtggggggcgtgaggagcctgagctttacctctgtgtggtgttttgtctcccccagcccactacgacaagtgtgtgataaacctcagggagcagttcaagccagacatgtcccaggtgctggactgcatcttctcccacgcacaggtggccaagaagaaccagctggtgatcatgttgatcgatgagctgtgtggcccagacccttccctgtcggacgagctgatctccatcctcaacgagctcactcagctgagcaaaagcgagcactgcaaagtggccctcagagcccggcaggtagggtctcaggctcccctcctacgagctgcggcataaccaggtggagtccattttcctgtctgccattgacatgtacggccaccagttctgccccgagaacctcaagaaattaatactttcggaaacaaccatcttcgacgtcctgcctactttcttctatcacgcaaacaaagtcgtgtgcatggcgtccttggaggtttacgtgcggaggggctacatcgcctatgagttaaacagcctgcagcaccggcagctcccggacrgcacctgcgtggtagaattccagttcatgctgccgtcctcccacccaaaccggatgaccgtgcccatcagcatcaccaaccctgacctgctgaggcacagcacagagctcttcatggacagcggcttctccccactgtgccagcgcatgggagccatggtagccttcaggagattcgaggacttcaccagaaattttgatgaagtcatctcttgcttcgccaacgtgcccaaagacacccccctcttcagcgaggcccgcacctccctatactccgaggatgactgcaagagcctcagagaagagcccatccacattctgaatgtgtccatccagtgtgcagaccacctggaggatgaggcactggtgccgattttacggacattcgtacagtccaagaaaaatatccttgtggattatggactccgacgaatcacattcttgattgcccaagagaaagaatttcccaagtttttcacattcagagcaagagatgagtttgcagaagatcgcatttaccgtcacttggaacctgccctggccttccagctggaactyaaccggatgcgtaacttcgatctgaccgccgtgccctgtgccaaccacaagatgcacctttacctgggtgctgccaaggtgaaggaaggtgtggaagtgacggaccataggttcttcatccgcgccatcatcaggcactctgacctgatcacaaaggaagcctccttcgaatacctgcagaacgagggtgagcggctgctcctggaggccatggacgagctggaggtggcgttcaataacaccagcgtgcgcaccgactgcaaccacatcttcctcaacttcgtgcccactgtcatcatggaccccttcaagatcgaggagtccgtgcgctacatggttatgcgctacggcagccggctgtggaaactccgtgtgctacaggctgaggtcaagatcaacatccgccagaccaccaccggcagtgccgttcccatccgcctgttcatcaccaatgagtcgggctactacctggacatcagcctctacaaagaagtgactgactccagatctggaaatatcatgtttcactccttcggcaacaagcaagggcsccagcacgggatgctgatcaatactscctacgtcaccaaggatctgctccaggccaagcgattccaggcccagaccctgggaaccacctacatctatgacttcccggaaatgttcaggcaggctctctttaaactgtggggctccccagacaagtatcccaaagacatcctgacatacactgaattagtgttggactctcagggccagctggtggagatgaaccgacttcctggtggaaatgaggtgggcatggtggccttcaaaatgaggtttaagacccaggagtacccggaaggacgggatgtgatcgtcatcggcaatgacatcacctttcgcattggatcctttggccctggagaggaccttctgtacctgcgggcatccragatggcccgggcagagggcattcccaaaatttacgtggcagccaacagtggcgcccgtattggcatggcagaggagatcaaacacatgttccacgtggcttgggtggacccagaagacccccacaaaggatttaaatacctgtacctgactccccaagactacaccagaatcagctccctgaactccgtccactgtaaacacatcgaggaaggaggagagtccagatacatgatcacggatatcatcrggaaggatgatggcttgggcgtggagaatctgaggggctcaggcatgattgctggggagtcctctctggcttacgaagagatcgtcaccattagcttggtgacctgccgagccattgggattggggcctacttggtgaggctgggccagcgagtgatccaggtggagaattcccacatcatcctcacaggagcaagtgctctcaacaaggtcctgggaagagaggtctacacatccaacaaccagctgggtggcgttcagatcatgcattacaatggtgtctcccacatcaccgtgccagatgactttgagggggtttataccatcctggagtggctgtcctatatgccaaaggataatcacagccctgtccctatcatcacacccaytgaccccattgacagagaaattgaattcctcccatccagagctccctacgacccccggtggatgcttgcaggaaggcctcacccaactctgaagggaacgtggcagagcggattctttgaccayggcagtttcaaggaaatcatggcaccctgggcgcagaccgtggtgacaggacgagcaaggcttggggggattcccgtgggagtgattgctgtggagacacggactgtggaggtggcagtccctgcagaccctgccaacctggattctgaggccaagataattcagcaggcaggacaggtgtggttcccagactcagcctacaaaacygcccaggccrtcaaggacttcaaccgggagaagttgcccctgatgatctttgccaactggagggggttctccggtggcatgaaagacatgtatgaccaggtgctgaagtttggagcctacatcgtggacggccttagacaatacaaacagcccatcctgatctatatcccgccctatgcggagctccggggaggctcctgggtggtcatagatgccaccatcaaccckctgtgcatagaaatgtatgcagacaaagagagcaggggtggtgttctggaaccagaggggacagtggagattaagttccgaaagaaagatctgataaagtccatgagaaggatcgatccagcttacaagaagctcatggaacagctaggggaacctgatctctccgacaaggaccgaaaggacctggagggccggctaaaggctcgcgaggacctgctgctccccatctaccaccaggtggcggtgcagttcgccgacttccatgacacacccggccggatgctggagaagggcgtcatatctgacatcctggagtggaagaccgcacgcaccttcctgtattggcgtctgcgccgcctcctcctggaggaccaggtcaagcaggagatcctgcaggccagcggggagctgagtcacgtgcatatccagtccatgctgcgtcgctggttcgtggagacggagggggctgtcaaggcctacttgtgggacaacaaccaggtggttgtgcagtggctggaacagcactggcaggcaggggatggcccgcgctccaccatccgtgagaacatcacgtacctgaagcacgactctgtcctcaagaccatccgaggcctggttgaagaaaaccccgaggtggccgtggactgtgtgatatacctgagccagcacatcagcccagctgagcgggcgcaggtcgttcacctgctgtctaccatggacagcccggcctccacctgaccgtggcccrcccagccactcccgggaccacggcaaaaggaaccacccagacccaccacccgtacaccctcagcagaccctgaagacttgcttttaaacaaagaaaatcctgggcacttctgcagggctgctggttccgagctgacacccgtcttaayaaaaggcccaggagtgcctcttccaaacaaaaacagcctcctctccatagctgggaagtttattttgttttgtctctgaagacagcagttttattgcatcactaaatctaatcaagctaaaacatccctgtttccttttgcaaaacagtgcctggcatgtgggatccaggcgttctttaggatccttggataccacatcgtgaaatcttttatttttttactctgagaccagcaccagatgtaagtaagcatctcatatatttcagccaaataaatgggccaagggaaaaaaatatatatatatagacaggactagagaaaacctatttttgtaatgatgtttctttggatactgtctagtcacccagaaaaatgtatggatgaattttttttttttttttttgagacaaagtctcactgtgtcatgcaggctggagtgcagtggcatgatctcactgcaacctccatctcctgtctcagcctcctagataactgggattacaggtgcccaccaccatgcccggctaatttttgtatttttggtagagacagagtttcaccaggttggtcaggctggtctcaaactcttgacttcaggtaatccacccaccttggcctcccaaagtgmtgggattacaggcatgagccaccatcttcagccagatgatttttttattgagagagtgaaatgctattttgttccccaaatggcgctagtgaatcactaggagggtcccactgataggccatgtttagcactggttgccagggattctctttttgagagagggaaagcaaaatgaatggaagtacccagctggaggtttcagggcttctggaggatgctctcgcatagctcgaggtcctctgcccacctcttctctccaaggaaaatgaggactgccccttccccctgcaggattggcccccagcctgcgcatgcaccctcctcttgcccaagtggggagcacagaggcggagaggaatcccttaccacacccacggcccagcttgctcacgagtgtcacctctgtgacggtcaccactgctcccttggagggccacttgagttactgttgcttcctcgcctgctggcttgatgagcaccgatggtgggatctgaccccgaggggcagagctgtcggtgactgaggactggactgtggtgaccatgccgatttgctcagggagaacgttgcaatgcacccagcagctcctggctctgcaggcggcacagcctggggccctgtgatcctctggtttcttccaytggggcggagtcggggrtggagggagctggccacaacccactgctctgatgggtggtttgtccaargatgctgaatgtaatgcctggtcaatgtggaagcccatgaggttgcccagggaagcctccaaaagctgggatgcttgagggtatccaagttgaaaaagacaaaatctgaccatcagccagtgacagtcctggcaaatgaaggtggggcggggcagtgaggggtgggagaaggtgaatgattcattattccaccccgaggtttgctggggtgaggggaagaatcgatgctgctttgggaactgaaggtttttctgttgggaaggccctcttggttttggagagaaagacaagttatgagtagctgctaccctggaacggtgggcagagagcctactaggaaatgtgcagaataaactattttttgaaggaaaca

SEQ ID NO: 3424 - DNA, 362 bp, Homo sapiens
atgatggctcctgcagggagtgcccccagtgcccagcacagggccaggcacacagtggtgcacgggaacgtctgctgatgcccaccctaaggccaatcaaggagccacggggctgggtcctggtcctcacatcctcttccgcatcttgcccttcttggagcgggcaccccggccgaaggcrccctgctgcagctcctggacgcggcggcggttgcgggcagagagctgcttgaggccaccacgctgcaggaagtgcagcttctgggcccggcgccgctgcttcaggatctgctgcttggtcttgagttccrggcggactcggcctgcaggggtgcctggggcgtggggccgggatgcacctg

SEQ ID NO: 3425 - DNA, 4380 bp, Homo sapiens
ccttctgcgttcccagmgcgcggcccgaatggcggycgacaagsgcccggcggctggacctcggtcgcgagctgccatggcccagtggaggaagaagaaagggctccggaagcgccgaggcgcggcctcccaggcccgcggcagcgactcggaggacggcgagtttgagatccaggcggaagatgacgcccgggcccggaagctgggacctggaagacccctgcccaccttccccacctcggaatgcacctcggatgtggagccggacacccgggagatggtgcgtgcccagaacaagaagaagaagaagtctggaggcttccagtccatgggcctgagctacccggtgttcaaaggcatcatgaagaaggggtacaaggtgccaacacccatccagaggaagaccatcccggtgatcttggatggcaaggacgtggtggccatggcccggacgggcagtggcaagacagcctgcttcctcctcccaatgttcgagcggctcaagacccacagtgcccagaccggggcccgcgccctcatcctctcgccgacccgagagctggccctgcagaccctgaagttcactaaggagctaggcaagttcactggcctcaagactgccctgatcctgggtggagacaggatggaagaccagtttgcagccctgcacgaaaatcccgacataattattgccacgcccggacggttggtgcatgtggctgtggaaatgagcctgaagctgcagagtgtggaatacgtggtgttcgatgaagctgaccggctttttgaaatgggtttcgcagagcagctgcaggagatcatcgcccgcctccccgggggccaccagacggtgctgttctccgccacgctgcccaaactgctggtggaatttgcccgggctggcctcacggagcccgtgctcatccggcttgacgtggataccaagctcaacgagcagctgaagacytccttcttcctcgtgcgggaggacaccaaggctgccgtgctgctccacctgctgcacaacgtggtgcggccccaggaccagaccgtggtgtttgtggccacgaagcaccacgccgagtacctcactgagctgctgacgacccagcgggtgagctgcgcccacatctacagtgccctagacccgacagcccgcaagatcaatctcgccaaattcacgcttggcaagtgctccactctcattgtgactgacctggccgcccgaggcctggacatcccgctgctggacaatgtcatcaactacagcttccccgccaagggcaaactcttcctgcaccgcgtgggccgtgtggctcgggctggccgaagtggcacagcctactccttggtggcccctgatgaaatcccctacctgctggatctgcacctgttcctgggccgctccctcaccctcgcccgacccctcaaggagccctcaggtgtggccggtgtggatggcatgctgggtcgggtgccacagagtgtggtggacgaggaggacagtggtctgcagagcaccctggaggcatcgctggagctacggggcctggcccgcgttgctgataacgcccagcagcagtatgtgcgctcacgcccggygccctcgcctgagtccatcaagagggccaaggagatggaccttgtggggctgggcctgcaccccctcttcagctcgcgttttgaggaggaggagctgcagcggctgaggctggtggacagcataaagaactaccrctcccgggcgactatctttgagatcaacgcctccagccgagacctgtgcrgccaggtgatgcgcgccaagcggcagaaggaccgcaaggccatcgcccgcttccagcagggacagcaggggcggcaggagcagcaggagggcccagtgggcccagccccgagccgcccagcactgcaggagaagcagcctgagaaggaggaggaggaggaggcgggagagagtgtggaggacattttctcagaggtcgtgggccggaagcggcagcggtcaggacccaacaggggagccaagaggcggagggaggaggcccggcagcgggaccaggaattctacatcccctaccggcccaaggactttgacagcgagcrgggcctgagcatcagcggggaagggggagcctttgagcagcaggcagctggcrctgycctggacttgatgggggatgaagcccagaacctgacgaggggccggcagcagctcaagtgggaccgtaagaagaagcggtttgtgggacagtcaggacaggaagacaagaagaagattaagacagagagcggccgctacatcagcagctcctacaagcgagacctctatcagaagtggaaacagaaacagaaaattgatgatcgtgactcggacgaagaaggggcatctgaccggcgaggcccagagcgaagaggtgggaagcgagaccgtggccaagcaggtgcatcccggccccacgccccaggcacccctgcaggccgagtccgccyggaactcaagaccaagcagcagatcctgaagcagcggcgccgggcccagaagctgcacttcctgcagcgtggtggcctcaagcagctctctgcccgcaaccgccgccgcgtccaggagctgcagcagggygccttcggccggggtgcccgctccaagaagggcaagatgcggaagaggatgtgaggaccaggacccagccccgtggctccttgattggccttagggtgggcatcagcagacgttcccgtgcaccactgtgtgcctggccctgtgctgggcactgggggcactccctgcaggagccatcatctgtgaaaaggagcactgtatggccacagaagggcagcagctgcgtcagcctaagacagagacatttgaacagggccttgaagggtgtgcaggagttcgccagcaaagccaggcaggccaagacttgagttggcaactcagctgctgctgcttccatgtgttctgggttcagaggtcatggctgcaccggtcagagccctgagtgcctcagggtttggcaatggaatttttaatgtaataaatctttattgagcactgctggtggccaggagtgcggtctacttggggaactggaatggagagacccaggtactaaaatcccagctaacgtggcagaggagttgcgggtctcctgagggtgagttctgctgccttgtccatttagcgatgaggaaagtgaagctcagagcacaaaccaggtgccagaggcgggagttggtcccccttcctcccactggacatggttgcagctgggagtgggctgggggaggggaacaggatgcccagcccagggggcaaggacacagctgctcccctctggctatgaagaggttaacgcggcccctccacacctggaggtcagaacctggcctgtcctctgtcttcttgccacccaccccctgtttgaggttctgagaaggtcaagggcagccccagcagctggattctcaggctgggcccctcacctggcagagtccatagtggagggggccttggtgatctctcatctagcatggaccctgttctgagacctgacaaagagttttttttcatgccccaaccaccctggcagggagggcctggtctgatctcattttagaggcagttgccccacacatagccccttgaccttcccatcacctcctcatcagggcctgcatttatggagtgcttgctatgtgcccctcatggcaggcccacagcactctgaacaggcacagccctcccatcttcccaatgaggaaacggattcaggaagagccactcagtccacaccccattggaaatgtgggccctcctatctcagggtctctcaggggttccctctcccgctgctcacctgtgtcagggctaggaggcaggggctgcaggctcagcctgacccaggccggccagcatggcagagaggtcctgcatgaacagcttcacctgggggggcccagcacgaagtcacatcccagccccagagtcactgtccagcccccacccctcaacacgcgggggaggccgaaaggtagggcggggactggagatcccctcattaaaagaacagtgatgatggtggttcccagaggtggtgactgagatcctaaaccgttctgggttttgaaagcctcaggccaaccttcccaactgctgcgtgagcagacaccttcacagcttcctcgctgctgtcacctgcactatccaattagtattttcatttacatcaatcagctttattttcttgtaactggatcagtcatattcattggtttgtgacctactcttatctccgtgggtggctctccttttgttttaattaacttctttatgaatatgaacttaataaataccatggatccattgtaaaaact

SEQ ID NO: 3426 - DNA, 665 bp, Homo sapiens
ggagcgcagcactgccgyccggcccctccagcttcccggaccacggccaacctcgagcgcaccttcatcaccatcaggccggacagcatgcagtgcggcctggtgggcaagatcatcaagcgcttcgagcagaaggggttccgcctcgtggccatgaagttcctcccggcctctgaagaacacctgaagcagcactacattgacctgaaggaccgcccrttcttcccygggctggtgaagtacatgaactcagggccggtcgtggccatggtctgggaggggctgaacgtcgtgaagacaggccgagtgatgcttggggagaccaatccagcagattctaagccaggcaccattcgtggggacttytgcattcaggttggcaggaacatcattcatggcagtgattcagtaaaaagtgctgaaaaagaaatcagcctacggtttaagcctgaagaactggttgactacaagtcttgtgctcatgactgggtctatgaataagaggtggacacagcagcagtctccttcagcacggtgtggtgtgtycctggacacagctcttcattctactgacttagaggcaacaggattgatcattcttttrtagagcatatttgccaataaagcttttggaagctggaaaaaaaaaagagagaaagagagaa

SEQ ID NO: 3427 - DNA, 528 bp, Homo sapiens
agcgcagcactgccgyccggcccctccagcttcccggaccacggccaacctcgagcgcaccttcatcaccatcaggccggacagcatgcagtgcggcctggtgggcaagatcatcaagcgcttcgagcagaaggggttccgcctcgtggccatgaagttcctcccggcctctgaagaacacctgaagcagcactacattgacctgaaggaccgcccrttcttcccygggctggtgaagtacatgaactcagggccggtcgtggccatggaacatcattcatggcagtgattcagtaaaaagtgctgaaaaagaaatcagcctacggtttaagcctgaagaactggttgactacaagtcttgtgctcatgactgggtctatgaataagaggtggacacagcagcagtctccttcagcacggtgtggtgtgtycctggacacagctcttcattctactgacttagaggcaacaggattgatcattcttttrtagagcatatttgccaataaagcttttggaagctggaaa

SEQ ID NO: 3428 - DNA, 12077 bp, Homo sapiens
ggagaacgacacattggatacagaagggaggtgatcatgcaccatggcactggcccccagaacgtccagcatcagctgcagaggtccagggcctgccctggcagcgagggtgaggagcagccggcccaccccaacccacccccgtcccccgcagctcccttcgctccctcagcaagcccgtcggcaccccagtctcccagttatcaaatacagcagctgatgaataggagccctgcaaccgggcagaacgtgaacatcaccctgcagagcgtgggccctgtcgtcgggggaaaccagcagatcacactggccccactgccgctccccagccccacctctccaggcttccagttcagcgctcagcctcggcggtttgagcatgggtctccatcatacattcaggtcacgtcccccttgtcccagcaggtccagacccagagtcccacgcagcccagtccggggccggggcaggccttgcagaatgtgcgtgcaggtgcccctggccctgggctgggcctctgcagcagcagccctacagggggcttcrtggatgccagcgtgctggtgaggcagatcagcttgagcccctccagtggtggacactttgtgtttcaggatgggtcagggctcacccagatcgcccagggagcccaggttcagctccagcacccgggtacgcccatcacagtccgagagcggagaccctcccagccccacacacagtcagggggcaccatccaccacctgggaccccagagccctgcagccgcgggtggggccggcctgcagcccctggccagcccaagccacatcaccacggctaacttgccaccgcagatcagcagcatcatccagggccagctggttcagcagcagcaggtgctgcaggggccgccgctgccccggcccctgggcttcgagaggacacccggcgtgctgctccccggggctgggggcgcagcggggtttgggatgacgtccccacccccgcccaccagcccttccaggactgccgtgcccccaggcctttccagcctcccactcacgtctgtggggaacacgggaatgaagaaggttcccaagaagttagaggagattcccccagcctctccggagatggcacagatgaggaagcagtgcctggactatcattaccaggagatgcaggctctgaaggaggtcttcaaggagtatttgattgaactgtttttcttgcaacactttcaagggaacatgatggatttcttagctttcaagaagaaacattatgccccattacaagcatatcttaggcagaatgatttggacrttgaagaagargaggaggaggaggaagaggaggaagaaaaatctgaggttatcaatgacgagcagcaagccctcgcagggagcctggtagcaggggccggaagcacagtagagacggacctgtttaagaggcagcaggcgatgccctccacaggtatggcagagcagtctaagaggcctcgycttgaagtgggtcaccaaggggtagttttccagcacccaggggcggacgcaggcgttcctctccagcaactaatgccgaccgcacaaggaggaatgccccccacgccgcaggccgcgcagctcgctggacagaggcagagtcagcagcagtatgacccctccacggggcctcccgtgcagaacgctgccagcttgcacaccccactgccgcagctgcccgggaggctgcccccagccggtgttcccactgcagccctctcctctgcgctgcagtttgcacagcagccgcaagtggtagaggcccagacacagctccaaatcccggtgaagactcagcagcccaatgttcccatccctgcaccgcccagcagccaactccccatccctccctcgcagcctgcacagctggccctccacgttcccacacctggaaaggtgcaggtgcaggcctctcagctttcctccctgccacagatggtagcatcgacaaggctccctgtggaccctgccccgccctgcccacggcctctgcccacctcttctacctcgtccctcgcgcctgtgagtggctccggcccaggaccctcccctgctcgatcctctccagtaaatagaccttcctcagccaccaataaggcactatctccagtcacttcccggaccccaggggtggtggcatctgcccccaccaaaccacagagtcctgctcagaatgccacctcgtcccaagacagttctcaggatacgctgacagaacaaataactctggagaaccaggtgcatcagcgcattgcggagctgaggaaagcaggtctgtggtcccagaggcgtctgccaaagctgcaggaggccccacgccccaagtcccactgggactatctgctggaggagatgcagtggatggccacagactttgcccaggagaggaggtggaaggtggctgctgcgaagaaggttgtggaaataaaactacgagtagaattagaagaaaaaaggaagaaggccttaaatttacagaaagtttccaggagagggaaagaattgagacctaaaggatttgacgcattmcaggaaagttctctggattcaggaatgtctggaagaaaaagaaaagctagcatatctttgactgatgacgaagtggacgatgaagaggaaacaattgaagaggaggaagcaaatgaaggcgttgtggaccaccaaacagaactttctaatttagccaaggaagctgagctgcccctcctggacctgatgaagctgtacgaaggcgccttcctgccgagttctcagtggccccggccgaagcctgatggggaggacacaagcggagaggaagatgcagatgactgtccaggcgacagggagagtcgcaaggacttggttctcatcgactcgcttttcatcatggatcagttcaaagctgccgagaggatgaatatcgggaagccaaacgccaaggacattgcggacgtcactgcggtggctgaagccatcctgccgaagggcagtgctcgggtcacaacctcggtcaagtttaatgctccatctttgttgtatggggctctcagagattatcagaagattggcctggactggctggccaaactttacaggaagaatctcaatggcatattggcagatgaagctgggctgggtaaaacagtgcagatcattgctttttttgcccacctagcttgtaacgaaggtaattggggcccccatcttgttgttgtgagaagttgtaacatactcaagtgggagcttgaattgaaacgttggtgtcccggactcaaaatcctctcatatattggcagccacagagaactcaaagcaaagagacaggagtgggccgaacccaacagcttccacgtctgcatcacgtcctacactcagttcttccggggcctcaccgccttcacacgagtgcgctggaagtgcctggtcattgatgagatgcagcgcgtgaagggcatgaccgagaggcactgggaagcggttttcaccctgcagagccaacaacgtctgcttctgatcgactcgccgctgcacaataccttcctggagctctggaccatggtgcacttcctggtcccagggatctccaggccctacctgagctcccctctgagggcccccagtgaagagagccaggattactaccataaagtggtcataaggttacacagggtgacacagccatttattttgaggagaactaagagagatgtggaaaagcaactaacaaagaaatatgagcatgttttgaagtgtcgcctttctaaccgacaaaaagccttatacgaggacgttatcctgcaacctggcactcaggaggccttgaagagcgggcactttgtcaacgtcctgagcatccttgtgcggctgcagcgcatctgcaaccaccctgggctcgtcgagccccggcacccaggctcttcctacgtggcggggccactggagtatccgtccgcatctctaatcctgaaggcactggagagagatttctggaaggaagcagatctttctatgtttgatctcatcggcttagaaaataaaatcactcgtcacgaggcagagttgctgtctaagaaaaagataccgcggaaactcatggaggaaatctccacttcagcagccccagcagcccgaccagcagcagcaaagctgaaggccagcaggttgtttcagcctgtgcagtatggccagaagcccgagggtcgcaccgtggctttccccagcactcacccgccccggacggcagcccccaccacggcctctgctgctccacagggcccgcttcgaggacggccgcccatcgccacgttctctgccaatccggaggcaaaagcagcagcagccccgtttcagacctctcaggcttccgccagtgctccacgacaccagcccgcctcggcctccagcacagccgctagcccggcccatcctgcgaaactgcgggcccagaccacagcacaggcctccaccccaggccagcccccgccccagccccaggccccctcgcacgcggccgggcagagcgcgctgcctcagaggctggtgctcccctcgcaggcccaggcccgcttgcccagtggagaggtagtgaaaatagctcagctggcatccatcacaggaccacagagccgcgtggctcagccrgagacgccggtgacactgcagttccagggcagcaagttcaccctgtcacacagccagctccggcagctcacagcgggccagccgctgcagctgcaaggcagcgtcctccagatcgtgtccgcccccgggcagccctaccttcgagcccctggccctgtggtgatgcagaccgtgtctcaggcgggcgctgtgcacggcgccctgggaagcaagcccccggccggcggtcccagccctgcacccttgaccccacaagttggcgttccgggccgcgtggcggtgaatgccttggctgtaggagaacccggaacggcctccaaaccagcttctcccattggagggccgacccaggaggaaaagaccagactcttgaaagagcgcctggatcagatttatttagtcaacgagcggcgctgttctcaagctccagtctatggcagagacttgctaaggatttgtgccctgcctagccatggaagggtacagtggcgtgggtccctggatggccgtcgtgggaaggaggccgggccagcrcacagttacacttcatcctcagaaagtccaagtgagctgatgttgacgctttgtcggtgtggagagtctctgcaggatgttattgacagggtggcctttgtgattcctccggtggtggcagcacccccgtccctacgggtgccgcggccgccacccctgtacagccacagaatgaggatcttgaggcagggcctgagagagcacgctgcgccgtacttccagcagctgcggcagaccacggctccacgcctgctgcagttccctgagctgaggctggtgcagttcgactcagggaagttggaagctttagctatcttgcttcagaaattgaaatctgaaggacgtcgggtgctgattttatcacagatgattcttatgttggacattttagagatgttcttgaacttccattacctcacctatgtaagaatcgatgaaaatgccagcagtgagcaacggcaggaactgatgaggagtttcaacagagacaggcggattttttgtgccattctctccactcacagccgtaccacaggtataaaccttgtagaggcggacaccgtcgtgttttatgacaatgacctgaatccagtgatggatgccaaagctcaggagtggtgcgataggatcgggagatgcaaagacatccacatatacaggcttgtgagtggcaattccattgaagagaaattgttgaaaaatggaactaaagatactgaaccgagaagtcagatgcacacttgggaccttgtactggggagtaacacacatctctgtgttcagcgaaccatccaggagctgtttgaagtttattctcccatggatgatgctggcttcccggtcaaagctgaggagtttgtggtgctttctcaggaaccttctgtcacggaaaccattgcacccaaaattgcaagacctttcatagaggccctcaagagtattgagtatctggaggaggatgcccagaagtccgcacaggagggggtgctgggaccacacactgatgctctgtcatcagactctgagaacatgccgtgtgatgaagaaccatcccaattagaggagctagctgacttcatggagcagcttacaccaattgaaaaatatgctttaaattacctggaattattccatacttctattgagcaagaaaaggagagaaacagtgaggacgcagtgatgactgcagtgagggcatgggagttctggaacctgaagaccctgcaggagagggaggcccggctgcggctggagcaggaggaggcggagctcctgacctacacgcgagaggatgcctacagcatggagtatgtctacgaagatgtcgatgggcagacagaagtcatgccgctctggaccccacccaccccgccgcaggacgacagcgacatctacctcgactcggtcatgtgtctcatgtatgaagccactcccatcccagaggctaagctgccccctgtgtacgtgaggaaggagcggaagcgacacaaaacagacccctcagctgcaggcaggaagaagaagcagcgtcacggggaggcggtcgtccctcctcggtccctgtttgaccgcgcaacaccaggacttctgaaaattcgcagagagggcaaggagcagaagaagaatattctgctgaagcagcaggtgccattcgccaagcccctgccaacttttgccaaacccacagctgagcctggtcaagacaaccccgagtggctcatcagtgaggactgggcgctgctgcaggctgtaaagcagttactggagctgcctttgaacctcacaatcgtgtcacctgctcacacacctaattgggatcttgtcagtgacgttgttaactcctgtagccgaatctaccgctcttccaaacagtgccggaatcgctacgagaatgtcatcattccacgagaggaggggaagagtaaaaacaaccgtcctctccgtacgagccagatctatgcccaggatgagaatgccacacacacccagctgtacacgagccactttgacttaatgaaaatgactgctggcaagaggagtcccccaatcaaacctctgcttggcatgaatccctttcagaagaaccccaagcacgcgtctgtgttggcagaaagtggaatcaactatgacaagccgctgcctcccatccaggtggcatctctccgtgcagagcgaatcgcaaaagagaaaaaggctctggctgatcagcagaaggcacagcagccggccgtggcccagccacccccgccccagccgcagcccccaccacccccgcagcagccaccgccaccgctgccacaaccacaggcagcgggcagccagccgccagcagggccaccagctgtccagccccaaccccagccacagccccagacccagccacagcctgtgcaggccccagcgaaggcgcagcccgcaatcacgacggggggcagtgcagccgtactggcaggaaccattaaaacatcagttactgggacgagcatgcccactggtgccgtgagtggaaatgtgatcgtgaacaccatcgcaggggtcccagctgccaccttccagtccatcaacaagcgcctggcgtcgccagtggctcctggggccttgactacgccgggaggctctgctcccgcccaggtggtgcacacccagcccccgccacgggcagtcggctccccagccacggcgacccctgacctggtgtccatggcaacgactcagggtgttcgagcggtcacttctgtgacagcctcggcygtggtcactaccaacctgaccccagtgcagaccccggcacggtctttggtgccccaagtgtcccaagccacaggagttcagctccctggaaaaaccatcacacctgcacatttccagcttctcaggcagcagcagcagcagcagcaacaavagcagcagcagcagcagcagcagcagcagcagcagcagcagcagcaacagcagcagcagcaacagacgacgacgacctctcaggtgcaagttccacagatccagggccaggcccagtccccagcacagatcaaagctgtgggcaagctgacgccggaacacctcatcaaaatgcagaagcagaaactgcagatgcccccgcagcccccaccgccacaggcccagtctgcgcccccgcagccaacagcccaagtgcaagtgcagacctcgcagccgccgcagcagcagagcccccagctcacgacggtcacggccccaaggcctggtgccctgctgacgggcaccaccgtggccaacctccaggtggcccggctcacccgggttcccacttctcagctgcaggcgcaagggcagatgcagacccaggcaccccagccagcccaggtggccttggcgaagcctccggtggtgtccgtcccggcagctgtggtctcctcaccgggagtcaccaccctgcccatgaacgtcgcggggatcagcgtggcgatcggtcagccacagaaggcagcaggacagaccgtggtggcccagcccgtgcacatgcagcagctgctgaagctgaagcagcaggccgtccagcagcagaaggccatccagccccaggctgcacagggcccggcagccgtccagcagaagatcaccgcacagcagatcaccacccctggcgcgcagcagaaggttgcctacgccgcgcagccggcccttaagacccagtttcttaccacacccatctcccaggcccagaaactggccggggcccagcaagtgcagacccagatccaggttgcaaaacttcctcaagttgttcaacagcaaacacccgtggccagcatccagcaagttgcctctgcttcccagcaggcttctccacagactgtggcgctcacgcaggcgacggcggccgggcagcaggtgcagatgatccctgcagtgaccgcgactgcccaggtggttcagcagaaactcattcagcagcaggtggtgaccacggcgtcggccccgctccagactccaggcgctcccaacccagcccaggtgcccgccagctccgacagcccaagccagcagcccaagttacagatgagggtccctgctgtcaggctaaagacacctactaagcctccgtgccagtagtcagggcagcagggctgcctctcatctaaagcaaaactaccttcctcacagaaaacgctttattagtgaaccttgggaccatgtcacgcaagagattcagcactgggaaagatataattgaaacaaaatagtgtaatcattttattaaaatgcatcccacactgcaggacaaatggtccttatggagtgccgcgttctctgtactacgtggctcatggaaaaagtgacaacatggcttcctctaaatcatttcaccttttcagtccccacccgcacccgtcccctagagccatagtactgtgtttactgtgttctgaaagccatttagaatttctttgtgagcatgtagtgctttgcacgccacagaagccgtctgccgtgtgtgaggagcatacaatggactttctaaagataaggcgtgggcttccacagtgtctgccagagtttagttctttataccttactgaaaaatgcctcgtggtcttcgcagaggggaaggcctgtctaaagtcaatcatccgagatgggttttccattccaaagaaaggcaatatggttccttccttccctcctaaaatatgacttaacttttaagagaaatgttctgacacccacctaaacacacaaggcacgttcctggcctgtgttcaagggaaatgatcagtcattgcattgttattccaaagagcagccaacagtggcctcccccaggccctaccctgcaatgggattcgctttcatttaatggaaacttctgggactgatgcccaactcagtgcactcaagacgcatctccagytttcgggggaagctggtatttgacatagtgtgttaaacagctcctgagaacctttgggacactctgccatggctggcgtgaggcccagaggaccacgcagaggcaatggtagtacagatgtcacagctgagggtacgatgaggcctgggctcagtgagccaggacgaatgtgacagacaccccttgctgccacagtcagccctttgacgaaggtgggctggtgattctggaagtattggctatagcggtgggcccagtcaactcttccttgtggacttacgacagcagattttctctaggataagcttgtgtggttctgccagtgaagcagagaaccacctgtgctgttgtggaaggcgtgccgttgagggggaaaacgaagcccagtatttgctactgtttttcctttttttactatgacaggaaaataaatgcaattttagtggaattgattgacagtgtctccttactttgaagttttcaccaaagcaaaaaggtccatatccaatagtatcctttgtgctgtggcttgattttggcctattttacattatttggtccaggaaattaggttatattaggttttttgtatactaaaaatcagttatggcacaataaagattttctgtttttaaattgtatttcatctgcttcctccccattctctcactttaagtgacattgaggaaggtattctgtcccacaggtttctgtggacagcgatacagcaggagtcagtgaaatcaactggggagctcacttgagctcttgataagaaatgtggagaaaagtaaaaaccaagctttgaagaaacagaagaaattaatcttttagttagttgaacataccaaagcagaggactggaatctgtttgttctaaccaacccgttctccctggcttggcacgtgccgtgagagcgcagcttgccggagggagggccgctgtgtgcgcctcacatctggctcccagtggaaacttttactcctcctcatccgcagatgtgatagaactgaagtatctaggaattctgcctttgtcatttgttttaatttgtgtgccctgttcattttttttgtctttcccaaatcttggtagtctccttatagttgaagataaaatgttgagtgcacttattttagaatatcctagacataactgtctaagtaaaagcgctctattaatctaaaacactacaagagaatttaacaccatctctcaaatgcttttttggagagcttaatgggattctgaatatttgcaatgtggagtttccgccccgatctcacgtcagtgagggtctcctgtctctcaagtgtgtttcctttggctgttccctaatacaaaacacggacatatttttactcgtagcactcaatttagtaacttctagatgctaccgttgacctgagttaaattcatttagtcgtgtacgtaaaaactctccttttagtgtgttattttcttggccttcccttttaaaggttaaagtttctaacctaagaattaagtacgcgttcaggaagctgttgtctaggccttccccttgtgaatctgggttcattccaatacggcaagtaagagttggaaactttgagaacacagactataaaggcagcagcccgaacactgtcagactctaattggcgaccctgggaaacagttgccctgctattctttaaagaaagacgtttattctgatgataaaaacagttagccagactgtttttaaagcacctggcgggaagcagaaggttggatccaagcccttgttcagatttggtgcctgataagacaggggtttctctttttgtgacctttattattattattttgttaactgttgtaaccagttagctgttgtgttttaagatagaaaggaacaagactaaaattgtaaatactttgtaaacatcagcatttgtacttgaatagtaggattttaaagggcattgatagcataccaaacaaaaggcaaaataaagtgacctttttata

SEQ ID NO: 3429 - DNA, 12202 bp, Homo sapiens
ggagaacgacacattggatacagaagggaggtgatcatgcaccatggcactggcccccagaacgtccagcatcagctgcagaggtccagggcctgccctggcagcgagggtgaggagcagccggcccaccccaacccacccccgtcccccgcagctcccttcgctccctcagcaagcccgtcggcaccccagtctcccagttatcaaatacagcagctgatgaataggagccctgcaaccgggcagaacgtgaacatcaccctgcagagcgtgggccctgtcgtcgggggaaaccagcagatcacactggccccactgccgctccccagccccacctctccaggcttccagttcagcgctcagcctcggcggtttgagcatgggtctccatcatacattcaggtcacgtcccccttgtcccagcaggtccagacccagagtcccacgcagcccagtccggggccggggcaggccttgcagaatgtgcgtgcaggtgcccctggccctgggctgggcctctgcagcagcagccctacagggggcttcrtggatgccagcgtgctggtgaggcagatcagcttgagcccctccagtggtggacactttgtgtttcaggatgggtcagggctcacccagatcgcccagggagcccaggttcagctccagcacccgggtacgcccatcacagtccgagagcggagaccctcccagccccacacacagtcagggggcaccatccaccacctgggaccccagagccctgcagccgcgggtggggccggcctgcagcccctggccagcccaagccacatcaccacggctaacttgccaccgcagatcagcagcatcatccagggccagctggttcagcagcagcaggtgctgcaggggccgccgctgccccggcccctgggcttcgagaggacacccggcgtgctgctccccggggctgggggcgcagcggggtttgggatgacgtccccacccccgcccaccagcccttccaggactgccgtgcccccaggcctttccagcctcccactcacgtctgtggggaacacgggaatgaagaaggttcccaagaagttagaggagattcccccagcctctccggagatggcacagatgaggaagcagtgcctggactatcattaccaggagatgcaggctctgaaggaggtcttcaaggagtatttgattgaactgtttttcttgcaacactttcaagggaacatgatggatttcttagctttcaagaagaaacattatgccccattacaagcatatcttaggcagaatgatttggacrttgaagaagargaggaggaggaggaagaggaggaagaaaaatctgaggttatcaatgacgagcagcaagccctcgcagggagcctggtagcaggggccggaagcacagtagagacggacctgtttaagaggcagcaggcgatgccctccacaggtatggcagagcagtctaagaggcctcgycttgaagtgggtcaccaaggggtagttttccagcacccaggggcggacgcaggcgttcctctccagcaactaatgccgaccgcacaaggaggaatgccccccacgccgcaggccgcgcagctcgctggacagaggcagagtcagcagcagtatgacccctccacggggcctcccgtgcagaacgctgccagcttgcacaccccactgccgcagctgcccgggaggctgcccccagccggtgttcccactgcagccctctcctctgcgctgcagtttgcacagcagccgcaagtggtagaggcccagacacagctccaaatcccggtgaagactcagcagcccaatgttcccatccctgcaccgcccagcagccaactccccatccctccctcgcagcctgcacagctggccctccacgttcccacacctggaaaggtgcaggtgcaggcctctcagctttcctccctgccacagatggtagcatcgacaaggctccctgtggaccctgccccgccctgcccacggcctctgcccacctcttctacctcgtccctcgcgcctgtgagtggctccggcccaggaccctcccctgctcgatcctctccagtaaatagaccttcctcagccaccaataaggcactatctccagtcacttcccggaccccaggggtggtggcatctgcccccaccaaaccacagagtcctgctcagaatgccacctcgtcccaagacagttctcaggatacgctgacagaacaaataactctggagaaccaggtgcatcagcgcattgcggagctgaggaaagcaggtctgtggtcccagaggcgtctgccaaagctgcaggaggccccacgccccaagtcccactgggactatctgctggaggagatgcagtggatggccacagactttgcccaggagaggaggtggaaggtggctgctgcgaagaagctcgttagaactgtggtgcgccatcacgaggagaagcagctccgtgaagaaagggggaagaaggaagagcagagcagactgaggcggatagccgcctccacggcccgggagatagagtgcttttggtcgaatattgaacaggttgtggaaataaaactacgagtagaattagaagaaaaaaggaagaaggccttaaatttacagaaagtttccaggagagggaaagaattgagacctaaaggatttgacgcattmcaggaaagttctctggattcaggaatgtctggaagaaaaagaaaagctagcatatctttgactgatgacgaagtggacgatgaagaggaaacaattgaagaggaggaagcaaatgaaggcgttgtggaccaccaaacagaactttctaatttagccaaggaagctgagctgcccctcctggacctgatgaagctgtacgaaggcgccttcctgccgagttctcagtggccccggccgaagcctgatggggaggacacaagcggagaggaagatgcagatgactgtccaggcgacagggagagtcgcaaggacttggttctcatcgactcgcttttcatcatggatcagttcaaagctgccgagaggatgaatatcgggaagccaaacgccaaggacattgcggacgtcactgcggtggctgaagccatcctgccgaagggcagtgctcgggtcacaacctcggtcaagtttaatgctccatctttgttgtatggggctctcagagattatcagaagattggcctggactggctggccaaactttacaggaagaatctcaatggcatattggcagatgaagctgggctgggtaaaacagtgcagatcattgctttttttgcccacctagcttgtaacgaaggtaattggggcccccatcttgttgttgtgagaagttgtaacatactcaagtgggagcttgaattgaaacgttggtgtcccggactcaaaatcctctcatatattggcagccacagagaactcaaagcaaagagacaggagtgggccgaacccaacagcttccacgtctgcatcacgtcctacactcagttcttccggggcctcaccgccttcacacgagtgcgctggaagtgcctggtcattgatgagatgcagcgcgtgaagggcatgaccgagaggcactgggaagcggttttcaccctgcagagccaacaacgtctgcttctgatcgactcgccgctgcacaataccttcctggagctctggaccatggtgcacttcctggtcccagggatctccaggccctacctgagctcccctctgagggcccccagtgaagagagccaggattactaccataaagtggtcataaggttacacagggtgacacagccatttattttgaggagaactaagagagatgtggaaaagcaactaacaaagaaatatgagcatgttttgaagtgtcgcctttctaaccgacaaaaagccttatacgaggacgttatcctgcaacctggcactcaggaggccttgaagagcgggcactttgtcaacgtcctgagcatccttgtgcggctgcagcgcatctgcaaccaccctgggctcgtcgagccccggcacccaggctcttcctacgtggcggggccactggagtatccgtccgcatctctaatcctgaaggcactggagagagatttctggaaggaagcagatctttctatgtttgatctcatcggcttagaaaataaaatcactcgtcacgaggcagagttgctgtctaagaaaaagataccgcggaaactcatggaggaaatctccacttcagcagccccagcagcccgaccagcagcagcaaagctgaaggccagcaggttgtttcagcctgtgcagtatggccagaagcccgagggtcgcaccgtggctttccccagcactcacccgccccggacggcagcccccaccacggcctctgctgctccacagggcccgcttcgaggacggccgcccatcgccacgttctctgccaatccggaggcaaaagcagcagcagccccgtttcagacctctcaggcttccgccagtgctccacgacaccagcccgcctcggcctccagcacagccgctagcccggcccatcctgcgaaactgcgggcccagaccacagcacaggcctccaccccaggccagcccccgccccagccccaggccccctcgcacgcggccgggcagagcgcgctgcctcagaggctggtgctcccctcgcaggcccaggcccgcttgcccagtggagaggtagtgaaaatagctcagctggcatccatcacaggaccacagagccgcgtggctcagccrgagacgccggtgacactgcagttccagggcagcaagttcaccctgtcacacagccagctccggcagctcacagcgggccagccgctgcagctgcaaggcagcgtcctccagatcgtgtccgcccccgggcagccctaccttcgagcccctggccctgtggtgatgcagaccgtgtctcaggcgggcgctgtgcacggcgccctgggaagcaagcccccggccggcggtcccagccctgcacccttgaccccacaagttggcgttccgggccgcgtggcggtgaatgccttggctgtaggagaacccggaacggcctccaaaccagcttctcccattggagggccgacccaggaggaaaagaccagactcttgaaagagcgcctggatcagatttatttagtcaacgagcggcgctgttctcaagctccagtctatggcagagacttgctaaggatttgtgccctgcctagccatggaagggtacagtggcgtgggtccctggatggccgtcgtgggaaggaggccgggccagcrcacagttacacttcatcctcagaaagtccaagtgagctgatgttgacgctttgtcggtgtggagagtctctgcaggatgttattgacagggtggcctttgtgattcctccggtggtggcagcacccccgtccctacgggtgccgcggccgccacccctgtacagccacagaatgaggatcttgaggcagggcctgagagagcacgctgcgccgtacttccagcagctgcggcagaccacggctccacgcctgctgcagttccctgagctgaggctggtgcagttcgactcagggaagttggaagctttagctatcttgcttcagaaattgaaatctgaaggacgtcgggtgctgattttatcacagatgattcttatgttggacattttagagatgttcttgaacttccattacctcacctatgtaagaatcgatgaaaatgccagcagtgagcaacggcaggaactgatgaggagtttcaacagagacaggcggattttttgtgccattctctccactcacagccgtaccacaggtataaaccttgtagaggcggacaccgtcgtgttttatgacaatgacctgaatccagtgatggatgccaaagctcaggagtggtgcgataggatcgggagatgcaaagacatccacatatacaggcttgtgagtggcaattccattgaagagaaattgttgaaaaatggaactaaagatactgaaccgagaagtggctgctcagggaaattaacacacatctctgtgttcagcgaaccatccaggagctgtttgaagtttattctcccatggatgatgctggcttcccggtcaaagctgaggagtttgtggtgctttctcaggaaccttctgtcacggaaaccattgcacccaaaattgcaagacctttcatagaggccctcaagagtattgagtatctggaggaggatgcccagaagtccgcacaggagggggtgctgggaccacacactgatgctctgtcatcagactctgagaacatgccgtgtgatgaagaaccatcccaattagaggagctagctgacttcatggagcagcttacaccaattgaaaaatatgctttaaattacctggaattattccatacttctattgagcaagaaaaggagagaaacagtgaggacgcagtgatgactgcagtgagggcatgggagttctggaacctgaagaccctgcaggagagggaggcccggctgcggctggagcaggaggaggcggagctcctgacctacacgcgagaggatgcctacagcatggagtatgtctacgaagatgtcgatgggcagacagaagtcatgccgctctggaccccacccaccccgccgcaggacgacagcgacatctacctcgactcggtcatgtgtctcatgtatgaagccactcccatcccagaggctaagctgccccctgtgtacgtgaggaaggagcggaagcgacacaaaacagacccctcagctgcaggcaggaagaagaagcagcgtcacggggaggcggtcgtccctcctcggtccctgtttgaccgcgcaacaccaggacttctgaaaattcgcagagagggcaaggagcagaagaagaatattctgctgaagcagcaggtgccattcgccaagcccctgccaacttttgccaaacccacagctgagcctggtcaagacaaccccgagtggctcatcagtgaggactgggcgctgctgcaggctgtaaagcagttactggagctgcctttgaacctcacaatcgtgtcacctgctcacacacctaattgggatcttgtcagtgacgttgttaactcctgtagccgaatctaccgctcttccaaacagtgccggaatcgctacgagaatgtcatcattccacgagaggaggggaagagtaaaaacaaccgtcctctccgtacgagccagatctatgcccaggatgagaatgccacacacacccagctgtacacgagccactttgacttaatgaaaatgactgctggcaagaggagtcccccaatcaaacctctgcttggcatgaatccctttcagaagaaccccaagcacgcgtctgtgttggcagaaagtggaatcaactatgacaagccgctgcctcccatccaggtggcatctctccgtgcagagcgaatcgcaaaagagaaaaaggctctggctgatcagcagaaggcacagcagccggccgtggcccagccacccccgccccagccgcagcccccaccacccccgcagcagccaccgccaccgctgccacaaccacaggcagcgggcagccagccgccagcagggccaccagctgtccagccccaaccccagccacagccccagacccagccacagcctgtgcaggccccagcgaaggcgcagcccgcaatcacgacggggggcagtgcagccgtactggcaggaaccattaaaacatcagttactgggacgagcatgcccactggtgccgtgagtggaaatgtgatcgtgaacaccatcgcaggggtcccagctgccaccttccagtccatcaacaagcgcctggcgtcgccagtggctcctggggccttgactacgccgggaggctctgctcccgcccaggtggtgcacacccagcccccgccacgggcagtcggctccccagccacggcgacccctgacctggtgtccatggcaacgactcagggtgttcgagcggtcacttctgtgacagcctcggcygtggtcactaccaacctgaccccagtgcagaccccggcacggtctttggtgccccaagtgtcccaagccacaggagttcagctccctggaaaaaccatcacacctgcacatttccagcttctcaggcagcagcagcagcagcagcaacaavagcagcagcagcagcagcagcagcagcagcagcagcagcagcagcaacagcagcagcagcaacagacgacgacgacctctcaggtgcaagttccacagatccagggccaggcccagtccccagcacagatcaaagctgtgggcaagctgacgccggaacacctcatcaaaatgcagaagcagaaactgcagatgcccccgcagcccccaccgccacaggcccagtctgcgcccccgcagccaacagcccaagtgcaagtgcagacctcgcagccgccgcagcagcagagcccccagctcacgacggtcacggccccaaggcctggtgccctgctgacgggcaccaccgtggccaacctccaggtggcccggctcacccgggttcccacttctcagctgcaggcgcaagggcagatgcagacccaggcaccccagccagcccaggtggccttggcgaagcctccggtggtgtccgtcccggcagctgtggtctcctcaccgggagtcaccaccctgcccatgaacgtcgcggggatcagcgtggcgatcggtcagccacagaaggcagcaggacagaccgtggtggcccagcccgtgcacatgcagcagctgctgaagctgaagcagcaggccgtccagcagcagaaggccatccagccccaggctgcacagggcccggcagccgtccagcagaagatcaccgcacagcagatcaccacccctggcgcgcagcagaaggttgcctacgccgcgcagccggcccttaagacccagtttcttaccacacccatctcccaggcccagaaactggccggggcccagcaagtgcagacccagatccaggttgcaaaacttcctcaagttgttcaacagcaaacacccgtggccagcatccagcaagttgcctctgcttcccagcaggcttctccacagactgtggcgctcacgcaggcgacggcggccgggcagcaggtgcagatgatccctgcagtgaccgcgactgcccaggtggttcagcagaaactcattcagcagcaggtggtgaccacggcgtcggccccgctccagactccaggcgctcccaacccagcccaggtgcccgccagctccgacagcccaagccagcagcccaagttacagatgagggtccctgctgtcaggctaaagacacctactaagcctccgtgccagtagtcagggcagcagggctgcctctcatctaaagcaaaactaccttcctcacagaaaacgctttattagtgaaccttgggaccatgtcacgcaagagattcagcactgggaaagatataattgaaacaaaatagtgtaatcattttattaaaatgcatcccacactgcaggacaaatggtccttatggagtgccgcgttctctgtactacgtggctcatggaaaaagtgacaacatggcttcctctaaatcatttcaccttttcagtccccacccgcacccgtcccctagagccatagtactgtgtttactgtgttctgaaagccatttagaatttctttgtgagcatgtagtgctttgcacgccacagaagccgtctgccgtgtgtgaggagcatacaatggactttctaaagataaggcgtgggcttccacagtgtctgccagagtttagttctttataccttactgaaaaatgcctcgtggtcttcgcagaggggaaggcctgtctaaagtcaatcatccgagatgggttttccattccaaagaaaggcaatatggttccttccttccctcctaaaatatgacttaacttttaagagaaatgttctgacacccacctaaacacacaaggcacgttcctggcctgtgttcaagggaaatgatcagtcattgcattgttattccaaagagcagccaacagtggcctcccccaggccctaccctgcaatgggattcgctttcatttaatggaaacttctgggactgatgcccaactcagtgcactcaagacgcatctccagytttcgggggaagctggtatttgacatagtgtgttaaacagctcctgagaacctttgggacactctgccatggctggcgtgaggcccagaggaccacgcagaggcaatggtagtacagatgtcacagctgagggtacgatgaggcctgggctcagtgagccaggacgaatgtgacagacaccccttgctgccacagtcagccctttgacgaaggtgggctggtgattctggaagtattggctatagcggtgggcccagtcaactcttccttgtggacttacgacagcagattttctctaggataagcttgtgtggttctgccagtgaagcagagaaccacctgtgctgttgtggaaggcgtgccgttgagggggaaaacgaagcccagtatttgctactgtttttcctttttttactatgacaggaaaataaatgcaattttagtggaattgattgacagtgtctccttactttgaagttttcaccaaagcaaaaaggtccatatccaatagtatcctttgtgctgtggcttgattttggcctattttacattatttggtccaggaaattaggttatattaggttttttgtatactaaaaatcagttatggcacaataaagattttctgtttttaaattgtatttcatctgcttcctccccattctctcactttaagtgacattgaggaaggtattctgtcccacaggtttctgtggacagcgatacagcaggagtcagtgaaatcaactggggagctcacttgagctcttgataagaaatgtggagaaaagtaaaaaccaagctttgaagaaacagaagaaattaatcttttagttagttgaacataccaaagcagaggactggaatctgtttgttctaaccaacccgttctccctggcttggcacgtgccgtgagagcgcagcttgccggagggagggccgctgtgtgcgcctcacatctggctcccagtggaaacttttactcctcctcatccgcagatgtgatagaactgaagtatctaggaattctgcctttgtcatttgttttaatttgtgtgccctgttcattttttttgtctttcccaaatcttggtagtctccttatagttgaagataaaatgttgagtgcacttattttagaatatcctagacataactgtctaagtaaaagcgctctattaatctaaaacactacaagagaatttaacaccatctctcaaatgcttttttggagagcttaatgggattctgaatatttgcaatgtggagtttccgccccgatctcacgtcagtgagggtctcctgtctctcaagtgtgtttcctttggctgttccctaatacaaaacacggacatatttttactcgtagcactcaatttagtaacttctagatgctaccgttgacctgagttaaattcatttagtcgtgtacgtaaaaactctccttttagtgtgttattttcttggccttcccttttaaaggttaaagtttctaacctaagaattaagtacgcgttcaggaagctgttgtctaggccttccccttgtgaatctgggttcattccaatacggcaagtaagagttggaaactttgagaacacagactataaaggcagcagcccgaacactgtcagactctaattggcgaccctgggaaacagttgccctgctattctttaaagaaagacgtttattctgatgataaaaacagttagccagactgtttttaaagcacctggcgggaagcagaaggttggatccaagcccttgttcagatttggtgcctgataagacaggggtttctctttttgtgacctttattattattattttgttaactgttgtaaccagttagctgttgtgttttaagatagaaaggaacaagactaaaattgtaaatactttgtaaacatcagcatttgtacttgaatagtaggattttaaagggcattgatagcataccaaacaaaaggcaaaataaagtgacctttttata

SEQ ID NO: 3430 - DNA, 9612 bp, Homo sapiens
ggagaacgacacattggatacagaagggaggtgatcatgcaccatggcactggcccccagaacgtccagcatcagctgcagaggtccagggcctgccctggcagcgagggtgaggagcagccggcccaccccaacccacccccgtcccccgcagctcccttcgctccctcagcaagcccgtcggcaccccagtctcccagttatcaaatacagcagctgatgaataggagccctgcaaccgggcagaacgtgaacatcaccctgcagagcgtgggccctgtcgtcgggggaaaccagcagatcacactggccccactgccgctccccagccccacctctccaggcttccagttcagcgctcagcctcggcggtttgagcatgggtctccatcatacattcaggtcacgtcccccttgtcccagcaggtccagacccagagtcccacgcagcccagtccggggccggggcaggccttgcagaatgtgcgtgcaggtgcccctggccctgggctgggcctctgcagcagcagccctacagggggcttcrtggatgccagcgtgctggtgaggcagatcagcttgagcccctccagtggtggacactttgtgtttcaggatgggtcagggctcacccagatcgcccagggagcccaggttcagctccagcacccgggtacgcccatcacagtccgagagcggagaccctcccagccccacacacagtcagggggcaccatccaccacctgggaccccagagccctgcagccgcgggtggggccggcctgcagcccctggccagcccaagccacatcaccacggctaacttgccaccgcagatcagcagcatcatccagggccagctggttcagcagcagcaggtgctgcaggggccgccgctgccccggcccctgggcttcgagaggacacccggcgtgctgctccccggggctgggggcgcagcggggtttgggatgacgtccccacccccgcccaccagcccttccaggactgccgtgcccccaggcctttccagcctcccactcacgtctgtggggaacacgggaatgaagaaggttcccaagaagttagaggagattcccccagcctctccggagatggcacagatgaggaagcagtgcctggactatcattaccaggagatgcaggctctgaaggaggtcttcaaggagtatttgattgaactgtttttcttgcaacactttcaagggaacatgatggatttcttagctttcaagaagaaacattatgccccattacaagcatatcttaggcagaatgatttggacrttgaagaagargaggaggaggaggaagaggaggaagaaaaatctgaggttatcaatgacgagcagcaagccctcgcagggagcctggtagcaggggccggaagcacagtagagacggacctgtttaagaggcagcaggcgatgccctccacaggtatggcagagcagtctaagaggcctcgycttgaagtgggtcaccaaggggtagttttccagcacccaggggcggacgcaggcgttcctctccagcaactaatgccgaccgcacaaggaggaatgccccccacgccgcaggccgcgcagctcgctggacagaggcagagtcagcagcagtatgacccctccacggggcctcccgtgcagaacgctgccagcttgcacaccccactgccgcagctgcccgggaggctgcccccagccggtgttcccactgcagccctctcctctgcgctgcagtttgcacagcagccgcaagtggtagaggcccagacacagctccaaatcccggtgaagactcagcagcccaatgttcccatccctgcaccgcccagcagccaactccccatccctccctcgcagcctgcacagctggccctccacgttcccacacctggaaaggtgcaggtgcaggcctctcagctttcctccctgccacagatggtagcatcgacaaggctccctgtggaccctgccccgccctgcccacggcctctgcccacctcttctacctcgtccctcgcgcctgtgagtggctccggcccaggaccctcccctgctcgatcctctccagtaaatagaccttcctcagccaccaataaggcactatctccagtcacttcccggaccccaggggtggtggcatctgcccccaccaaaccacagagtcctgctcagaatgccacctcgtcccaagacagttctcaggatacgctgacagaacaaataactctggagaaccaggtgcatcagcgcattgcggagctgaggaaagcaggtctgtggtcccagaggcgtctgccaaagctgcaggaggccccacgccccaagtcccactgggactatctgctggaggagatgcagtggatggccacagactttgcccaggagaggaggtggaaggtggctgctgcgaagaagctcgttagaactgtggtgcgccatcacgaggagaagcagctccgtgaagaaagggggaagaaggaagagcagagcagactgaggcggatagccgcctccacggcccgggagatagagtgcttttggtcgaatattgaacaggcgagttgtggaaataaaactacgagtagaattagaagaaaaaaggaagaaggccttaaatttacagaaagtttccaggagagggaaagaattgagacctaaaggatttgacgcattmcaggaaagttctctggattcaggaatgtctggaagaaaaagaaaagctagcatatctttgactgatgacgaagtggacgatgaagaggaaacaattgaagaggaggaagcaaatgaaggcgttgtggaccaccaaacagaactttctaatttagccaaggaagctgagctgcccctcctggacctgatgaagctgtacgaaggcgccttcctgccgagttctcagtggccccggccgaagcctgatggggaggacacaagcggagaggaagatgcagatgactgtccaggcgacagggagagtcgcaaggacttggttctcatcgactcgcttttcatcatggatcagttcaaagctgccgagaggatgaatatcgggaagccaaacgccaaggacattgcggacgtcactgcggtggctgaagccatcctgccgaagggcagtgctcgggtcacaacctcggtcaagtttaatgctccatctttgttgtatggggctctcagagattatcagaagattggcctggactggctggccaaactttacaggaagaatctcaatggcatattggcagatgaagctgggctgggtaaaacagtgcagatcattgctttttttgcccacctagcttgtaacgaaggtaattggggcccccatcttgttgttgtgagaagttgtaacatactcaagtgggagcttgaattgaaacgttggtgtcccggactcaaaatcctctcatatattggcagccacagagaactcaaagcaaagagacaggagtgggccgaacccaacagcttccacgtctgcatcacgtcctacactcagttcttccggggcctcaccgccttcacacgagtgcgctggaagtgcctggtcattgatgagatgcagcgcgtgaagggcatgaccgagaggcactgggaagcggttttcaccctgcagagccaacaacgtctgcttctgatcgactcgccgctgcacaataccttcctggagctctggaccatggtgcacttcctggtcccagggatctccaggccctacctgagctcccctctgagggcccccagtgaagagagccaggattactaccataaagtggtcataaggttacacagggtgacacagccatttattttgaggagaactaagagagatgtggaaaagcaactaacaaagaaatatgagcatgttttgaagtgtcgcctttctaaccgacaaaaagccttatacgaggacgttatcctgcaacctggcactcaggaggccttgaagagcgggcactttgtcaacgtcctgagcatccttgtgcggctgcagcgcatctgcaaccaccctgggctcgtcgagccccggcacccaggctcttcctacgtggcggggccactggagtatccgtccgcatctctaatcctgaaggcactggagagagatttctggaaggaagcagatctttctatgtttgatctcatcggcttagaaaataaaatcactcgtcacgaggcagagttgctgtctaagaaaaagataccgcggaaactcatggaggaaatctccacttcagcagccccagcagcccgaccagcagcagcaaagctgaaggccagcaggttgtttcagcctgtgcagtatggccagaagcccgagggtcgcaccgtggctttccccagcactcacccgccccggacggcagcccccaccacggcctctgctgctccacagggcccgcttcgaggacggccgcccatcgccacgttctctgccaatccggaggcaaaagcagcagcagccccgtttcagacctctcaggcttccgccagtgctccacgacaccagcccgcctcggcctccagcacagccgctagcccggcccatcctgcgaaactgcgggcccagaccacagcacaggcctccaccccaggccagcccccgccccagccccaggccccctcgcacgcggccgggcagagcgcgctgcctcagaggctggtgctcccctcgcaggcccaggcccgcttgcccagtggagaggtagtgaaaatagctcagctggcatccatcacaggaccacagagccgcgtggctcagccrgagacgccggtgacactgcagttccagggcagcaagttcaccctgtcacacagccagctccggcagctcacagcgggccagccgctgcagctgcaaggcagcgtcctccagatcgtgtccgcccccgggcagccctaccttcgagcccctggccctgtggtgatgcagaccgtgtctcaggcgggcgctgtgcacggcgccctgggaagcaagcccccggccggcggtcccagccctgcacccttgaccccacaagttggcgttccgggccgcgtggcggtgaatgccttggctgtaggagaacccggaacggcctccaaaccagcttctcccattggagggccgacccaggaggaaaagaccagactcttgaaagagcgcctggatcagatttatttagtcaacgagcggcgctgttctcaagctccagtctatggcagagacttgctaaggatttgtgccctgcctagccatggaagggtacagtggcgtgggtccctggatggccgtcgtgggaaggaggccgggccagcrcacagttacacttcatcctcagaaagtccaagtgagctgatgttgacgctttgtcggtgtggagagtctctgcaggatgttattgacagggtggcctttgtgattcctccggtggtggcagcacccccgtccctacgggtgccgcggccgccacccctgtacagccacagaatgaggatcttgaggcagggcctgagagagcacgctgcgccgtacttccagcagctgcggcagaccacggctccacgcctgctgcagttccctgagctgaggctggtgcagttcgactcagggaagttggaagctttagctatcttgcttcagaaattgaaatctgaaggacgtcgggtgctgattttatcacagatgattcttatgttggacattttagagatgttcttgaacttccattacctcacctatgtaagaatcgatgaaaatgccagcagtgagcaacggcaggaactgatgaggagtttcaacagagacaggcggattttttgtgccattctctccactcacagccgtaccacaggtataaaccttgtagaggcggacaccgtcgtgttttatgacaatgacctgaatccagtgatggatgccaaagctcaggagtggtgcgataggatcgggagatgcaaagacatccacatatacagttcagcgaaccatccaggagctgtttgaagtttattctcccatggatgatgctggcttcccggtcaaagctgaggagtttgtggtgctttctcaggaaccttctgtcacggaaaccattgcacccaaaattgcaagacctttcatagaggccctcaagagtattgagtatctggaggaggatgcccagaagtccgcacaggagggggtgctgggaccacacactgatgctctgtcatcagactctgagaacatgccgtgtgatgaagaaccatcccaattagaggagctagctgacttcatggagcagcttacaccaattgaaaaatatgctttaaattacctggaattattccatacttctattgagcaagaaaaggagagaaacagtgaggacgcagtgatgactgcagtgagggcatgggagttctggaacctgaagaccctgcaggagagggaggcccggctgcggctggagcaggaggaggcggagctcctgacctacacgcgagaggatgcctacagcatggagtatgtctacgaagatgtcgatgggcagacagaagtcatgccgctctggaccccacccaccccgccgcaggacgacagcgacatctacctcgactcggtcatgtgtctcatgtatgaagccactcccatcccagaggctaagctgccccctgtgtacgtgaggaaggagcggaagcgacacaaaacagacccctcagctgcaggcaggaagaagaagcagcgtcacggggaggcggtcgtccctcctcggtccctgtttgaccgcgcaacaccaggacttctgaaaattcgcagagagggcaaggagcagaagaagaatattctgctgaagcagcaggtgccattcgccaagcccctgccaacttttgccaaacccacagctgagcctggtcaagacaaccccgagtggctcatcagtgaggactgggcgctgctgcaggctgtaaagcagttactggagctgcctttgaacctcacaatcgtgtcacctgctcacacacctaattgggatcttgtcagtgacgttgttaactcctgtagccgaatctaccgctcttccaaacagtgccggaatcgctacgagaatgtcatcattccacgagaggaggggaagagtaaaaacaaccgtcctctccgtacgagccagatctatgcccaggatgagaatgccacacacacccagctgtacacgagccactttgacttaatgaaaatgactgctggcaagaggagtcccccaatcaaacctctgcttggcatgaatccctttcagaagaaccccaagcacgcgtctgtgttggcagaaagtggaatcaactatgacaagccgctgcctcccatccaggtggcatctctccgtgcagagcgaatcgcaaaagagaaaaaggctctggctgatcagcagaaggcacagcagccggccgtggcccagccacccccgccccagccgcagcccccaccacccccgcagcagccaccgccaccgctgccacaaccacaggcagcgggcagccagccgccagcagggccaccagctgtccagccccaaccccagccacagccccagacccagccacagcctgtgcaggccccagcgaaggcgcagcccgcaatcacgacggggggcagtgcagccgtactggcaggaaccattaaaacatcagttactgggacgagcatgcccactggtgccgtgagtggaaatgtgatcgtgaacaccatcgcaggggtcccagctgccaccttccagtccatcaacaagcgcctggcgtcgccagtggctcctggggccttgactacgccgggaggctctgctcccgcccaggtggtgcacacccagcccccgccacgggcagtcggctccccagccacggcgacccctgacctggtgtccatggcaacgactcagggtgttcgagcggtcacttctgtgacagcctcggcygtggtcactaccaacctgaccccagtgcagaccccggcacggtctttggtgccccaagtgtcccaagccacaggagttcagctccctggaaaaaccatcacacctgcacatttccagcttctcaggcagcagcagcagcagcagcaacaavagcagcagcagcagcagcagcagcagcagcagcagcagcagcagcaacagcagcagcagcaacagacgacgacgacctctcaggtgcaagttccacagatccagggccaggcccagtccccagcacagatcaaagctgtgggcaagctgacgccggaacacctcatcaaaatgcagaagcagaaactgcagatgcccccgcagcccccaccgccacaggcccagtctgcgcccccgcagccaacagcccaagtgcaagtgcagacctcgcagccgccgcagcagcagagcccccagctcacgacggtcacggccccaaggcctggtgccctgctgacgggcaccaccgtggccaacctccaggtggcccggctcacccgggttcccacttctcagctgcaggcgcaagggcagatgcagacccaggcaccccagccagcccaggtggccttggcgaagcctccggtggtgtccgtcccggcagctgtggtctcctcaccgggagtcaccaccctgcccatgaacgtcgcggggatcagcgtggcgatcggtcagccacagaaggcagcaggacagaccgtggtggcccagcccgtgcacatgcagcagctgctgaagctgaagcagcaggccgtccagcagcagaaggccatccagccccaggctgcacagggcccggcagccgtccagcagaagatcaccgcacagcagatcaccacccctggcgcgcagcagaaggttgcctacgccgcgcagccggcccttaagacccagtttcttaccacacccatctcccaggcccagaaactggccggggcccagcaagtgcagacccagatccaggttgcaaaacttcctcaagttgttcaacagcaaacacccgtggccagcatccagcaagttgcctctgcttcccagcaggcttctccacagactgtggcgctcacgcaggcgacggcggccgggcagcaggtgcagatgatccctgcagtgaccgcgactgcccaggtggttcagcagaaactcattcagcagcaggtggtgaccacggcgtcggccccgctccagactccaggcgctcccaacccagcccaggtgcccgccagctccgacagcccaagccagcagcccaagttacagatgagggtccctgctgtcaggctaaagacacctactaagcctccgtgccagtagtcagggcagcagggctgcctctcatctaaagcaaaactaccttcctcacagaaaacgctttattagtgaaccttgggaccatgtcacgcaagagattcagcactgggaaagatataattgaaacaaaatagtgtaatcattttattaaaatgcatcccacactgcaggacaaatggtccttatggagtgccgcgttctctgtactacgtggctcatggaaaaagtgacaacatggcttcctctaaatcatttcaccttttcagtccccacccgcacccgtcccctagagccatagtactgtgtt

SEQ ID NO: 3431 - DNA, 9711 bp, Homo sapiens
ggagaacgacacattggatacagaagggaggtgatcatgcaccatggcactggcccccagaacgtccagcatcagctgcagaggtccagggcctgccctggcagcgagggtgaggagcagccggcccaccccaacccacccccgtcccccgcagctcccttcgctccctcagcaagcccgtcggcaccccagtctcccagttatcaaatacagcagctgatgaataggagccctgcaaccgggcagaacgtgaacatcaccctgcagagcgtgggccctgtcgtcgggggaaaccagcagatcacactggccccactgccgctccccagccccacctctccaggcttccagttcagcgctcagcctcggcggtttgagcatgggtctccatcatacattcaggtcacgtcccccttgtcccagcaggtccagacccagagtcccacgcagcccagtccggggccggggcaggccttgcagaatgtgcgtgcaggtgcccctggccctgggctgggcctctgcagcagcagccctacagggggcttcrtggatgccagcgtgctggtgaggcagatcagcttgagcccctccagtggtggacactttgtgtttcaggatgggtcagggctcacccagatcgcccagggagcccaggttcagctccagcacccgggtacgcccatcacagtccgagagcggagaccctcccagccccacacacagtcagggggcaccatccaccacctgggaccccagagccctgcagccgcgggtggggccggcctgcagcccctggccagcccaagccacatcaccacggctaacttgccaccgcagatcagcagcatcatccagggccagctggttcagcagcagcaggtgctgcaggggccgccgctgccccggcccctgggcttcgagaggacacccggcgtgctgctccccggggctgggggcgcagcggggtttgggatgacgtccccacccccgcccaccagcccttccaggactgccgtgcccccaggcctttccagcctcccactcacgtctgtggggaacacgggaatgaagaaggttcccaagaagttagaggagattcccccagcctctccggagatggcacagatgaggaagcagtgcctggactatcattaccaggagatgcaggctctgaaggaggtcttcaaggagtatttgattgaactgtttttcttgcaacactttcaagggaacatgatggatttcttagctttcaagaagaaacattatgccccattacaagcatatcttaggcagaatgatttggacrttgaagaagargaggaggaggaggaagaggaggaagaaaaatctgaggttatcaatgacgagcagcaagccctcgcagggagcctggtagcaggggccggaagcacagtagagacggacctgtttaagaggcagcaggcgatgccctccacaggtatggcagagcagtctaagaggcctcgycttgaagtgggtcaccaaggggtagttttccagcacccaggggcggacgcaggcgttcctctccagcaactaatgccgaccgcacaaggaggaatgccccccacgccgcaggccgcgcagctcgctggacagaggcagagtcagcagcagtatgacccctccacggggcctcccgtgcagaacgctgccagcttgcacaccccactgccgcagctgcccgggaggctgcccccagccggtgttcccactgcagccctctcctctgcgctgcagtttgcacagcagccgcaagtggtagaggcccagacacagctccaaatcccggtgaagactcagcagcccaatgttcccatccctgcaccgcccagcagccaactccccatccctccctcgcagcctgcacagctggccctccacgttcccacacctggaaaggtgcaggtgcaggcctctcagctttcctccctgccacagatggtagcatcgacaaggctccctgtggaccctgccccgccctgcccacggcctctgcccacctcttctacctcgtccctcgcgcctgtgagtggctccggcccaggaccctcccctgctcgatcctctccagtaaatagaccttcctcagccaccaataaggcactatctccagtcacttcccggaccccaggggtggtggcatctgcccccaccaaaccacagagtcctgctcagaatgccacctcgtcccaagacagttctcaggatacgctgacagaacaaataactctggagaaccaggtgcatcagcgcattgcggagctgaggaaagcaggtctgtggtcccagaggcgtctgccaaagctgcaggaggccccacgccccaagtcccactgggactatctgctggaggagatgcagtggatggccacagactttgcccaggagaggaggtggaaggtggctgctgcgaagaagctcgttagaactgtggtgcgccatcacgaggagaagcagctccgtgaagaaagggggaagaaggaagagcagagcagactgaggcggatagccgcctccacggcccgggagatagagtgcttttggtcgaatattgaacaggttgtggaaataaaactacgagtagaattagaagaaaaaaggaagaaggccttaaatttacagaaagtttccaggagagggaaagaattgagacctaaaggatttgacgcattmcaggaaagttctctggattcaggaatgtctggaagaaaaagaaaagctagcatatctttgactgatgacgaagtggacgatgaagaggaaacaattgaagaggaggaagcaaatgaaggcgttgtggaccaccaaacagaactttctaatttagccaaggaagctgagctgcccctcctggacctgatgaagctgtacgaaggcgccttcctgccgagttctcagtggccccggccgaagcctgatggggaggacacaagcggagaggaagatgcagatgactgtccaggcgacagggagagtcgcaaggacttggttctcatcgactcgcttttcatcatggatcagttcaaagctgccgagaggatgaatatcgggaagccaaacgccaaggacattgcggacgtcactgcggtggctgaagccatcctgccgaagggcagtgctcgggtcacaacctcggtcaagtttaatgctccatctttgttgtatggggctctcagagattatcagaagattggcctggactggctggccaaactttacaggaagaatctcaatggcatattggcagatgaagctgggctgggtaaaacagtgcagatcattgctttttttgcccacctagcttgtaacgaaggtaattggggcccccatcttgttgttgtgagaagttgtaacatactcaagtgggagcttgaattgaaacgttggtgtcccggactcaaaatcctctcatatattggcagccacagagaactcaaagcaaagagacaggagtgggccgaacccaacagcttccacgtctgcatcacgtcctacactcagttcttccggggcctcaccgccttcacacgagtgcgctggaagtgcctggtcattgatgagatgcagcgcgtgaagggcatgaccgagaggcactgggaagcggttttcaccctgcagagccaacaacgtctgcttctgatcgactcgccgctgcacaataccttcctggagctctggaccatggtgcacttcctggtcccagggatctccaggccctacctgagctcccctctgagggcccccagtgaagagagccaggattactaccataaagtggtcataaggttacacagggtgacacagccatttattttgaggagaactaagagagatgtggaaaagcaactaacaaagaaatatgagcatgttttgaagtgtcgcctttctaaccgacaaaaagccttatacgaggacgttatcctgcaacctggcactcaggaggccttgaagagcgggcactttgtcaacgtcctgagcatccttgtgcggctgcagcgcatctgcaaccaccctgggctcgtcgagccccggcacccaggctcttcctacgtggcggggccactggagtatccgtccgcatctctaatcctgaaggcactggagagagatttctggaaggaagcagatctttctatgtttgatctcatcggcttagaaaataaaatcactcgtcacgaggcagagttgctgtctaagaaaaagataccgcggaaactcatggaggaaatctccacttcagcagccccagcagcccgaccagcagcagcaaagctgaaggccagcaggttgtttcagcctgtgcagtatggccagaagcccgagggtcgcaccgtggctttccccagcactcacccgccccggacggcagcccccaccacggcctctgctgctccacagggcccgcttcgaggacggccgcccatcgccacgttctctgccaatccggaggcaaaagcagcagcagccccgtttcagacctctcaggcttccgccagtgctccacgacaccagcccgcctcggcctccagcacagccgctagcccggcccatcctgcgaaactgcgggcccagaccacagcacaggcctccaccccaggccagcccccgccccagccccaggccccctcgcacgcggccgggcagagcgcgctgcctcagaggctggtgctcccctcgcaggcccaggcccgcttgcccagtggagaggtagtgaaaatagctcagctggcatccatcacaggaccacagagccgcgtggctcagccrgagacgccggtgacactgcagttccagggcagcaagttcaccctgtcacacagccagctccggcagctcacagcgggccagccgctgcagctgcaaggcagcgtcctccagatcgtgtccgcccccgggcagccctaccttcgagcccctggccctgtggtgatgcagaccgtgtctcaggcgggcgctgtgcacggcgccctgggaagcaagcccccggccggcggtcccagccctgcacccttgaccccacaagttggcgttccgggccgcgtggcggtgaatgccttggctgtaggagaacccggaacggcctccaaaccagcttctcccattggagggccgacccaggaggaaaagaccagactcttgaaagagcgcctggatcagatttatttagtcaacgagcggcgctgttctcaagctccagtctatggcagagacttgctaaggatttgtgccctgcctagccatggaagggtacagtggcgtgggtccctggatggccgtcgtgggaaggaggccgggccagcrcacagttacacttcatcctcagaaagtccaagtgagctgatgttgacgctttgtcggtgtggagagtctctgcaggatgttattgacagggtggcctttgtgattcctccggtggtggcagcacccccgtccctacgggtgccgcggccgccacccctgtacagccacagaatgaggatcttgaggcagggcctgagagagcacgctgcgccgtacttccagcagctgcggcagaccacggctccacgcctgctgcagttccctgagctgaggctggtgcagttcgactcagggaagttggaagctttagctatcttgcttcagaaattgaaatctgaaggacgtcgggtgctgattttatcacagatgattcttatgttggacattttagagatgttcttgaacttccattacctcacctatgtaagaatcgatgaaaatgccagcagtgagcaacggcaggaactgatgaggagtttcaacagagacaggcggattttttgtgccattctctccactcacagccgtaccacaggtataaaccttgtagaggcggacaccgtcgtgttttatgacaatgacctgaatccagtgatggatgccaaagctcaggagtggtgcgataggatcgggagatgcaaagacatccacatatacaggcttgtgagtggcaattccattgaagagaaattgttgaaaaatggaactaaagatactgaaccgagaagtggctgctcagggaaattaacacacatctctgtgttcagcgaaccatccaggagctgtttgaagtttattctcccatggatgatgctggcttcccggtcaaagctgaggagtttgtggtgctttctcaggaaccttctgtcacggaaaccattgcacccaaaattgcaagacctttcatagaggccctcaagagtattgagtatctggaggaggatgcccagaagtccgcacaggagggggtgctgggaccacacactgatgctctgtcatcagactctgagaacatgccgtgtgatgaagaaccatcccaattagaggagctagctgacttcatggagcagcttacaccaattgaaaaatatgctttaaattacctggaattattccatacttctattgagcaagaaaaggagagaaacagtgaggacgcagtgatgactgcagtgagggcatgggagttctggaacctgaagaccctgcaggagagggaggcccggctgcggctggagcaggaggaggcggagctcctgacctacacgcgagaggatgcctacagcatggagtatgtctacgaagatgtcgatgggcagacagaagtcatgccgctctggaccccacccaccccgccgcaggacgacagcgacatctacctcgactcggtcatgtgtctcatgtatgaagccactcccatcccagaggctaagctgccccctgtgtacgtgaggaaggagcggaagcgacacaaaacagacccctcagctgcaggcaggaagaagaagcagcgtcacggggaggcggtcgtccctcctcggtccctgtttgaccgcgcaacaccaggacttctgaaaattcgcagagagggcaaggagcagaagaagaatattctgctgaagcagcaggtgccattcgccaagcccctgccaacttttgccaaacccacagctgagcctggtcaagacaaccccgagtggctcatcagtgaggactgggcgctgctgcaggctgtaaagcagttactggagctgcctttgaacctcacaatcgtgtcacctgctcacacacctaattgggatcttgtcagtgacgttgttaactcctgtagccgaatctaccgctcttccaaacagtgccggaatcgctacgagaatgtcatcattccacgagaggaggggaagagtaaaaacaaccgtcctctccgtacgagccagatctatgcccaggatgagaatgccacacacacccagctgtacacgagccactttgacttaatgaaaatgactgctggcaagaggagtcccccaatcaaacctctgcttggcatgaatccctttcagaagaaccccaagcacgcgtctgtgttggcagaaagtggaatcaactatgacaagccgctgcctcccatccaggtggcatctctccgtgcagagcgaatcgcaaaagagaaaaaggctctggctgatcagcagaaggcacagcagccggccgtggcccagccacccccgccccagccgcagcccccaccacccccgcagcagccaccgccaccgctgccacaaccacaggcagcgggcagccagccgccagcagggccaccagctgtccagccccaaccccagccacagccccagacccagccacagcctgtgcaggccccagcgaaggcgcagcccgcaatcacgacggggggcagtgcagccgtactggcaggaaccattaaaacatcagttactgggacgagcatgcccactggtgccgtgagtggaaatgtgatcgtgaacaccatcgcaggggtcccagctgccaccttccagtccatcaacaagcgcctggcgtcgccagtggctcctggggccttgactacgccgggaggctctgctcccgcccaggtggtgcacacccagcccccgccacgggcagtcggctccccagccacggcgacccctgacctggtgtccatggcaacgactcagggtgttcgagcggtcacttctgtgacagcctcggcygtggtcactaccaacctgaccccagtgcagaccccggcacggtctttggtgccccaagtgtcccaagccacaggagttcagctccctggaaaaaccatcacacctgcacatttccagcttctcaggcagcagcagcagcagcagcaacaavagcagcagcagcagcagcagcagcagcagcagcagcagcagcagcaacagcagcagcagcaacagacgacgacgacctctcaggtgcaagttccacagatccagggccaggcccagtccccagcacagatcaaagctgtgggcaagctgacgccggaacacctcatcaaaatgcagaagcagaaactgcagatgcccccgcagcccccaccgccacaggcccagtctgcgcccccgcagccaacagcccaagtgcaagtgcagacctcgcagccgccgcagcagcagagcccccagctcacgacggtcacggccccaaggcctggtgccctgctgacgggcaccaccgtggccaacctccaggtggcccggctcacccgggttcccacttctcagctgcaggcgcaagggcagatgcagacccaggcaccccagccagcccaggtggccttggcgaagcctccggtggtgtccgtcccggcagctgtggtctcctcaccgggagtcaccaccctgcccatgaacgtcgcggggatcagcgtggcgatcggtcagccacagaaggcagcaggacagaccgtggtggcccagcccgtgcacatgcagcagctgctgaagctgaagcagcaggccgtccagcagcagaaggccatccagccccaggctgcacagggcccggcagccgtccagcagaagatcaccgcacagcagatcaccacccctggcgcgcagcagaaggttgcctacgccgcgcagccggcccttaagacccagtttcttaccacacccatctcccaggcccagaaactggccggggcccagcaagtgcagacccagatccaggttgcaaaacttcctcaagttgttcaacagcaaacacccgtggccagcatccagcaagttgcctctgcttcccagcaggcttctccacagactgtggcgctcacgcaggcgacggcggccgggcagcaggtgcagatgatccctgcagtgaccgcgactgcccaggtggttcagcagaaactcattcagcagcaggtggtgaccacggcgtcggccccgctccagactccaggcgctcccaacccagcccaggtgcccgccagctccgacagcccaagccagcagcccaagttacagatgagggtccctgctgtcaggctaaagacacctactaagcctccgtgccagtagtcagggcagcagggctgcctctcatctaaagcaaaactaccttcctcacagaaaacgctttattagtgaaccttgggaccatgtcacgcaagagattcagcactgggaaagatataattgaaacaaaatagtgtaatcattttattaaaatgcatcccacactgcaggacaaatggtccttatggagtgccgcgttctctgtactacgtggctcatggaaaaagtgacaacatggcttcctctaaatcatttcaccttttcagtccccacccgcacccgtcccctagagccatagtactgtgtt

SEQ ID NO: 3432 - DNA, 2741 bp, Homo sapiens
agcctggtgcgcatgcgccactgtaaaggccgttaggtctgtccctggcgcccgattagaatatttaattccagttggagcgtttttcctcaccttactgtattttatttcggtaaatacccacacattttaatttctgagaggcacaaattcctctcagactcattcaaattgaccgagtagtcttataaggtgccttttgtctcattgtaaatcctcagtaaagtttgcagtttaggatgataacgtgatttttgcgtaaaaataacaactcatttcacctgaaaaggaccacgacaggagcagggactcgagtttctttttattcgggcacttcagtagttacctcttgcttgggggtggtgccgcgtgtggacccgatggaccccggcgacgccgccattttggagtcttccctaaggatcctctaccggcttttcgagtcagtgctgccgccgctgcccgcggctttgcagagcaggatgaatgtgatagaccacgtgcgggacatggcggccgcggggctgcactccaacgtgcggctcctcagcagcttgttacttacaatgagtaataacaaccctgagttattctccccacctcagaagtaccagcttttggtgtatcatgcagattctctctttcatgataaggaatatcggaatgctgtgagtaagtataccatggctttacagcagaagaaagcgctaagtaaaacttcaaaagtgagaccttcaactggaaattctgcatctactccacaaagtcagtgtcttccatctgaaattgaagtgaaatacaaaatggctgaatgttatacaatgctaaaacaagataaagatgccattgctatacttgatgggatcccttcaagacaaagaactcccaaaataaacatgatgctggcaaacctgtacaagaaggctggtcaggagcgcccttcagtcaccagctataaggaggtgctgaggcagtgcccattagcccttgatgccattctaggcttgttgtccctttctgtaaaaggggcagaggtggcatccatgacaatgaatgtgatccaaaccgtgcctaacttggactggctctctgtgtggatcaaagcgtaygcttttgtgcacactggtgacaactcaagagcaatcagtaccatctgttcactagagaaaaaatccttattgcgagataacgtggacctattgggaagcttggcagatctgtacttcagagctggagacaataaaaactctgtcctcaagtttgaacaggcacagatgttggatccttatctgataaaaggaatggatgtatatggctacctactggcacgagaagggcggctagaggatgttgagaaccttggatgccgccttttcaatatctctgatcagcatgcagaaccgtgggtggtttctggctgtcacagcttctatagcaaacgctactcccgggccctctatttaggagccaaggccattcagctgaacagtaatagtgttcaagctctgctacttaagggagcagcacttaggaacatgggcagagtccaagaagcaataatccactttcgggaggccatacggctcgcaccttgtcgcttagattgttatgaaggtcttatcgaatgttacttagcctccaacagtattcgagaagcaatggtaatggctaacaacgtttacaaaactctgggagcaaatgcacagacccttacccttttagccaccgtttgtcttgaagacccagtgacacaggagaaagccaaaacattattagataaagccctgacccaaaggccagattacattaaggctgtggtgaaaaaagcagaactacttagcagagaacagaaatatgaagatggaattgctttgctgaggaacgcactggctaatcagagtgactgtgtcctgcatcggatcctaggagatttccttgtagctgtcaatgagtatcaggaggcaatggaccagtatagtatagcactaagtttggaccccaatgaccagaagtctctagaggggatgcagaagatggagaaggaggagagtcccacggatgccactcaggaggaggatgtggacgacatggaagggagtggggaagaaggggacctggagggcagcgacagtgaggcggcccagtgggctgaccaggagcagtggttcggcatgcagtgagggggcggcagctccatggccgcagtggcctgccctgctctgagcacttccgtggactgaaggaaccgtaggagcctgctctcagaaggacaatgattcagcatgtgattgcagcaggggtctctgccccctcgctcccaattcctagtcgtgacttcatttctaaaacagagcctgaccaaccttccatgtatctccatcctcccctgctccagccagggaggactgagggagtgccccgagacccacgcacatgttggggcttctgggccaagagtactttttatataactaatttctaaatccaaaagctcaaggaatagacagtgttctgtgacatggattggtttgaaggagttacccaccatcccagcacgataatgtcatctcccaagttggatggcagcacgatctggccctagggagcttcctgttcccagaagtcattgtcctgggctatccagatgtccctaggcagaacagttttcctctttgcttagctagtaacttgcctctgagcctgggctgatctgagaaacaggtgtgacaagagcatgaacc

SEQ ID NO: 3433 - DNA, 3384 bp, Homo sapiens
agcctggtgcgcatgcgccactgtaaaggccgttaggtctgtccctggcgcccgattagaatatttaattccagttggagcgtttttcctcaccttactgtattttatttcggtaaatacccacacattttaatttctgagaggcacaaattcctctcagactcattcaaattgaccgagtagtcttataaggtgccttttgtctcattgtaaatcctcagtaaagtttgcagtttaggatgataacgtgatttttgcgtaaaaataacaactcatttcacctgaaaaggaccacgacaggagcagggactcgagtttctttttattcgggcacttcagtagttacctcttgcttgggggtggtgccgcgtgtggacccgatggaccccggcgacgccgccattttggagtcttccctaaggatcctctaccggcttttcgagtcagtgctgccgccgctgcccgcggctttgcagagcaggatgaatgtgatagaccacgtgcgggacatggcggccgcggggctgcactccaacgtgcggctcctcagcagcttgttacttacaatgagtaataacaaccctgagttattctccccacctcagaagtaccagcttttggtgtatcatgcagattctctctttcatgataaggaatatcggaatgctgtgagtaagtataccatggctttacagcagaagaaagcgctaagtaaaacttcaaaagtgagaccttcaactggaaattctgcatctactccacaaagtcagtgtcttccatctgaaattgaagtgaaatacaaaatggctgaatgttatacaatgctaaaacaagataaagatgccattgctatacttgatgggatcccttcaagacaaagaactcccaaaataaacatgatgctggcaaacctgtacaagaaggctggtcaggagcgcccttcagtcaccagctataaggaggtgctgaggcagtgcccattagcccttgatgccattctaggcttgttgtccctttctgtaaaaggggcagaggtggcatccatgacaatgaatgtgatccaaaccgtgcctaacttggactggctctctgtgtggatcaaagcgtaygcttttgtgcacactggtgacaactcaagagcaatcagtaccatctgttcactagagaaaaaatccttattgcgagataacgtggacctattgggaagcttggcagatctgtacttcagagctggagacaataaaaactctgtcctcaagtttgaacaggcacagatgttggatccttatctgataaaaggaatggatgtatatggctacctactggcacgagaagggcggctagaggatgttgagaaccttggatgccgccttttcaatatctctgatcagcatgcagaaccgtgggtggtttctggctgtcacagcttctatagcaaacgctactcccgggccctctatttaggagccaaggccattcagctgaacagtaatagtgttcaagctctgctacttaagggagcagcacttaggaacatgggcagagtccaagaagcaataatccactttcgggaggccatacggctcgcaccttgtcgcttagattgttatgaaggtcttatcgaatgttacttagcctccaacagtattcgagaagcaatggtaatggctaacaacgtttacaaaactctgggagcaaatgcacagacccttacccttttagccaccgtttgtcttgaagacccagtgacacaggagaaagccaaaacattattagataaagccctgacccaaaggccagattacattaaggctgtggtgaaaaaagcagaactacttagcagagaacagaaatatgaagatggaattgctttgctgaggaacgcactggctaatcagagtgactgtgtcctgcatcggatcctaggagatttccttgtagctgtcaatgagtatcaggaggcaatggaccagtatagtatagcactaagtttggaccccaatgaccagaagtctctagaggggatgcagaagatggagaaggaggagagtcccacggatgccactcaggaggaggatgtggacgacatggaagggagtggggaagaaggggacctggagggcagcgacagtgaggcggcccagtgggctgaccaggagcagtggttcggcatgcagtgagggggcggcagctccatggccgcagtggcctgccctgctctgagcacttccgtggactgaaggaaccgtaggagcctgctctcagaaggacaatgattcagcatgtgattgcagcaggggtctctgccccctcgctcccaattcctagtcgtgacttcatttctaaaacagagcctgaccaaccttccatgtatctccatcctcccctgctccagccagggaggactgagggagtgccccgagacccacgcacatgttggggcttctgggccaagagtactttttatataactaatttctaaatccaaaagctcaaggaatagacagtgttctgtgacatggattggtttgaaggagttacccaccatcccagcacgataatgtcatctcccaagttggatggcagcacgatctggccctagggagcttcctgttcccagaagtcattgtcctgggctatccagatgtccctagtaaatcttgcttccttctgcaatgttagtaatgccttaagctgacagttgctattttgcagaacagttttcctctttgcttagctagtaacttgcctctgagcctgggctgatctgagaaacaggtgtgacaagagcatgaaccagaggtgcacctggggcagttccctaataaaactggtttgtacagtcatggtgttggggtgatcagaatggaagcccttttcaaaatagactcttagtatttttgtcttattcgcaatgcattgattcagccccagaattatttgccagaaatagactttcttcccctggtgttgggagccaggagggttggaaagctcaggaaccctgagctggttcatctgtttgcatattgggtaggttaatttccctggagcctgagagtctttggccagatttcagctgcgtctgcctggctcttttgctgcagctgtgagattggggtctggttccagcagtctgtcactggtcagcctgagtatcacaccctgagctctggggctgggagtttcttcccacaccctctcccttgtgccttaagttgcgatggctctgagtatacaattaatcggaggtgaggggtgggtgtcacagctaatcccaaattcaaaaattagtccaaggtgctgcaaaatataaatttgatgtcagtagaaagtcgtatcctaaaatgtaaaaactgtaagtgtacagtagttaatgagctc

SEQ ID NO: 3434 - DNA, 3624 bp, Homo sapiens
ctttcggcttgggttcgggagggcggaggtgcgcggggttggtttgctcctcctctagatggtgacagcgcgtcttctcccccacagctggggatgttcgtgctgcagctcggcgtcttgtccacctttttgtccgagcctgtggtcaaggcgctgaccagcggggccgcgctgcacgtgctcttgtcccagctgccgagcctcttggggttgtccctcccgcgccagatcggctgcttctctctcttcaagacgctggcctccttgctgactrcgctgcctcggagcagtccggccgaactgaccatctccgcgctcagcctggcgctgctcgtgccggtcaaggaattgaacgtgagattccgagaccggctacccacgccgatcccgggggaagtcgtcttggtgcttctggcctccgtgctctgcttcacctcttctgtggacacaagataccaagtccagatagtggggctgttgcctggagggtaagagaatgaaaagatgccagctttctcttctcccacctctcccacccaacactccctcttatctccaccccccattttctctgccttccttatctcactgaagcacctaacccctcctcaccatggatccctccctctccagatttccccaacccctcctccccaacctggctgagctgcccaggattctggctgactcgctgcccattgcactggttagttttgcggtgtctgcctccctggcctccatccatgcagacaagtatagctacactattgactccaaccaggtgggactctgactgtggaccccaaccctctcatttgacttcccaccatgcctttgtctctcccacttcatctcactgtatccctccaggagttcctggcacatggtgcctccaacctcatctcctccctcttctcttgctttcccaactcggctacgctggccaccaccaatctactggtggatgctggtgggaaaacacaggtaagagggcatccttggatgaggagaaaggatgggccatccaggcaaggtggcggtggtggagaaacaggtggaagatggctagaatcccaggtggcacctatatagagaagactggggatctgtgagaaagggtgactgaggggatggaattatagataggagagatggaagataacaatgttccagtaagacctttgtaggctctaascgctgaaaaagtttatggtgccccaggtgtggttcaaaataaaaacacaaaactataaaataaacttaagagataaaattcttatttttttcacacaatgacattgtcttttaaaaggaatatcacatatcaaagtctccccctaatatttttggtttcccttactttgctggtgccctaaacacatataccctgcttatagggtaacccaacagtggcttttaaggtggaggtgggctacaaaactggggaacttgaacaatggacatctacaaggagactggtgaataatgggcatttaattaattggggggagcgggagggttagatgtgaatggcagaatattaagaagggggttgtgtggaaggagatttgggagaagggagacttccgaggaagattaggcagagtgggcaggaagaccagctctcatgtgggggtgggaggctctcttccttttttgctcctgttcctccttttctctagctggcaggcctcttctcctgcacagtggtcctgtcggtgctgctgtggctggggcccttcttttactatctgcccaaggtaakgagcagaggaggcatgagcatggctgggaggggtagctgtattccaggacatcgaggtagtcagcccacctcctctgcctcaaggctgtcctggcttgcatcaacatctccagcatgcgccaggtgttctgccagatgcaggaacttccacaactatggcacatcagccgagtggactttgtgagaaatgccattacccccagattgccccctctcatcttgttagcatccccagcctctgccctgaaccaaacctaattgtcctggtcttaagttctgcaacccacccactcccccagcaaacataactcctagtatgctttactcacaggcaagggaaaggatggggtttgaacccctttggcctgaatatttgtaacttcccaactggtgcgggtcattacatttggtgtgtgtcccattgaatcaaccctgttgtttccttctgtcatgctttccacttcttcctggatcatctctccccatcacttgccttggtagtcactgccctggatctctttacccagcagtgatggcctggcttttcttttgggcaatccacccctatccctatcctgcaggctgtgtggatggtcacctgggtggcagtagtgaccctgagtgtggatttgggcctggctgtgggtgtggtcttctccatgatgactgtggtctgccgcacccggagctcctccaggtcccggggctctgcatcctgagctatccaacaccactgtactttgggacccgtgggcagtttcgctgcaacctggagtggcacctggggctcggagaaggagaaaaggagacttcaaagccagatggcccaatggttgcagttgctgagcctgtcagggtggtggtcctagacttcagtggtgtcacctttgcagatgctgctggggccagagaagtggtgcagctsgycagccgatgtcgagatgctaggatccgcctcctcctggctcagtgtaatgccttggtgcaggggacactgacccgggtaggactcctggacagggtgactccagatcagctgtttgtgagtgtgcaggatgcagctgcttatgccctggggagcctgktaaggggcagtagcaccaggagygggagccaggaggcactgggctgcggcaagtgaggcaggggagctcactgacccaaagatttgcaccgtgtgggtctgacctcatcatgtggagtgcagagggccctgatgacatgtgtgtgatgaggaccatgacccttgaacccccttacctaacgtaactaataaaatgaagctgagagctttggaatmcatgaagtgagtctaggtgtttgcacagggactctggtgccccttcttttgtgcccacagcattgcagagacacaactaagaatggctttcaccaaccaccagccctcaccccagccccagagccacaagttctctctgtgggggtggggctggagcaggtacacagagtactggatctgaagatgcagatgaggggcacagtyttgggattatgtgttggggaacttccccaccccctcggtcccaagatgagaggacagtgtttccaccttaggttcttagagtccctctgggctctttggcacttggaaagtgatccccccatttcctgccccatgagaatgggcagggggaggacttggcactggctgtgggagaggttatggctccaccaggcctctgggcactggaaaaaggaggggtgtcrccaggacaacccctactgggcatcaggttctgaaaaggaagagtgaggaactagaggctcagggacagccagtagagtgctcacagggtggtggggtttgttggaaattcctggcagggacaaggaggcag

SEQ ID NO: 3435 - DNA, 4208 bp, Homo sapiens
acccaggcgcgggggacacctctgaccttaagtaccccttggcgaccaggctcagggaagctctcaccgaggctcggttccatcagctcttcaggggcgaagagcaggaaccggagctacctgaagagcgcggctttccccggctcttcgggctgtggaggctgcgggctcgcgcttgttccgggacaggggcgtggcgcctgctgctggctcggctgcccgcgctgcactggctgccccattaccgctggcgggcctggctgctcggagatgcggtggccggagtgaccgtgggcatcgtgcacgtgccccagggcatggcttttgctctcctggcctccgtgcccccggtgtttggactctacacttctttcttccccgtcctcatctacagcttgctaggtactgggagacacctgtccacaggaactttcgccatactcagcctcatgacaggctcggccgtcgagcggctggtgccggaacccctcgtggggaatctgagcggaatcgagaaggagcagctggacgctcaacgggttggggtagccgcggccgtggccttcgggagcggggcgttgaygctttcggcttgggttcgggagggcggaggtgcgcggggttggtttgctcctcctctagatggtgacagcgcgtcttctcccccacagctggggatgttcgtgctgcagctcggcgtcttgtccacctttttgtccgagcctgtggtcaaggcgctgaccagcggggccgcgctgcacgtgctcttgtcccagctgccgagcctcttggggttgtccctcccgcgccagatcggctgcttctctctcttcaagacgctggcctccttgctgactrcgctgcctcggagcagtccggccgaactgaccatctccgcgctcagcctggcgctgctcgtgccggtcaaggaattgaacgtgagattccgagaccggctacccacgccgatcccgggggaagtcgtcttggtgcttctggcctccgtgctctgcttcacctcttctgtggacacaagataccaagtccagatagtggggctgttgcctggagggtaagagaatgaaaagatgccagctttctcttctcccacctctcccacccaacactccctcttatctccaccccccattttctctgccttccttatctcactgaagcacctaacccctcctcaccatggatccctccctctccagatttccccaacccctcctccccaacctggctgagctgcccaggattctggctgactcgctgcccattgcactggttagttttgcggtgtctgcctccctggcctccatccatgcagacaagtatagctacactattgactccaaccaggtgggactctgactgtggaccccaaccctctcatttgacttcccaccatgcctttgtctctcccacttcatctcactgtatccctccaggagttcctggcacatggtgcctccaacctcatctcctccctcttctcttgctttcccaactcggctacgctggccaccaccaatctactggtggatgctggtgggaaaacacaggtaagagggcatccttggatgaggagaaaggatgggccatccaggcaaggtggcggtggtggagaaacaggtggaagatggctagaatcccaggtggcacctatatagagaagactggggatctgtgagaaagggtgactgaggggatggaattatagataggagagatggaagataacaatgttccagtaagacctttgtaggctctaascgctgaaaaagtttatggtgccccaggtgtggttcaaaataaaaacacaaaactataaaataaacttaagagataaaattcttatttttttcacacaatgacattgtcttttaaaaggaatatcacatatcaaagtctccccctaatatttttggtttcccttactttgctggtgccctaaacacatataccctgcttatagggtaacccaacagtggcttttaaggtggaggtgggctacaaaactggggaacttgaacaatggacatctacaaggagactggtgaataatgggcatttaattaattggggggagcgggagggttagatgtgaatggcagaatattaagaagggggttgtgtggaaggagatttgggagaagggagacttccgaggaagattaggcagagtgggcaggaagaccagctctcatgtgggggtgggaggctctcttccttttttgctcctgttcctccttttctctagctggcaggcctcttctcctgcacagtggtcctgtcggtgctgctgtggctggggcccttcttttactatctgcccaaggtaakgagcagaggaggcatgagcatggctgggaggggtagctgtattccaggacatcgaggtagtcagcccacctcctctgcctcaaggctgtcctggcttgcatcaacatctccagcatgcgccaggtgttctgccagatgcaggaacttccacaactatggcacatcagccgagtggactttgtgagaaatgccattacccccagattgccccctctcatcttgttagcatccccagcctctgccctgaaccaaacctaattgtcctggtcttaagttctgcaacccacccactcccccagcaaacataactcctagtatgctttactcacaggcaagggaaaggatggggtttgaacccctttggcctgaatatttgtaacttcccaactggtgcgggtcattacatttggtgtgtgtcccattgaatcaaccctgttgtttccttctgtcatgctttccacttcttcctggatcatctctccccatcacttgccttggtagtcactgccctggatctctttacccagcagtgatggcctggcttttcttttgggcaatccacccctatccctatcctgcaggctgtgtggatggtcacctgggtggcagtagtgaccctgagtgtggatttgggcctggctgtgggtgtggtcttctccatgatgactgtggtctgccgcacccggagctcctccaggtcccggggctctgcatcctgagctatccaacaccactgtactttgggacccgtgggcagtttcgctgcaacctggagtggcacctggggctcggagaaggagaaaaggagacttcaaagccagatggcccaatggttgcagttgctgagcctgtcagggtggtggtcctagacttcagtggtgtcacctttgcagatgctgctggggccagagaagtggtgcagctsgycagccgatgtcgagatgctaggatccgcctcctcctggctcagtgtaatgccttggtgcaggggacactgacccgggtaggactcctggacagggtgactccagatcagctgtttgtgagtgtgcaggatgcagctgcttatgccctggggagcctgktaaggggcagtagcaccaggagygggagccaggaggcactgggctgcggcaagtgaggcaggggagctcactgacccaaagatttgcaccgtgtgggtctgacctcatcatgtggagtgcagagggccctgatgacatgtgtgtgatgaggaccatgacccttgaacccccttacctaacgtaactaataaaatgaagctgagagctttggaatmcatgaagtgagtctaggtgtttgcacagggactctggtgccccttcttttgtgcccacagcattgcagagacacaactaagaatggctttcaccaaccaccagccctcaccccagccccagagccacaagttctctctgtgggggtggggctggagcaggtacacagagtactggatctgaagatgcagatgaggggcacagtyttgggattatgtgttggggaacttccccaccccctcggtcccaagatgagaggacagtgtttccaccttaggttcttagagtccctctgggctctttggcacttggaaagtgatccccccatttcctgccccatgagaatgggcagggggaggacttggcactggctgtgggagaggttatggctccaccaggcctctgggcactggaaaaaggaggggtgtcrccaggacaacccctactgggcatcaggttctgaaaaggaagagtgaggaactagaggctcagggacagccagtagagtgctcacagggtggtggggtttgttggaaattcctggcagggacaaggaggcag

SEQ ID NO: 3436 - DNA, 3585 bp, Homo sapiens
cgggttggggtagccgcggccgtggccttcgggagcggggcgttgaygctggggatgttcgtgctgcagctcggcgtcttgtccacctttttgtccgagcctgtggtcaaggcgctgaccagcggggccgcgctgcacgtgctcttgtcccagctgccgagcctcttggggttgtccctcccgcgccagatcggctgcttctctctcttcaagacgctggcctccttgctgactrcgctgcctcggagcagtccggccgaactgaccatctccgcgctcagcctggcgctgctcgtgccggtcaaggaattgaacgtgagattccgagaccggctacccacgccgatcccgggggaagtcgtcttggtgcttctggcctccgtgctctgcttcacctcttctgtggacacaagataccaagtccagatagtggggctgttgcctggagggtaagagaatgaaaagatgccagctttctcttctcccacctctcccacccaacactccctcttatctccaccccccattttctctgccttccttatctcactgaagcacctaacccctcctcaccatggatccctccctctccagatttccccaacccctcctccccaacctggctgagctgcccaggattctggctgactcgctgcccattgcactggttagttttgcggtgtctgcctccctggcctccatccatgcagacaagtatagctacactattgactccaaccaggtgggactctgactgtggaccccaaccctctcatttgacttcccaccatgcctttgtctctcccacttcatctcactgtatccctccaggagttcctggcacatggtgcctccaacctcatctcctccctcttctcttgctttcccaactcggctacgctggccaccaccaatctactggtggatgctggtgggaaaacacaggtaagagggcatccttggatgaggagaaaggatgggccatccaggcaaggtggcggtggtggagaaacaggtggaagatggctagaatcccaggtggcacctatatagagaagactggggatctgtgagaaagggtgactgaggggatggaattatagataggagagatggaagataacaatgttccagtaagacctttgtaggctctaascgctgaaaaagtttatggtgccccaggtgtggttcaaaataaaaacacaaaactataaaataaacttaagagataaaattcttatttttttcacacaatgacattgtcttttaaaaggaatatcacatatcaaagtctccccctaatatttttggtttcccttactttgctggtgccctaaacacatataccctgcttatagggtaacccaacagtggcttttaaggtggaggtgggctacaaaactggggaacttgaacaatggacatctacaaggagactggtgaataatgggcatttaattaattggggggagcgggagggttagatgtgaatggcagaatattaagaagggggttgtgtggaaggagatttgggagaagggagacttccgaggaagattaggcagagtgggcaggaagaccagctctcatgtgggggtgggaggctctcttccttttttgctcctgttcctccttttctctagctggcaggcctcttctcctgcacagtggtcctgtcggtgctgctgtggctggggcccttcttttactatctgcccaaggtaakgagcagaggaggcatgagcatggctgggaggggtagctgtattccaggacatcgaggtagtcagcccacctcctctgcctcaaggctgtcctggcttgcatcaacatctccagcatgcgccaggtgttctgccagatgcaggaacttccacaactatggcacatcagccgagtggactttgtgagaaatgccattacccccagattgccccctctcatcttgttagcatccccagcctctgccctgaaccaaacctaattgtcctggtcttaagttctgcaacccacccactcccccagcaaacataactcctagtatgctttactcacaggcaagggaaaggatggggtttgaacccctttggcctgaatatttgtaacttcccaactggtgcgggtcattacatttggtgtgtgtcccattgaatcaaccctgttgtttccttctgtcatgctttccacttcttcctggatcatctctccccatcacttgccttggtagtcactgccctggatctctttacccagcagtgatggcctggcttttcttttgggcaatccacccctatccctatcctgcaggctgtgtggatggtcacctgggtggcagtagtgaccctgagtgtggatttgggcctggctgtgggtgtggtcttctccatgatgactgtggtctgccgcacccggagctcctccaggtcccggggctctgcatcctgagctatccaacaccactgtactttgggacccgtgggcagtttcgctgcaacctggagtggcacctggggctcggagaaggagaaaaggagacttcaaagccagatggcccaatggttgcagttgctgagcctgtcagggtggtggtcctagacttcagtggtgtcacctttgcagatgctgctggggccagagaagtggtgcagctsgycagccgatgtcgagatgctaggatccgcctcctcctggctcagtgtaatgccttggtgcaggggacactgacccgggtaggactcctggacagggtgactccagatcagctgtttgtgagtgtgcaggatgcagctgcttatgccctggggagcctgktaaggggcagtagcaccaggagygggagccaggaggcactgggctgcggcaagtgaggcaggggagctcactgacccaaagatttgcaccgtgtgggtctgacctcatcatgtggagtgcagagggccctgatgacatgtgtgtgatgaggaccatgacccttgaacccccttacctaacgtaactaataaaatgaagctgagagctttggaatmcatgaagtgagtctaggtgtttgcacagggactctggtgccccttcttttgtgcccacagcattgcagagacacaactaagaatggctttcaccaaccaccagccctcaccccagccccagagccacaagttctctctgtgggggtggggctggagcaggtacacagagtactggatctgaagatgcagatgaggggcacagtyttgggattatgtgttggggaacttccccaccccctcggtcccaagatgagaggacagtgtttccaccttaggttcttagagtccctctgggctctttggcacttggaaagtgatccccccatttcctgccccatgagaatgggcagggggaggacttggcactggctgtgggagaggttatggctccaccaggcctctgggcactggaaaaaggaggggtgtcrccaggacaacccctactgggcatcaggttctgaaaaggaagagtgaggaactagaggctcagggacagccagtagagtgctcacagggtggtggggtttgttggaaattcctggcagggacaaggaggcag

SEQ ID NO: 3437 - DNA, 1964 bp, Homo sapiens
gcgggcagcctgaggccgcggggccggcggggcgggggtcggatcctccccccgggctgggggcgggctcctagacggccgcgcgcccgggaacccggcgcccacagagccgcggcaccatggcacctgctggacgcccgggggccaagaaggggattttggagcgcctggagagtggggaggttgtgattggagatggcagctttctcattactctggagaagagaggctatgtgaaggctgggctctggactccagaggcagtgatagaacacccagaygcagttcgtcaacttcacatggaattcttgagagcaggatcaaatgtcatgcagacttttaccttttctgccagtgaggacaatatggaaagcaagtgggaagatgtaaatgctgctgcctgtgacctcgccagggaagtggctggcaaaggtgatgctttggtagcaggggggatctgccagacatcaatatacaaataccagaaggatgaagctagaattaaaaaactttttcgacaacagctagaagtttttgcctggaaaaatgtggacttcttgattgcagagtattttgagcacgttgaagaagctgtgtgggctgtggaagtcttaaaagaatcagatagacccgtggcagttaccatgtgcataggcccagagggagacatgcatgatataacccccggagaatgtgctgtgaggctggtgaaggcaggggcttccatcgttggcgtgaactgccgctttgggcccgacaccagcttgaagacgatggagctcatgaaggagggtcttgagtgggcagggctgaaagcgcacctcatggtgcagcctctggggttccacgcgcctgactgtggcaaagaggggtttgtggatctcccagaatatccctttggactggagtccagagttgccaccagatgggatattcaaaaatacgccagagaggcctacaacctgggggtcaggtacattggcgggtgctgtggatttgagccctaccacatcagggcaattgcagaggagctggccccagaaaggggctttttgccaccagcttcagaaaaacacggcagctggggaagtggtttggacatgcacaccaaaccctggattagagcaagggctcgaagggagtattgggagaatctgctgccagcttcaggcagacctttctgtccttcgctgtcaaagccagacttctaaggagtagtgaaagaaaaccctgaaataatcgaacaggaaaaagttgccctcaagcctgacctggaaccgttcctcaccttcatcctcaccatgccctgctatctccagctgctgagcagctgaggtgctgcagccccttcccttccagcccacaagtgtgtgcatattgagctcctgctgtggttaagcactgcaacagactctaccagagatgcaaagagaagcgagagaggcaccttgttctccaagaacttactgtccaatcatgctgtggtgcattcctttgaagatcatgaagaatagccaaacttgtctttgagggtgaatttgacactttaaaataatcagaagtcactgagacccaaagctagtgaataattcaagtgactaagctagatacttgaggatgatagagcaacactaaactaaagcaatgagtctgctttttttaatgatttatacaatgactccaaaggcaatcccaaagaaaagatgtaaagaatgttttgagcaatggtagcattattgaaataaatgtttaactatccaaagtgattactttcaaagatgatttttacttaaagatattaggtctggccaggcgaagtgactcacacctgcaatcccacctgggagacataattcaaatctattttggtcttatatcttcttatgtttgtgttatttcatgtgtgccagtttctctttttktcacaacaatttatcaatttgtggcaataaaaatgatttacc

SEQ ID NO: 3438 - DNA, 729 bp, Homo sapiens
cgggcagcctgaggccgcggggccggcggggcgggggtcggatcctccccccgggctgggggcgggctcctagacggccgcgcgcccgggaacccggcgcccacagagccgcggcaccatggcacctgctggacgcccgggggccaagaaggggattttggagcgcctggagagtggggaggttgtgattggagatggcagctttctcattactctggagaagagaggctatgtgaaggctgggctctggactccagaggcagtgatagaacacccagaygcagttcgtcaacttcacatggaattcttgagagcaggatcaaatgtcatgcagacttttaccttttctgccagtgaggacaatatggaaagcaagtgggaagatgtaaatgctgctgcctgtgacctcgccagggaagtggctggcaaaggtgatgctttggtagcaggggggatctgccagacatcaatatacaaataccagaaggatgaagcctgacctggaaccgttcctcaccttcatcctcaccatgccctgctatctccagctgctgagcagctgaggtgctgcagccccttcccttccagcccacaagtgtgtgcatattgagctcctgctgtggttaagcactgcaacagactctaccagagatgcaaagagaagcgagagaggcaccttgttctccaagaacttactgtccaatcatgctgtggtgcattcctttgaag

SEQ ID NO: 3439 - DNA, 2444 bp, Homo sapiens
gcgggcagcctgaggccgcggggccggcggggcgggggtcggatcctccccccgggctgggggcgggctcctagacggccgcgcgcccgggaacccggcgcccacagagccgcggcaccatggcacctgctggacgcccgggggccaagaaggggattttggagcgcctggagagtggggaggttgtgattggagatggcagctttctcattactctggagaagagaggctatgtgaaggctgggctctggactccagaggcagtgatagaacacccagaygcagttcgtcaacttcacatggaattcttgagagcaggatcaaatgtcatgcagacttttaccttttctgccagtgaggacaatatggaaagcaagtgggaagatgtaaatgctgctgcctgtgacctcgccagggaagtggctggcaaaggtgatgctttggtagcaggggggatctgccagacatcaatatacaaataccagaaggatgaagctagaattaaaaaactttttcgacaacagctagaagtttttgcctggaaaaatgtggacttcttgattgcagagtattttgagcacgttgaagaagctgtgtgggctgtggaagtcttaaaagaatcagatagacccgtggcagttaccatgtgcataggcccagagggagacatgcatgatataacccccggagaatgtgctgtgaggctggtgaaggcaggggcttccatcgttggcgtgaactgccgctttgggcccgacaccagcttgaagacgatggagctcatgaaggagggtcttgagtgggcagggctgaaagcgcacctcatggtgcagcctctggggttccacgcgcctgactgtggcaaagaggggtttgtggatctcccagaatatccctttggactggagtccagagttgccaccagatgggatattcaaaaatacgccagagaggcctacaacctgggggtcaggtacattggcgggtgctgtggatttgagccctaccacatcagggcaattgcagaggagctggccccagaaaggggctttttgccaccagcttcagaaaaacacggcagctggggaagtggtttggacatgcacaccaaaccctggattagagcaagggctcgaagggagtattgggagaatctgctgccagcttcaggcagacctttctgtccttcgctgtcaaagccagacttctaaggagtagtgaaagaaaaccctgaaataatcgaacaggaaaaagttgccctcaagcctgacctggaaccgttcctcaccttcatcctcaccatgccctgctatctccagctgctgagcagctgaggtgctgcagccccttcccttccagcccacaagtgtgtgcatattgagctcctgctgtggttaagcactgcaacagactctaccagagatgcaaagagaagcgagagaggcaccttgttctccaagaacttactgtccaatcatgctgtggtgcattcctttgaagatcatgaagaatagccaaacttgtctttgagggtgaatttgacactttaaaataatcagaagtcactgagacccaaagctagtgaataattcaagtgactaagctagatacttgaggatgatagagcaacactaaactaaagcaatgagtctgctttttttaatgatttatacaatgactccaaaggcaatcccaaagaaaagatgtaaagaatgttttgagcaatggtagcattattgaaataaatgtttaactatccaaagtgattactttcaaagatgatttttacttaaagatattaggtctggccaggcgaagtgactcacacctgcaatcccagcactttgggaggccgaggcgggcggatcacctgaggtcagcagttcaagaccagcctgaccaacatggtgaaaccctgtctctaccaaaatacaaaaattagccgggcatgatggcgggtgcctgtaatcccagctactcgggaggctgaggcaggagaatcgcttgaacccaggaggcggagcttgcagtgagccgagatcaggccattgcacttcagcctgggtgacagagtgagactccatctcaaaaaaaaaaaaaaaagatattaggtcctagaatttttaaaatgtgtcttcataatcataggtagctaggttataaactatttaaagacaagatcacgtgataagcttataatcttctcataattccccttacttagcattgtgttagacatactaataggtgcacagtgaaatacttattgttgattgtttaaaaataaagttttagaaaaccttttcaaaagtcagagtttaggccaggggcacaggctgacacctataatcccagcactttgggaggccagggcgggcagatcacttgggtcaagagttcaaggccagcctggccaacatggcaaaaccccatctctactaaat

SEQ ID NO: 3440 - DNA, 2296 bp, Homo sapiens
gcgggcagcctgaggccgcggggccggcggggcgggggtcggatcctccccccgggctgggggcgggctcctagacggccgcgcgcccgggaacccggcgcccacagagccgcggcaccatggcacctgctggacgcccgggggccaagaaggggattttggagcgcctggagagtggggaggttgtgattggagatggcagctttctcattactctggagaagagaggctatgtgaaggctgggctctggactccagaggcagtgatagaacacccagaygcagttcgtcaacttcacatggaattcttgagagcaggatcaaatgtcatgcagacttttaccttttctgccagtgaggacaatatggaaagcaagtgggaagatgtaaatgctgctgcctgtgacctcgccagggaagtggctggcaaaggtgatgctttggtagcaggggggatctgccagacatcaatatacaaataccagaaggatgaagctagaattaaaaaactttttcgacaacagctagaagtttttgcctggaaaaatgtggacttcttgattgcagaggggcttccatcgttggcgtgaactgccgctttgggcccgacaccagcttgaagacgatggagctcatgaaggagggtcttgagtgggcagggctgaaagcgcacctcatggtgcagcctctggggttccacgcgcctgactgtggcaaagaggggtttgtggatctcccagaatatccctttggactggagtccagagttgccaccagatgggatattcaaaaatacgccagagaggcctacaacctgggggtcaggtacattggcgggtgctgtggatttgagccctaccacatcagggcaattgcagaggagctggccccagaaaggggctttttgccaccagcttcagaaaaacacggcagctggggaagtggtttggacatgcacaccaaaccctggattagagcaagggctcgaagggagtattgggagaatctgctgccagcttcaggcagacctttctgtccttcgctgtcaaagccagacttctaaggagtagtgaaagaaaaccctgaaataatcgaacaggaaaaagttgccctcaagcctgacctggaaccgttcctcaccttcatcctcaccatgccctgctatctccagctgctgagcagctgaggtgctgcagccccttcccttccagcccacaagtgtgtgcatattgagctcctgctgtggttaagcactgcaacagactctaccagagatgcaaagagaagcgagagaggcaccttgttctccaagaacttactgtccaatcatgctgtggtgcattcctttgaagatcatgaagaatagccaaacttgtctttgagggtgaatttgacactttaaaataatcagaagtcactgagacccaaagctagtgaataattcaagtgactaagctagatacttgaggatgatagagcaacactaaactaaagcaatgagtctgctttttttaatgatttatacaatgactccaaaggcaatcccaaagaaaagatgtaaagaatgttttgagcaatggtagcattattgaaataaatgtttaactatccaaagtgattactttcaaagatgatttttacttaaagatattaggtctggccaggcgaagtgactcacacctgcaatcccagcactttgggaggccgaggcgggcggatcacctgaggtcagcagttcaagaccagcctgaccaacatggtgaaaccctgtctctaccaaaatacaaaaattagccgggcatgatggcgggtgcctgtaatcccagctactcgggaggctgaggcaggagaatcgcttgaacccaggaggcggagcttgcagtgagccgagatcaggccattgcacttcagcctgggtgacagagtgagactccatctcaaaaaaaaaaaaaaaagatattaggtcctagaatttttaaaatgtgtcttcataatcataggtagctaggttataaactatttaaagacaagatcacgtgataagcttataatcttctcataattccccttacttagcattgtgttagacatactaataggtgcacagtgaaatacttattgttgattgtttaaaaataaagttttagaaaaccttttcaaaagtcagagtttaggccaggggcacaggctgacacctataatcccagcactttgggaggccagggcgggcagatcacttgggtcaagagttcaaggccagcctggccaacatggcaaaaccccatctctactaaat

SEQ ID NO: 3441 - DNA, 2805 bp, Homo sapiens
atcccggagatcgcccgccatggctttacttactgcggccgcccggctcttgggaaccaagaatgcatcttgtcttgttcttgcagcccggcatgccagtgcttcctccacgaatttgaaagacatattggctgacctgatacytaaggagcaggccagaattaagacyttcaggcagsaacatggcaagacggtggtgggccaaatcactgtggacatgatgtatggtggcatgagaggcatgaagggattggtctatgaaacatcagttcttgatcctgatgagggcatccgtttccgaggctttagtatccctgaatgccagaaactgctacccaaggctaagggtggggaagaacccctgcctgagggcttattttggctgctggtaactggacatatcccaacagaggaacaggtatcttggctctcaaaagagtgggcaaagagggcagctctgccttcccatgtggtcaccatgctggacaactttcccaccaatctacaccccatgtctcagctcagtgcagctgttacagccctcaacagtgaaagtaactttgcccgagcatatgcacagggtatcagccgaaccaagtactgggagttgatttatgaagactctatggatctaatcgcaaagctaccttgtgttgcagcaaagatctaccgaaatctctacagagaaggcagcggtattggggccattgactctaacctggactggtctcacaatttcaccaacatgttaggctatactgatcatcagttcactgagctcacgcgcytgtacctcaccatccacagtgaccatgagggtggcaatgtaagtgcccataccagccatttggtgggcagtgccctttccgacccttacctgtcctttgcagcagccatgaacgggctggcagggcctctccatggactggcaaatcaggaagtgcttgtctggctaacacagctgcagaaggaagttggcaaagatgtgtcagatgagaagttacgagactacatctggaacacactcaactcaggacgggttgttccaggctatggccatgcagtactaaggaagactgatccgcgatatacctgtcagcgagagtttgctctgaaacacctgcctaatgaccccatgtttaagttggttgctcagctgtacaagattgtgcccaatgtcctcttagagcagggtaaagccaagaatccttggcccaatgtagatgctcacagkggggtgctgctccagtattatggcatgacggagatgaattactacacggtcctgtttggggtgtcacgagcattgggtgtactggcacagctcatctggagccgagccttaggcttccctctagaaaggcccaagtccatgagcacagagggtctgatgaagtttgtggactctaagtcagggtaaaactggagactgggtgaaagtgactaccagaaagtgaggaagcctaaataaaaagtatacttttgtttcagggggcctttaaagacttaagattaaattatatctgaggcactgataatatgtttgaggttaaaatataaattaagactttaaaagatgaaaaatggtcccttcttccctaatcagctcccttcccctgcctggtatgagttgcccatcatasgcatggtcctggaggatgaccaggactaatgcatgtggtatgagtaggtttggccccctcactatctctagagtgagaatctggctcctgtttccatgggtcaaagccggttgcagagaatctgtagtcactttggagctttagcttctctgccaagccctcaataagccagcaaaccaggactctgccccttctgtttccataggaatcatgttggatagtcagctgtaccaagccccttggccctctcccatgcacacaaacacctcctagcaagacctgttggttagctggacatgctttggcaatttttttatactaccaagtgaccataaaggcatggcatttgttgtgactggcacccaatgtttgattttttttttaaaactatccaattaaaattaaggtctgggagtgttctgtttcccattactttaatactcacctcctcccagactttctacacctgttgcacctcaggcagaggatgttctggacctccccctcttggtccctactagagacctctcaacagatctgtgggcccagtcattgggttttatcagtgcttaatgtgaactaagttttttacttccacagaatacaagccactaccttctgacctccccaccccccaccaacccccatcttttaatatgctgtggggcatagaactccggaatgaccagcatgatattttcagagtcttgtccccggggtattagcacctctttttgaacagggaattgattcaagattggacatggtctcctctgattatcaggtactggggctgagggcattaaaaatagtaagcctccctcctcgtcccctgcctcaagaaattgcctccttatttatcaacatctttttcctccctttccctgagagctcacagtacaatgtttcagaagccccatttgcacaggttttcagcaactcagaatgctctacttctttttctttgagaaaggattaagatacactcctgctgtgcccccatctttcctccaaactcctgcctgtgtttgtgtggatacccagtcccagaaccacactgttgagttggacacactgtaaacccctgggtaactgtcaagtcatgatggagacttcaggttgttctgtataaaatgcaaaataaatgtttttattaacaatg

SEQ ID NO: 3442 - DNA, 2482 bp, Homo sapiens
gaggaccccgggctgggcgccgccgccgatcccggagatcgcccgccatggctttacttactgcggccgcccggctcttgggaaccaagaatgcatcttgtcttgttcttgcagcccggcatgccagtgcttcctccacgaatttgaaagacatattggctgacctgatacytaaggagcaggccagaattaagacyttcaggcagsaacatggcaagacggtggtgggccaaatcactgtggacatgatgtatggtggcatgagaggcatgaagggattggtctatgaaacatcagttcttgatcctgatgagggcatccgtttccgaggctttagtatccctgaatgccagaaactgctacccaaggctaagggtggggaagaacccctgcctgagggcttattttggctgctggtaactggacatatcccaacagaggaacaggtatcttggctctcaaaagagtgggcaaagagggcagctctgccttcccatgtggtcaccatgctggacaactttcccaccaatctacaccccatgtctcagctcagtgcagctgttacagccctcaacagtgaaagtaactttgcccgagcatatgcacagggtatcagccgaaccaagtactgggagttgatttatgaagactctatggatctaatcgcaaagctaccttgtgttgcagcaaagatctaccgaaatctctacagagaaggcagcggtattggggccattgactctaacctggactggtctcacaatttcaccaacatgttaggctatactgatcatcagttcactgagctcacgcgcytgtacctcaccatccacagtgaccatgagggtggcaatgtaagtgcccataccagccatttggtgggcagtgccctttccgacccttacctgtcctttgcagcagccatgaacgggctggcagggcctctccatggactggcaaatcaggaagtgcttgtctggctaacacagctgcagaaggaagttggcaaagatgtgtcagatgagaagttacgagactacatctggaacacactcaactcaggacgggttgttccaggctatggccatgcagtactaaggaagactgatccgcgatatacctgtcagcgagagtttgctctgaaacacctgcctaatgaccccatgtttaagttggttgctcagctgtacaagattgtgcccaatgtcctcttagagcagggtaaagccaagaatccttggcccaatgtagatgctcacagkggggtgctgctccagtattatggcatgacggagatgaattactacacggtcctgtttggggtgtcacgagcattgggtgtactggcacagctcatctggagccgagccttaggcttccctctagaaaggcccaagtccatgagcacagagggtctgatgaagtttgtggactctaagtcagggtaaaactggagactgggtgaaagtgactaccagaaagtgaggaagcctaaataaaaagtatacttttgtttcagggggcctttaaagacttaagattaaattatatctgaggcactgataatatgtttgaggttaaaatataaattaagactttaaaagatttgcccatcatasgcatggtcctggaggatgaccaggactaatgcatgtggtatgagtaggtttggccccctcactatctctagagtgagaatctggctcctgtttccatgggtcaaagccggttgcagagaatctgtagtcactttggagctttagcttctctgccaagccctcaataagccagcaaaccaggactctgccccttctgtttccataggaatcatgttggatagtcagctgtaccaagccccttggccctctcccatgcacacaaacacctcctagcaagacctgttggttagctggacatgctttggcaatttttttatactaccaagtgaccataaaggcatggcatttgttgtgactggcacccaatgtttgattttttttttaaaactatccaattaaaattaaggtctgggagtgttctgtttcccattactttaatactcacctcctcccagactttctacacctgttgcacctcaggcagaggatgttctggacctccccctcttggtccctactagagacctctcaacagatctgtgggcccagtcattgggttttatcagtgcttaatgtgaactaagttttttacttccacagaatacaagccactaccttctgacctccccaccccccaccaacccccatcttttaatatgctgtggggcatagaactccggaatgaccagcatgatattttcagagtcttgtccccggggtattagcacctctttttgaacagggaattgattcaagattggacatggtctcctctgattatcaggtactggggctgagggcattaaaaatacaacatctttttcctccctttccctgagagctcacagtacaatgtttcagaa

SEQ ID NO: 3443 - DNA, 2980 bp, Homo sapiens
ggccagtgggcggggcctccttgaggaccccgggctgggcgccgccgccggttcgtctactctttccttcagccgcctcctttcaaccttgtcaacccgtcggcgcggcctctggtgcagcggcggcggctcctgttcctgccgcagctctctccctttcttacctccccaccagatcccggagatcgcccgccatggctttacttactgcggccgcccggctcttgggaaccaagaatgcatcttgtcttgttcttgcagcccggcatgccagtgcttcctccacgaatttgaaagacatattggctgacctgatacytaaggagcaggccagaattaagacyttcaggcagsaacatggcaagacggtggtgggccaaatcactgtggacatgatgtatggtggcatgagaggcatgaagggattggtctatgaaacatcagttcttgatcctgatgagggcatccgtttccgaggctttagtatccctgaatgccagaaactgctacccaaggctaagggtggggaagaacccctgcctgagggcttattttggctgctggtaactggacatatcccaacagaggaacaggtatcttggctctcaaaagagtgggcaaagagggcagctctgccttcccatgtggtcaccatgctggacaactttcccaccaatctacaccccatgtctcagctcagtgcagctgttacagccctcaacagtgaaagtaactttgcccgagcatatgcacagggtatcagccgaaccaagtactgggagttgatttatgaagactctatggatctaatcgcaaagctaccttgtgttgcagcaaagatctaccgaaatctctacagagaaggcagcggtattggggccattgactctaacctggactggtctcacaatttcaccaacatgttaggctatactgatcatcagttcactgagctcacgcgcytgtacctcaccatccacagtgaccatgagggtggcaatgtaagtgcccataccagccatttggtgggcagtgccctttccgacccttacctgtcctttgcagcagccatgaacgggctggcagggcctctccatggactggcaaatcaggaagtgcttgtctggctaacacagctgcagaaggaagttggcaaagatgtgtcagatgagaagttacgagactacatctggaacacactcaactcaggacgggttgttccaggctatggccatgcagtactaaggaagactgatccgcgatatacctgtcagcgagagtttgctctgaaacacctgcctaatgaccccatgtttaagttggttgctcagctgtacaagattgtgcccaatgtcctcttagagcagggtaaagccaagaatccttggcccaatgtagatgctcacagkggggtgctgctccagtattatggcatgacggagatgaattactacacggtcctgtttggggtgtcacgagcattgggtgtactggcacagctcatctggagccgagccttaggcttccctctagaaaggcccaagtccatgagcacagagggtctgatgaagtttgtggactctaagtcagggtaaaactggagactgggtgaaagtgactaccagaaagtgaggaagcctaaataaaaagtatacttttgtttcagggggcctttaaagacttaagattaaattatatctgaggcactgataatatgtttgaggttaaaatataaattaagactttaaaagatgaaaaatggtcccttcttccctaatcagctcccttcccctgcctggtatgagttgcccatcatasgcatggtcctggaggatgaccaggactaatgcatgtggtatgagtaggtttggccccctcactatctctagagtgagaatctggctcctgtttccatgggtcaaagccggttgcagagaatctgtagtcactttggagctttagcttctctgccaagccctcaataagccagcaaaccaggactctgccccttctgtttccataggaatcatgttggatagtcagctgtaccaagccccttggccctctcccatgcacacaaacacctcctagcaagacctgttggttagctggacatgctttggcaatttttttatactaccaagtgaccataaaggcatggcatttgttgtgactggcacccaatgtttgattttttttttaaaactatccaattaaaattaaggtctgggagtgttctgtttcccattactttaatactcacctcctcccagactttctacacctgttgcacctcaggcagaggatgttctggacctccccctcttggtccctactagagacctctcaacagatctgtgggcccagtcattgggttttatcagtgcttaatgtgaactaagttttttacttccacagaatacaagccactaccttctgacctccccaccccccaccaacccccatcttttaatatgctgtggggcatagaactccggaatgaccagcatgatattttcagagtcttgtccccggggtattagcacctctttttgaacagggaattgattcaagattggacatggtctcctctgattatcaggtactggggctgagggcattaaaaatagtaagcctccctcctcgtcccctgcctcaagaaattgcctccttatttatcaacatctttttcctccctttccctgagagctcacagtacaatgtttcagaagccccatttgcacaggttttcagcaactcagaatgctctacttctttttctttgagaaaggattaagatacactcctgctgtgcccccatctttcctccaaactcctgcctgtgtttgtgtggatacccagtcccagaaccacactgttgagttggacacactgtaaacccctgggtaactgtcaagtcatgatggagacttcaggttgttctgtataaaatgcaaaataaatgtttttattaacaatg

SEQ ID NO: 3444 - DNA, 2833 bp, Homo sapiens
gaggaccccgggctgggcgccgccgccgatcccggagatcgcccgccatggctttacttactgcggccgcccggctcttgggaaccaagaatgcatcttgtcttgttcttgcagcccggcatgccagtgcttcctccacgaatttgaaagacatattggctgacctgatacytaaggagcaggccagaattaagacyttcaggcagsaacatggcaagacggtggtgggccaaatcactgtggacatgatgtatggtggcatgagaggcatgaagggattggtctatgaaacatcagttcttgatcctgatgagggcatccgtttccgaggctttagtatccctgaatgccagaaactgctacccaaggctaagggtggggaagaacccctgcctgagggcttattttggctgctggtaactggacatatcccaacagaggaacaggtatcttggctctcaaaagagtgggcaaagagggcagctctgccttcccatgtggtcaccatgctggacaactttcccaccaatctacaccccatgtctcagctcagtgcagctgttacagccctcaacagtgaaagtaactttgcccgagcatatgcacagggtatcagccgaaccaagtactgggagttgatttatgaagactctatggatctaatcgcaaagctaccttgtgttgcagcaaagatctaccgaaatctctacagagaaggcagcggtattggggccattgactctaacctggactggtctcacaatttcaccaacatgttaggctatactgatcatcagttcactgagctcacgcgcytgtacctcaccatccacagtgaccatgagggtggcaatgtaagtgcccataccagccatttggtgggcagtgccctttccgacccttacctgtcctttgcagcagccatgaacgggctggcagggcctctccatggactggcaaatcaggaagtgcttgtctggctaacacagctgcagaaggaagttggcaaagatgtgtcagatgagaagttacgagactacatctggaacacactcaactcaggacgggttgttccaggctatggccatgcagtactaaggaagactgatccgcgatatacctgtcagcgagagtttgctctgaaacacctgcctaatgaccccatgtttaagttggttgctcagctgtacaagattgtgcccaatgtcctcttagagcagggtaaagccaagaatccttggcccaatgtagatgctcacagkggggtgctgctccagtattatggcatgacggagatgaattactacacggtcctgtttggggtgtcacgagcattgggtgtactggcacagctcatctggagccgagccttaggcttccctctagaaaggcccaagtccatgagcacagagggtctgatgaagtttgtggactctaagtcagggtaaaactggagactgggtgaaagtgactaccagaaagtgaggaagcctaaataaaaagtatacttttgtttcagggggcctttaaagacttaagattaaattatatctgaggcactgataatatgtttgaggttaaaatataaattaagactttaaaagatgaaaaatggtcccttcttccctaatcagctcccttcccctgcctggtatgagttgcccatcatasgcatggtcctggaggatgaccaggactaatgcatgtggtatgagtaggtttggccccctcactatctctagagtgagaatctggctcctgtttccatgggtcaaagccggttgcagagaatctgtagtcactttggagctttagcttctctgccaagccctcaataagccagcaaaccaggactctgccccttctgtttccataggaatcatgttggatagtcagctgtaccaagccccttggccctctcccatgcacacaaacacctcctagcaagacctgttggttagctggacatgctttggcaatttttttatactaccaagtgaccataaaggcatggcatttgttgtgactggcacccaatgtttgattttttttttaaaactatccaattaaaattaaggtctgggagtgttctgtttcccattactttaatactcacctcctcccagactttctacacctgttgcacctcaggcagaggatgttctggacctccccctcttggtccctactagagacctctcaacagatctgtgggcccagtcattgggttttatcagtgcttaatgtgaactaagttttttacttccacagaatacaagccactaccttctgacctccccaccccccaccaacccccatcttttaatatgctgtggggcatagaactccggaatgaccagcatgatattttcagagtcttgtccccggggtattagcacctctttttgaacagggaattgattcaagattggacatggtctcctctgattatcaggtactggggctgagggcattaaaaatagtaagcctccctcctcgtcccctgcctcaagaaattgcctccttatttatcaacatctttttcctccctttccctgagagctcacagtacaatgtttcagaagccccatttgcacaggttttcagcaactcagaatgctctacttctttttctttgagaaaggattaagatacactcctgctgtgcccccatctttcctccaaactcctgcctgtgtttgtgtggatacccagtcccagaaccacactgttgagttggacacactgtaaacccctgggtaactgtcaagtcatgatggagacttcaggttgttctgtataaaatgcaaaataaatgtttttattaacaatg

SEQ ID NO: 3445 - DNA, 525 bp, Homo sapiens
atgtctggaagtagagacgtgacttacagtgcttttgctgaaaatgtgaatgcaggaactgagaccatcattactgaaaatgtggccgtcactactgacactcagcatatctacacattctttaccttccccataccagcattacctctgttagagtctggggaatctaacataaacatcagtgcaggacttacagttaattgctttcaagaaaacaaaatacaccattgtgtcattttatgggcccagtggagagctgagcctcaacccctaccaaatatcaagaagccaaatgaagtaacaggcagcagggctaatgagcacaccactccttccccacttttccctagtatcagaagggcgaagataaagtcccccaaatatggtgaaggccaccaagcatggattattgggattgtggagaagggcaactgcacagccagaatcatagacaaacccaggatcatcgaggtcrcaccacaagtggccactcaaaatgcgaatccctcacctggggccacctct

SEQ ID NO: 3446 - DNA, 2407 bp, Homo sapiens
gggagctcaggcacccrggcacagaggggatgggagggtggggagccaagyctaaagrgcaaacagaccacgcagaatccaccctagcyggcagttttcttagtgctgtctctattcctcctgcgacttttcaggctygacaacctggtgtttcatccagaagagccagaggtgcttgctgtccttgactgggaactttctaccttgggcgacccccttgctgatgtggcctacagctgcctggctcattacctgccatccagttttcccgtgctgagaggtattaatgactgtgacttgacacagctgggaatccctgctgcagaggagtatttcaggatgtactgtctccaaatggggctccctcccactgagaactggaacttctatatggctttttcctttttccrtgtggctgsaatcctacagggagtctacaagcgatcactcacagggcaagcaagctccacatatgcggaacaaactggaaagctgaccgaatttgtgtctaacctggcgtgggatttcgcagtcaaagaagggttccgggttttcaaagagatgcccttcacaaatccgttaacaaggtcctaccacacgtgggccaggccccagtcccagtggtgccccacaggcagcaggagttatagctccgttccagaagcttccccagctcatacctcaaggggaggtctggttatctctccagagagcctcyctccacctgtcagagagctgtatcaccggctgaagcacttcatggagcaacgtgtgtaccctgcagagccagagctgcagagtcaccaggcctcagcagccaggtggagcccctccccactgatcgaagacctcaaggtatgtaactgctctgcgcctgacacgggcaacatggagctgctggtgaggtatggcaccgaagcgcagaaggctcgctggctgattcctctgctggaggggaaagcccgctcctgttttgctatgaccgagccccaggttgcctcttcagatgccaccaacattgaggcttccatcagagaggaggacagcttctatgtcataaacggtcacaaatggtggatcacaggcatcctggatcctcgttgccaactctgtgtgtttatgggaaaaacagacccacatgcaccaagacaccggcagcagtctgtgctcttggttcccatggataccccagggataaaaatcatccggcctctgacggtgtatggactggaagatgyaccaggtggccatggtgaagtccgatttgagcacgtgcgtgtgcccaaagagaacatggtcctgggccctggccgaggctttgagatcgcccagggcagactgggccccggcaggatccatcactgcatgaggctgatcgggttctcagagagggccctggcactcatgaaggcccgcgtgaagtcccgcttggcttttgggaagcccctggtggagcagggcacagtgctggcggacatcgcrcagtcgcgcgtggagattgagcaggcacggctgctggtgctgagagctgcccacctcatggacctggcaggaaacaaggctgcagccttggatatagccatgattaaaatggtcgccccgtccatggcctcccgagtgattgatcgtgcgattcaggcctttggagcagcaggcctgagcagcgactacccactggctcagttcttcacctgggcccgagccctgcgctttgccgacggccctgacgaggtgcaccgggccacggtggccaagctagagctgaagcaccgcatttagagccttggggctgcagtggctcaatgtcctggctggtccagctgtgcccagatctgtcactgatgtgcctcgaaagatccggtgtttgtggctcctgcaccctgctcagcagctctgtcccgggacagtcagggtggactcaakctttctggttctccacagaagacgtctctgcaagaagcctggagtctgtttcaggccaggaggaggggatttgctgagggccaagggggttctgggacagagtctggaaagctggtcttcaggctcycagtcccaggctgggcaggcacggtcacttcacttcagcctttcagtccctctctctctgcctgtgggaatctggacacattttgggaggcctcccaaggctgtgggacgtgcttgctctggcagctgcagggttcctgtctggcctccctggtgagcagaggggcggccacggcgggyggtggcctaragacccaggacctgggcgcctgggaaaatggaatgcaacccacattgtaaagccactggcatctgattatctccatttgaacacacagcacagaacaatcatttaaatgttattttggaaaggggttttggggacacagaagaataagtaaacacatctcggaggctt

SEQ ID NO: 3447 - DNA, 3493 bp, Homo sapiens
attttgaggaggtcggagcggaaggacgtcgtggagattgcttgcgctggggtgccacacttaggctgagctgcaggttttcgcacagtcgcgagttaacctctgcttgctccagaggcctcgtcctaatccacctcggctgacggcgcgggatccctggctccgcgagcctcagcctcaccatgtgtgtcaggagctgtttccagtccccccgtctccagtgggtgtggagaacagccttcctgaaacacacccagcgcaggcaccaggggtcccaccgatggacacaccttggaggcagcacctacagagcggtgattttcgacatgggcggagttctcattccttctccagggagagtcgctgcagaatgggaggtacagaatcgtatcccttctggaactatattaaaggccttgatggaaggtggtgaaaatgggccctggatgagatttatgagagcagaaataacagcagagggttttttacgagaatttgggagactttgctctgaaatgattgtggagtcctgcatggaagggatctgtaagccagaccctaggatctacaagctgtgcttggagcrgctcggcctgcagccctctgagtccatctttcttgatgaccttggamcaaatctaaaagaagctgccagacttggtattcacaccattaaggttaatgacccagagactgcagtaaaggaattagaagctctcttgggttttacattgagagtaggtgttccaaacactcggcctgtgaaaaagacgatggaaattccgaaagattccttgcagaagtacctcaaagacttactgggtatccagaccacaggcccattggaactacttcagtttgatcacgggcagtcaaatccaacttactacatcaggctggctaatcgtgatctagttctgaggaagaagcccccagggacactccttccatctgcccatgccatagagagggagttcaggattatgaaagcccttgcaaatgctggagtacctgtccctaacgttcttgatctctgtgaagattcaagtgtcattggcacccccttctatgtgatggagtactgcccaggtctcatctacaaagacccttccctgccaggcttggagcccagccacagrcgagccatatacactgccatgaacacagtcctgtgcaaaattcacagtgtggatctgcaggctgtgggacttgaagactatgggaagcaaggggactatattccacgccaggtacgaacctgggttaagcagtatcgagcttccgaaactagcaccatcccagccatggagaggctgatcgaatggctgcccctccatcttccccgtcagcagaggaccacagtggtgcacgggracttcaggctygacaacctggtgtttcatccagaagagccagaggtgcttgctgtccttgactgggaactttctaccttgggcgacccccttgctgatgtggcctacagctgcctggctcattacctgccatccagttttcccgtgctgagaggtattaatgactgtgacttgacacagctgggaatccctgctgcagaggagtatttcaggatgtactgtctccaaatggggctccctcccactgagaactggaacttctatatggctttttcctttttccrtgtggctgsaatcctacagggagtctacaagcgatcactcacagggcaagcaagctccacatatgcggaacaaactggaaagctgaccgaatttgtgtctaacctggcgtgggatttcgcagtcaaagaagggttccgggttttcaaagagatgcccttcacaaatccgttaacaaggtcctaccacacgtgggccaggccccagtcccagtggtgccccacaggcagcaggagttatagctccgttccagaagcttccccagctcatacctcaaggggaggtctggttatctctccagagagcctcyctccacctgtcagagagctgtatcaccggctgaagcacttcatggagcaacgtgtgtaccctgcagagccagagctgcagagtcaccaggcctcagcagccaggtggagcccctccccactgatcgaagacctcaaggagaaagccaaagctgaaggactttggaaccttttcctacccttagaggctgatcccgagaaaaaatacggagcaggactgaccaatgtggaatatgcacatctgtgtgagctcatgggcacgtccctgtatgcccccgaggtatgtaactgctctgcgcctgacacgggcaacatggagctgctggtgaggtatggcaccgaagcgcagaaggctcgctggctgattcctctgctggaggggaaagcccgctcctgttttgctatgaccgagccccaggttgcctcttcagatgccaccaacattgaggcttccatcagagaggaggacagcttctatgtcataaacggtcacaaatggtggatcacaggcatcctggatcctcgttgccaactctgtgtgtttatgggaaaaacagacccacatgcaccaagacaccggcagcagtctgtgctcttggttcccatggataccccagggataaaaatcatccggcctctgacggtgtatggactggaagatgyaccaggtggccatggtgaagtccgatttgagcacgtgcgtgtgcccaaagagaacatggtcctgggccctggccgaggctttgagatcgcccagggcagactgggccccggcaggatccatcactgcatgaggctgatcgggttctcagagagggccctggcactcatgaaggcccgcgtgaagtcccgcttggcttttgggaagcccctggtggagcagggcacagtgctggcggacatcgcrcagtcgcgcgtggagattgagcaggcacggctgctggtgctgagagctgcccacctcatggacctggcaggaaacaaggctgcagccttggatatagccatgattaaaatggtcgccccgtccatggcctcccgagtgattgatcgtgcgattcagaagacgtctctgcaagaagcctggagtctgtttcaggccaggaggaggggatttgctgagggccaagggggttctgggacagagtctggaaagctggtcttcaggctcycagtcccaggctgggcaggcacggtcacttcacttcagcctttcagtccctctctctctgcctgtgggaatctggacacattttgggaggcctcccaaggctgtgggacgtgcttgctctggcagctgcagggttcctgtctggcctccctggtgagcagaggggcggccacggcgggyggtggcctaragacccaggacctgggcgcctgggaaaatggaatgcaacccacattgtaaagccactggcatctgattatctccatttgaacacacagcacagaacaatcatttaaatgttattttggaaaggggttttggggacacagaagaataagtaaacacatctcggaggcttt

SEQ ID NO: 3448 - DNA, 2326 bp, Homo sapiens
atgtttttattcatggagcaggagctggcaggaaggacaaaattggacacctgcacaaactgagaaaattactgtggtataaaatgaatggcctttgacaaactgtagtggcatgtgatcctggacctgagttggcggagtgtagacctgggactcagtcactcctagtaggcagagaagaggcccattggaactacttcagtttgatcacgggcagtcaaatccaacttactacatcaggctggctaatcgtgatctagttctgaggaagaagcccccagggacactccttccatctgcccatgccatagagagggagttcaggattatgaaagcccttgcaaatgctggagtacctgtccctaacgttcttgatctctgtgaagattcaaggggactatattccacgccaggtacgaacctgggttaagcagtatcgagcttccgaaactagcaccatcccagccatggagaggctgatcgaatggctgcccctccatcttccccgtcagcagaggaccacagtggtgcacgggracttcaggctygacaacctggtgtttcatccagaagagccagaggtgcttgctgtccttgactgggaactttctaccttgggcgacccccttgctgatgtggcctacagctgcctggctcattacctgccatccagttttcccgtgctgagaggtattaatgactgtgacttgacacagctgggaatccctgctgcagaggagtatttcaggatgtactgtctccaaatggggctccctcccactgagaactggaacttctatatggctttttcctttttccrtgtggctgsaatcctacagggagtctacaagcgatcactcacagggcaagcaagctccacatatgcggaacaaactggaaagctgaccgaatttgtgtctaacctggcgtgggatttcgcagtcaaagaagggttccgggttttcaaagagatgcccttcacaaatccgttaacaaggtcctaccacacgtgggccaggccccagtcccagtggtgccccacaggcagcaggagttatagctccgttccagaagcttccccagctcatacctcaaggggaggtctggttatctctccagagagcctcyctccacctgtcagagagctgtatcaccggctgaagcacttcatggagcaacgtgtgtaccctgcagagccagagctgcagagtcaccaggcctcagcagccaggtggagcccctccccactgatcgaagacctcaaggagaaagccaaagctgaaggactttggaaccttttcctacccttagaggctgatcccgagaaaaaatacggagcaggactgaccaatgtggaatatgcacatctgtgtgagctcatgggcacgtccctgtatgcccccgaggtatgtaactgctctgcgcctgacacgggcaacatggagctgctggtgaggtatggcaccgaagcgcagaaggctcgctggctgattcctctgctggaggggaaagcccgctcctgttttgctatgaccgagccccaggttgcctcttcagatgccaccaacattgaggcttccatcagagaggaggacagcttctatgtcataaacggtcacaaatggtggatcacaggcatcctggatcctcgttgccaactctgtgtgtttatgggaaaaacagacccacatgcaccaagacaccggcagcagtctgtgctcttggttcccatggataccccagggataaaaatcatccggcctctgacggtgtatggactggaagatgyaccaggctgtttcctgccgtccttttccctttaaccatgtcccagtaagaaggctaaataaagggcagggacattgccagcagataacccagactgaggctgcagccttggatatagccatgattaaaatggtcgccccgtccatggcctcccgagtgattgatcgtgcgattcaggtgccacagggaagtccgggaagatggttgttatgggccatcaagagcaggctatcattcctggggctctcggagacaagggctgacccagggccgcctccctccactctgtgtctgccaggcctttggagcagcagggttcctgtctggcctccctggtgagcagaggggcggccacggcgggyggtggcctaragacccaggacctgggcgcctgggaaaatggaatgcaacccacattgtaaagccactggcatctgattatctccatttgaacacacagcacagaacaatcatttaaatgttattttggaaaggggttttggggacacagaagaataagtaaacacatctcggaggc

SEQ ID NO: 3449 - DNA, 2661 bp, Homo sapiens
agcggttgccgggcaacgcggcccgggccatggaggcgtcgtacgagtccgagtccgagtccgagtctgaggccgggcctgggactcagcggcccgggaccgggaccgtgagcgcggccgtgcgcgagcacttgcggaagctgtgtctgcgcgagttcccgtgcggtgccggcagctggaataagtcgcgctttcttcctcaaacttggcgaacttggagggagcttgtccccagagaggaggatgtggtgagccccggagaggagacggtggaggccctgctgggcctggtcygcagccgccactccccctgggctctgctgaacaactcgaatgcagaagacagtttcctgagagaattggccatccggaacccgctgacgatcacagacaccttcttctactcctacttccggtccctgcgggtaatagacaagaagattctctcctggcctgtggtgctacctgctgttgacagtccyctgtctgccaagaaaggaaagggggagaaagacaagaaagggaaggagaaagacaggacggggaaaggagagaaagagccggccaaggagtggaaggtgctgaagaagaagaaagagccgcccaaggagctccggcaggacccccccatcctccaggtgctgggccggggcctggtgatcctggagcccctgctcgccggggagcccctggtgtccaccgtgtgcaacttcggcgtggtccgcacattgacatctgacaggctgacgttggccagggattcaaagaagattaagaargttgccaaaaaagaaaagccgaaagccgtgattccgatctacgaaggcgattaccaccctgagcccctgaccgtagaggtgcagatccagctgaaccagtgccgctcggcggaggaggctctgcgcatgttcgccgtgtagggcgtgggcagtaaaggctgttcccagcactcccgcctccgcttctgtcccgccgcacgcgtcggggggcgggtgtggcgccggcgtcctggggaggaggagcagcctctgcccgacccggctcgtgcggaccccaggaccgggcgcgggacgcgtgcgtccagcctccggcgctgcggagacccgcggctgggtccggggaggccccaaacccgcccccgccagaaccccgccccaaattcccacctcctccagaagccccgcccactcccgagccccgagagctccgcgcacctgggcgccatccgccctggctccgctgcacgagctccacgcccgtaccccggcgtcacgctcagcccgcggtgctcgcacacctgagactcatctcgcttcgaccccgccgccgccgccgcccggcatcctgagcacggagacagtctccagctgcsgttcatgcttcctccccagscttccgcagcccaccagggaaggggcggtaggagtggccttttaccaaagggaccggcgatgctctgcaggctgtgctggctggtctcgtacagcttggctgtgctgttgctcggctgcctgctcttcctgaggaaggcggccaagcccgcaggagaccccacggcccaccagcctttctgggctcccccaacaccccgtcacagccggtgtccacccaaccacacagtgwctagcgcctctcygtccctgcctagccgtcaccgtctcttcttgacctatcgtcactgccgaaatttctctatcttgctggagccttcaggctgttccaaggataccttcttgctcctggccatcaagtcacagcctggtcacgtggagcgacgtgcggctatccgcagcacgtggggcagggtggggggatgggctaggggccggcagctgaagctggtgttcctcctaggggtggcaggatccgctcccccagcccagctgctggcctatgagagtagggagtttgatgacatcctccagtgggacttcactgaggacttcttcaacctgacgctcaaggagctgcacctgcagcgctgggtggtggctgcctgcccccaggcccatttcatgctaaagggagatgacgatgtctttgtccacgtccccaacgtgttagagttcctggatggctgggacccagcccaggacctcctggtgggagatgtcatccgccaagccctgcccaacaggaacactaaggtcaaatacttcatcccaccctcaatgtacagggccacccactacccaccctatgctggtgggggaggatatgtcatgtccagagccacagtgcggcgcctccaggctatcatggaagatgctgaactcttccccattgatgatgtctttgtgggtatgtgcctgaggmggctggggctgagccctatgcaccatgctggcttcaagacatttggaatccggcggcccctggaccccttagacccctgcctgtatagggggctcctgctggttcaccgcctcagccccctcgagatgtggaccatgtgggcactggtgacagatgaggggctcaagtgtgcagctggccccataccccagcgctgaagggtgggttgggcaacagcctgagagtggactcagtgttgattctctatcgtgatgcgaaattgatgcctgctgctctacagaaaatgccaacttggttttttaactcctctcaccctgttagctctgattaaaaacactgcaaccc

SEQ ID NO: 3450 - DNA, 3608 bp, Homo sapiens
ccaatgaggtcgccactagccactgcagctgtcgagcacgcaagataataagtcgcgctttcttcctcaaacttggcgaacttggagggagcttgtccccagagaggaggatgtggtgagccccggagaggagacggtggaggccctgctgggcctggtcygcagccgccactccccctgggctctgctgaacaactcgaatgcagaagacagtttcctgagagaattggccatccggaacccgctgacgatcacagacaccttcttctactcctacttccggtccctgcgggtaatagacaagaaggtcaccctggtggataaagacctcctgaaatttctaaagctggaggagttggtactgagcgccaatcgaatcaaggaggtggatgccaccaatctgccccccacactcaaggtgctggagctctayggcaatgagatcagcagcatggagtgtctgtgtgcccacccacccgccggcctgcagcacttggggttaggccacaacaaacttctaggccccttggaaagtctctacgtcaccgctaatcactggcccaacctcgtctccctggacctgggcttcaacgacctgacagacctgcagagcatggtcaccagcctgaggaccctccgrcacctgcgactcytggtgctgmagggaaacccactggccttggtgcccyactaccgcggcctcaccatcgacagcctggcccagctctgcgtgctggacgacatcaccgtgtctcccaatgagaagcatctcttccgggggctcagcctcaatggcgatctcttggcacaggaggcgcagtttgtggtgaccatcggaaacatcagaggagtcctggacacctctgtcttagacccggaacccaggcccgaaggccctttcatcacttacaactattacgtgacctatgattttgtgaaagatgaagaaggcgaaatgaatgagtccgcgggcgtcctggccgagatcgtcaagccctctcccagcttagaattattagttgaggaatctcctgaagaggtcgtggaagacgtcatcgaagacattgttgaagaggttactgaagaggtcgaagggtctctggagtctgaggtggaggagtcaggagagtcggagctgtctgtcatctcggggccttcgaccatcttgcagatgccgagggcctctgcagaagagctggccaagttgaggctgcgtatagatccccggctctgcccgtccccagggactgtcctcttcagcactgcccacaagccctgggctgaggtcatcccctgcagttacgagatgcagcactctctcagggacctggtcccactgaaggccttcctgctggcggggaccaccgtraccatcgtggaggagaagattctctcctggcctgtggtgctacctgctgttgacagtccyctgtctgccaagaaaggaaagggggagaaagacaagaaagggaaggagaaagacaggacggggaaaggagagaaagagccggccaaggagtggaaggtgctgaagaagaagaaagagccgcccaaggagctccggcaggacccccccatcctccaggtgctgggccggggcctggtgatcctggagcccctgctcgccggggagcccctggtgtccaccgtgtgcaacttcggcgtggtccgcacattgacatctgacaggctgacgttggccagggattcaaagaagattaagaargttgccaaaaaagaaaagccgaaagccgtgattccgatctacgaaggcgattaccaccctgagcccctgaccgtagaggtgcagatccagctgaaccagtgccgctcggcggaggaggctctgcgcatgttcgccgtgtagggcgtgggcagtaaaggctgttcccagcactcccgcctccgcttctgtcccgccgcacgcgtcggggggcgggtgtggcgccggcgtcctggggaggaggagcagcctctgcccgacccggctcgtgcggaccccaggaccgggcgcgggacgcgtgcgtccagcctccggcgctgcggagacccgcggctgggtccggggaggccccaaacccgcccccgccagaaccccgccccaaattcccacctcctccagaagccccgcccactcccgagccccgagagctccgcgcacctgggcgccatccgccctggctccgctgcacgagctccacgcccgtaccccggcgtcacgctcagcccgcggtgctcgcacacctgagactcatctcgcttcgaccccgccgccgccgccgcccggcatcctgagcacggagacagtctccagctgcsgttcatgcttcctccccagscttccgcagcccaccagggaaggggcggtaggagtggccttttaccaaagggaccggcgatgctctgcaggctgtgctggctggtctcgtacagcttggctgtgctgttgctcggctgcctgctcttcctgaggaaggcggccaagcccgcaggagaccccacggcccaccagcctttctgggctcccccaacaccccgtcacagccggtgtccacccaaccacacagtgwctagcgcctctcygtccctgcctagccgtcaccgtctcttcttgacctatcgtcactgccgaaatttctctatcttgctggagccttcaggctgttccaaggataccttcttgctcctggccatcaagtcacagcctggtcacgtggagcgacgtgcggctatccgcagcacgtggggcagggtggggggatgggctaggggccggcagctgaagctggtgttcctcctaggggtggcaggatccgctcccccagcccagctgctggcctatgagagtagggagtttgatgacatcctccagtgggacttcactgaggacttcttcaacctgacgctcaaggagctgcacctgcagcgctgggtggtggctgcctgcccccaggcccatttcatgctaaagggagatgacgatgtctttgtccacgtccccaacgtgttagagttcctggatggctgggacccagcccaggacctcctggtgggagatgtcatccgccaagccctgcccaacaggaacactaaggtcaaatacttcatcccaccctcaatgtacagggccacccactacccaccctatgctggtgggggaggatatgtcatgtccagagccacagtgcggcgcctccaggctatcatggaagatgctgaactcttccccattgatgatgtctttgtgggtatgtgcctgaggmggctggggctgagccctatgcaccatgctggcttcaagacatttggaatccggcggcccctggaccccttagacccctgcctgtatagggggctcctgctggttcaccgcctcagccccctcgagatgtggaccatgtgggcactggtgacagatgaggggctcaagtgtgcagctggccccataccccagcgctgaagggtgggttgggcaacagcctgagagtggactcagtgttgattctctatcgtgatgcgaaattgatgcctgctgctctacagaaaatgccaacttggttttttaactcctctcaccctgttagctctgattaaaaacactgcaaccc

SEQ ID NO: 3451 - DNA, 1382 bp, Homo sapiens
cccgcggtgctcgcacacctgagactcatctcgcttcgaccccgccgccgccgccgcccggcatcctgagcacggagacagtctccagctgcsgttcatgcttcctccccagscttccgcagcccaccagggaaggggcggtaggagtggccttttaccaaagggaccggcgatgctctgcaggctgtgctggctggtctcgtacagcttggctgtgctgttgctcggctgcctgctcttcctgaggaaggcggccaagcccgcaggagaccccacggcccaccagcctttctgggctcccccaacaccccgtcacagccggtgtccacccaaccacacagtgwctagcgcctctcygtccctgcctagccgtcaccgtctcttcttgacctatcgtcactgccgaaatttctctatcttgctggagccttcaggctgttccaaggataccttcttgctcctggccatcaagtcacagcctggtcacgtggagcgacgtgcggctatccgcagcacgtggggcagggtggggggatgggctaggggccggcagctgaagctggtgttcctcctaggggtggcaggatccgctcccccagcccagctgctggcctatgagagtagggagtttgatgacatcctccagtgggacttcactgaggacttcttcaacctgacgctcaaggagctgcacctgcagcgctgggtggtggctgcctgcccccaggcccatttcatgctaaagggagatgacgatgtctttgtccacgtccccaacgtgttagagttcctggatggctgggacccagcccaggacctcctggtgggagatgtcatccgccaagccctgcccaacaggaacactaaggtcaaatacttcatcccaccctcaatgtacagggccacccactacccaccctatgctggtgggggaggatatgtcatgtccagagccacagtgcggcgcctccaggctatcatggaagatgctgaactcttccccattgatgatgtctttgtgggtatgtgcctgaggmggctggggctgagccctatgcaccatgctggcttcaagacatttggaatccggcggcccctggaccccttagacccctgcctgtatagggggctcctgctggttcaccgcctcagccccctcgagatgtggaccatgtgggcactggtgacagatgaggggctcaagtgtgcagctggccccataccccagcgctgaagggtgggttgggcaacagcctgagagtggactcagtgttgattctctatcgtgatgcgaaattgatgcctgctgctctacagaaaatgccaacttggttttttaactcctctcaccctgttagctctgattaaaaacactgcaaccc

SEQ ID NO: 3452 - DNA, 1778 bp, Homo sapiens
gagacagagtcttgctgtgttgcccaggctgaagtgcagtgttgcgatctcggctcactgcaacctccgcctcctggttcaagagattctcctgccttagccaccccagtagctagaattacaggtgcccgccaccatgcccagctaatttttgtatttttagtagagacggggttttaccatattggccaggctggtctctaactcctgacatcgtgatccgtctgccttggccacccataatactgggattgcaggcatgagccaccgcacccggcctttttttttctttctttctttctttttttttttttttaagacggagttttgctatcgttgcctgggctggacgtgggcaacaagagtgaaactccgtctaaaaaaataaaaagagcacagaatctagccaggcacagtgactcccacttgtaatcccagcaattcaggaggcttggacaggaggattgcttgagcccaggatctcgaggctgcagtgagctatgaaggcaccactgcactccagcctgtttttttgagacagagcaagaccttgtcccctcaaaaaaaaagagtacagagtctggaattgcaagactggagtgagcagcagtgccacattttaaaataaaagctcttttttctttatttttttccccagtcaggatttagtttgtatcaacaggacccctttgccccctgctggtcagacttggagccccagctcctccttgtgggatggagtagggggtcctcccttgtgcctggcgctcagccctctgcagagcatcacagctgaatgcgaagcccagaaccccactgcaagctggcttcaggggcgtggcttttcttgttgccagccagcccagtgcttaacccaggtctcagaaggcaggaactgagccccctaggtcccagagccccgggggcaggccagtttctcaagaccctctgtccactgctggtcctgagaccctcactcagttgaagtcagggctgagtttgttcagaagccccagcatgtgaaggcccccagctggcctgggccagcgctcaccctgggggagccttggggacacatctcatgtccccagtgagctctgcactctgccttcctggccctgttgcccactgtggctctgaccccactccggccgcccgtcccggagtcccactcaccgtgtttcacrttgtccttccactcgcccacatagtagtcgccattcacagcrtatacctggctccgcaggccrttcctctgggccttccrgtcccaccccttccacagggactccgacttttttgggcacttagagactggcatggtggctgcttctgcaaggctggagggtgctggaaaggggttagggacatctggggctcagygcgccccgtgtaatgccgggatcctgagctcaagtggggagagtcatgtgtgttctgagtccctggggcaggtgaacagcccttagtggggatcctttagtgctggactgacckttggttggcccctcccttgcctctcctggggccccctcccagggggtctgatggcacaattacttgggaatctagggaaaccagtagagcaggagggtttgtgatggcatcagggagaagctgcccccagggagggggtggcggtcatatatacatatatatatatatatatatwtwtttttttttatgtcttctaaatatttttatttatttatgtatttatttatttatttagagatggaatcttgctttgttgcccaggctggagtgcagtggcacca

SEQ ID NO: 3453 - DNA, 2122 bp, Homo sapiens
cgcggggccgccggccgtgctgttcccgccaattcctgtggtaatccttaccgtggcgagttccgcgctcaatggagacgtttgmccccaccgagctgcccgagctgcttaaactttattaccggaggctctttccctactctcagtactatcgctggctcaactacggtggagtgataaagaattactttcaacaccgtgaattttcattcacaytgaaagatgatatttacattcgctaccaatccttcaacaaccagagtgatctggaaaaggagatgcagaaaatgaatccatacaagattgatataggcgcagtatattctcacagacccaatcaacacaatacagtgaagctgggagctttccaggctcaggaaaaagaactggtatttgacattgacatgacagactatgacgatgtgaggagatgttgtagttctgcagacatatgtcctaagtgctggaccctcatgacaatggccatacgcatcattgacagagcattgaagggcaagtatcagcagtttctgaatggggactttggatttaagcatcgtctctgggtatattctggaaggagaggtgttcattgttgggtctgtgatgaatcagttagaaaactgtcttctgcagtacgttctgggatagttgagtatttgagccttgtaaagggtggtcaagacgttaaaaagaaagttcacctaagtgaaaaaattcacccttttatcagaaaatctataaacataataaaaaaatactttgaagaatatgccttggttaatcaagatattctcgaaaataaagaaagctgggataagattttagcccttgttcctgaaacaattcatgatgaacttcaacaaagcttccaaaagtctcacaattcacttcagcgttgggagcacttgaagaaagtagccagcagatatcagaataacatcaaaaatgacaaatatggaccctggctggagtgggagattatgctccagtactgttttccacggctggatatcaatgtcagcaaaggaatcaatcatctactgaagagcccttttagtgttcatcctaaaacaggtcgcatmtctgtgcctattgatttgcagaaagtggaccagtttgatccatttactgttccgaccataagcttcatctgccgtgaattggatgccatttccactaatgaagaggaaaaagaggagaatgaagctgaatctgatgtcaaacatagaaccagagattataagaagaccagtctagcaccttatgtgaaagtttttgaacattttcttgaaaatctggataaatcccgaaaaggagaacttcttaagaagagtgatttacaaaaagatttctgaagacagagctcctcaaaccattgtggatatcttctgccttcaaccacagatcaaatacttcaagagccatttaataaatatggcagaactatatatgtgtcttaaacctcaaagtaaattttccttgagaaataatttatgttgaaaagatttcctggccaagtgcagtggctcacacccgtaatcccagcactttgggaggccgaggcaggcggatcacctgaggtcagtagttcgagactagcctggccaacatggtgaaacccccgtctctactaaaactacaaaaatcagtcgggtgtggtggtgcatacagtaatcctagctacttgggaggctgaggcaggagaattgcttgaacccaggaggcagaggttgcagtgagctgagatcacagccactgggcgacagagcgagactccatctcaaaaaagaaacaaaacaaaaaaaaaagtaagatttcctgagacgaccaaggagagtgtcaaggttcctggaaggagaaataaaaggaggcataagtggattgcagataattttgtaaaattcaatattctacaaggataattctaaggcttctgatataaatacccagttctactagttgccatatatagaggtaagtgagcagtaataggactgtcatctcagctcacttgatacgtcatatgtttgggtgaatgatggttttgtccttaagttttagacatttaattatatctagagggccaggcacagtggctcatacctgtaatcccaacact

SEQ ID NO: 3454 - DNA, 1145 bp, Homo sapiens
ggcttccttctgcaacaggcgtgggtcacgctctcgctcggtctttctgccgccatcttggttccgcgttccctgcacagtaagtactttctgtgccgctactgtctatccgcagccatccgcctttctttcgggctaagccgcccsggggactgagagttaaggagagttggaggctttactgggccacagggttcctactcgcccctgggcctccggacaaaatggggtctgcggttggtgtcctggcaaaagcagggtagaagggctgcggggcgggcccagaatccgagcctgcagagatgggagcagttgcagtgttgagggcggaagaggagtgcgtcttgttttgggaactgcttcacaggatccagaaaaggaaatgcccggcgaagccacagaaaccgtccctgctacagagcaggagttgccgcagccccaggctgagacagggtctggaacagaatctgacagtgatgaatcagtaccagagcttgaagaacaggattccacccaggcaaccacacaacaagcccagctggcggcagcagctgaaatygatgaagaaccagtcagtaaagcaaaacagagtcggagtgaaaagaaggcacggaaggctatgtccaaactgggtcttcggcaggttacaggagttactagagtcactatccggaaatctaagaatatmctctttgtcatcacaaaaccagatgtctacaagagccctgcttcagatacttacatagtttttggggaagccaagatcgaagatttatcccagcaagcacaactagcagctgctgagaaattcaaagttcaaggtgaagctgtytcaaacattcaagaaaacacacagactccaactgtacaagaggagagtgaagaggaagaggtcgatgaaacaggtgtagaagttaaggacatwgaattggtcatgtcacaagcaaatgtgtcgagagcaaaggcagtccgagccctgaagaacaacagtaatgatattgtaaatgcgattatggaattaacaatgtaaccatatggaagcaactttttytggtgtctcaaaggagtaactgcagcttggtttgaaatttgtactgtttctatcataaataaagttatggcttcttgttggatgaattcagtcg

SEQ ID NO: 3455 - DNA, 2100 bp, Homo sapiens
cgcggggccgccggccgtgctgttcccgccaattcctgtggtaatccttaccgtggcgagttccgcgctcaatggagacgtttgmccccaccgagctgcccgagctgcttaaactttattaccggaggctctttccctactctcagtactatcgctggctcaactacggtggagtgataaagaattactttcaacaccgtgaattttcattcacaytgaaagatgatatttacattcgctaccaatccttcaacaaccagagtgatctggaaaaggagatgcagaaaatgaatccatacaagattgatataggcgcagtatattctcacagacccaatcaacacaatacagtgaagctgggagctttccaggctcaggaaaaagaactggtatttgacattgacatgacagactatgacgatgtgaggagatgttgtagttctgcagacatatgtcctaagtgctggaccctcatgacaatggccatacgcatcattgacagagcattgaagggcaagactttggatttaagcatcgtctctgggtatattctggaaggagaggtgttcattgttgggtctgtgatgaatcagttagaaaactgtcttctgcagtacgttctgggatagttgagtatttgagccttgtaaagggtggtcaagacgttaaaaagaaagttcacctaagtgaaaaaattcacccttttatcagaaaatctataaacataataaaaaaatactttgaagaatatgccttggttaatcaagatattctcgaaaataaagaaagctgggataagattttagcccttgttcctgaaacaattcatgatgaacttcaacaaagcttccaaaagtctcacaattcacttcagcgttgggagcacttgaagaaagtagccagcagatatcagaataacatcaaaaatgacaaatatggaccctggctggagtgggagattatgctccagtactgttttccacggctggatatcaatgtcagcaaaggaatcaatcatctactgaagagcccttttagtgttcatcctaaaacaggtcgcatmtctgtgcctattgatttgcagaaagtggaccagtttgatccatttactgttccgaccataagcttcatctgccgtgaattggatgccatttccactaatgaagaggaaaaagaggagaatgaagctgaatctgatgtcaaacatagaaccagagattataagaagaccagtctagcaccttatgtgaaagtttttgaacattttcttgaaaatctggataaatcccgaaaaggagaacttcttaagaagagtgatttacaaaaagatttctgaagacagagctcctcaaaccattgtggatatcttctgccttcaaccacagatcaaatacttcaagagccatttaataaatatggcagaactatatatgtgtcttaaacctcaaagtaaattttccttgagaaataatttatgttgaaaagatttcctggccaagtgcagtggctcacacccgtaatcccagcactttgggaggccgaggcaggcggatcacctgaggtcagtagttcgagactagcctggccaacatggtgaaacccccgtctctactaaaactacaaaaatcagtcgggtgtggtggtgcatacagtaatcctagctacttgggaggctgaggcaggagaattgcttgaacccaggaggcagaggttgcagtgagctgagatcacagccactgggcgacagagcgagactccatctcaaaaaagaaacaaaacaaaaaaaaaagtaagatttcctgagacgaccaaggagagtgtcaaggttcctggaaggagaaataaaaggaggcataagtggattgcagataattttgtaaaattcaatattctacaaggataattctaaggcttctgatataaatacccagttctactagttgccatatatagaggtaagtgagcagtaataggactgtcatctcagctcacttgatacgtcatatgtttgggtgaatgatggttttgtccttaagttttagacatttaattatatctagagggccaggcacagtggctcatacctgtaatcccaacact

SEQ ID NO: 3456 - DNA, 765 bp, Homo sapiens
aaatgcccggcgaagccacagaaaccgtccctgctacagagcaggagttgccgcagccccaggctgagacagggtctggaacagaatctgacagtgatgaatcagtaccagagcttgaagaacaggattccacccaggcaaccacacaacaagcccagctggcggcagcagctgaaatygatgaagaaccagtcagtaaagcaaaacagagtcggagtgaaaagaaggcacggaaggctatgtccaaactgggtcttcggcaggttacaggagttactagagtcactatccggaaatctaagaatatmctctttgtcatcacaaaaccagatgtctacaagagccctgcttcagatacttacatagtttttggggaagccaagatcgaagatttatcccagcaagcacaactagcagctgctgagaaattcaaagttcaaggtgaagctgtytcaaacattcaagaaaacacacagactccaactgtacaagaggagagtgaagaggaagaggtcgatgaaacaggtgtagaagttaaggacatwgaattggtcatgtcacaagcaaatgtgtcgagagcaaaggcagtccgagccctgaagaacaacagtaatgatattgtaaatgcgattatggaattaacaatgtaaccatatggaagcaactttttytggtgtctcaaaggagtaactgcagcttggtttgaaatttgtactgtttctatcataaataaagttatggcttcttgttggatgaattcagtcg

SEQ ID NO: 3457 - DNA, 1095 bp, Homo sapiens
aactatatatgtgtcttaaacctcaaagtaaattttccttgagaaataatttatgttgaaaagatttcctggccaagtgcagtggctcacacccgtaatcccagcactttgggaggccgaggcaggcggatcacctgagtycttgtcaccacccccgccgtgggaacggcctgacagtcactcgtcaaaggaagtggctgccggcagctcttgacccggaatcggatcctagtcccaccccctccgctccaggcttccttctgcaacaggcgtgggtcacgctctcgctcggtctttctgccgccatcttggttccgcgttccctgcacaaaatgcccggcgaagccacagaaaccgtccctgctacagagcaggagttgccgcagccccaggctgagacagggtctggaacagaatctgacagtgatgaatcagtaccagagcttgaagaacaggattccacccaggcaaccacacaacaagcccagctggcggcagcagctgaaatygatgaagaaccagtcagtaaagcaaaacagagtcggagtgaaaagaaggcacggaaggctatgtccaaactgggtcttcggcaggttacaggagttactagagtcactatccggaaatctaagaatatmctctttgtcatcacaaaaccagatgtctacaagagccctgcttcagatacttacatagtttttggggaagccaagatcgaagatttatcccagcaagcacaactagcagctgctgagaaattcaaagttcaaggtgaagctgtytcaaacattcaagaaaacacacagactccaactgtacaagaggagagtgaagaggaagaggtcgatgaaacaggtgtagaagttaaggacatwgaattggtcatgtcacaagcaaatgtgtcgagagcaaaggcagtccgagccctgaagaacaacagtaatgatattgtaaatgcgattatggaattaacaatgtaaccatatggaagcaactttttytggtgtctcaaaggagtaactgcagcttggtttgaaatttgtactgtttctatcataaataaagttatggcttcttgttggatgaattcagtcg

SEQ ID NO: 3458 - DNA, 1009 bp, Homo sapiens
ttccgccctcctagtcgcagcaagcgcggaactggggttgcggcgtctaagtgtttccggtggattcccagggactgtcggaggtgtggactctgcctgcctacctggtctgggaagatgttctaccatatctccctagagcacgaaatcctgctgcacccgcgctacttcggccccaacttgctcaacacggtgaagcagaagctcttcaccgaggtggaggggacctgcacagggaaaatcaagactgtctggggcagacctgagaatctgcattttaagaagatgattctcaggcatcccgaagattgagatctgttgcctcaaggactccagccttcttggacatttattgtgaaattaccagaacagcatttggtcttacacatactgatctctgttctgtcttcttttggtcattaagctctctgggagcagaggtgctatctacttgtccttttgctctccccgaccctacccccaagagctcagcgacttttattgcagatgtctttagaggctcttggacacacagtgtcttcctgtttctcatcctccttgcaggttggactcttcacagaaattgggcccatgtcttgcttcatctctcgacattccatcccttcagagatggagtttgatcctaactccaacccaccatgttacaagacaatggatgaggatattgtgattcagcaggacgatgagatccgcttaaagattgtggggacccgtgtggacaagaatgacatttttgctattggctccctgatggacgattacttggggcttgtaagctgagcctggtggcctcctaccmttggtcctactctaggaagtgtgattgtcacacttatcatgttgtccaraggtccagtctggctgctgttgtggaggcaaggaaggcaactcatcccagaaggcawytggtgcttyttgtagcttaactactgcctcctcatttttcagtatgtgttytaagtataaaaagtccttggttctcatggaa

SEQ ID NO: 3459 - DNA, 844 bp, Homo sapiens
ttccgccctcctagtcgcagcaagcgcggaactggggttgcggcgtctaagtgtttccggtggattcccagggactgtcggaggtgtggactctgcctgcctacctggtctgggaagatgttctaccatatctccctagagcacgaaatcctgctgcacccgcgctacttcggccccaacttgctcaacacggtgaagcagaagctcttcaccgaggtggaggggacctgcacagggaagtatggctttgtaattgctgtcaccaccattgacaatattggtgctggtgtgatccagccaggccgaggctttgtcctttatccagttaagtacaaggccattgttttccggccatttaaaggggaggtcgtggatgctgttgtcactcaggtcaacaaggttggactcttcacagaaattgggcccatgtcttgcttcatctctcgacattccatcccttcagagatggagtttgatcctaactccaacccaccatgttacaagacaatggatgaggatattgtgattcagcaggacgatgagatccgcttaaagattgtggggacccgtgtggacaagaatgacatttttgctattggctccctgatggacgattacttggggcttgtaagctgagcctggtggcctcctaccmttggtcctactctaggaagtgtgattgtcacacttatcatgttgtccaraggtccagtctggctgctgttgtggaggcaaggaaggcaactcatcccagaaggcawytggtgcttyttgtagcttaactactgcctcctcatttttcagtatgtgttytaagtataaaaagtccttggttctcatggaa

SEQ ID NO: 3460 - DNA, 3112 bp, Homo sapiens
cccgcgggcacgatggagcgctcctaccgtactctccacttttggtgtatttggaacgtttcatgccgtattaaaataaaacatggctaagctggatgtggggtggcggtgtgggataaaatagaggggtgctgcagctgggcggtgagccccctgcacctgtgcacccgaacgggtttgcccgcaagggccggggaggggccggggcctgggacgtgggtggagccggggcgggggcggggcccttcgcggtgccgtgaacgctgaggcaacctcgctgcgcaggcgcggtcgtgagctcctcagacggggcggggcgatccgtaggcagggcctgacgccgcagtcctccttggccggagcctcaacggatgggcggggagggggcggggccgggcaacccggaaggtccggcgtcccagccgcctacctcgctgggaccctggtcttgctgtcccccgctggcctcctgcccaagcgactgcggccaggatgggccggaaggtgaccgtggccacctgcgcactcaaccagtgggccctggacttcgagggcaatttgcaaagaattttaaagagtattgaaattgccaaaaacagaggagcaagatacaggcttggaccagagctggaaatatgcggctacggatgttgggatcattattacgagtcggacaccctcttgcactcgtttcaagtcctagcggcccttstggagtctcccgtcactcaggacatcatctgcgacrtggggatgcctgtaatgcaccgaaacgtccgctacaactgcagagtgatattcctcaacaggaagatcctgctcatcagacccaagatggccttggccaatgaaggcaactaccgcgagctgcgctggttcaccccgtggtcgaggagtcggcacacagaggagtactttctgcctcggatgatacaggacctgacaaagcaggaaaccgtacccttcggagatgcggtgctggtgacatgggacacctgcattggaagtgagatctgtgaggagctctggacaccccacagcccgcacatcgacatgggcctggatggcgtggagatcatcaccaacgcctcgggcagccaccacgtgctgcgcaaagccaacaccagggtggatctcgtgactatggtcaccagcaagaacggtgggatttacttgctggccaaccagaagggttgygacggggaccgcctgtactacgacggctgtgccatgatygccatgaacggaagcgtctttgctcaaggatcccagttttctctggatgacgtggaagtcctgacggccacgctggatctggaggacgtccggagctacagggcggagatttcatctcgaaacctggcrgccagcagggcgagccyctaccccagagtgaaggtggactttgccctctcgtgccacgaggacttgctggcacccatctctgagcccatcgagtggaaataccacagccctgaggaggagataagccttggacctgcctgctggctctgggattttttaagacgaagtcaacaggcagggtttttgctgcccttgagtggcggggtggacagcgcagccaccgcctgcctcatctactccatgtgctgccaggtctgcgaggccgtgaggagtggaaatgaggaagtgctggctgatgtccgcaccatcgtgaaccagatcagctacaccccccaggatccccgagacctctgtggacgcatactgaccacctgctacatggccagcaagaactcctcccaggagacgtgcacccgggccagagagttggcccagcagattggaagccaccacatcagtctcaacatcgatccagccgtgaaggccgtcatgggcatcttcagcctggtgacggggaagagccctctgtttgcagctcatggaggaagcagcagggaaaacctggcgctgcaaaatgtgcaggctcgaatacggatggtcctcgcctatctgtttgctcagttgagcctctggtctcggggtgtccacggtgggctcctcgtgctgggatccgccaacgtggatgagagtctcctgggctacctgaccaagtacgactgctccagtgcggacatcaaccccataggcgggatcagcaagacggacctcagggccttcgtccagttctgcatccagcgcttccagcttcctgccctgcagagcatcctgttggcgccggccaccgcagagctggagcccttggctgatggacaggtgtcccagaccgacgaggaagatatrgggatgacatatgcggagctctcggtctatgggaaactcaggaaggtggccaagatggggccytacagcatgttctgcaaactcctcggcatgtggagacacatctgcaccccragacaggtcgctgacaaagtgaagcggtttttctccaagtactccatgaacagacacaagatgaccacgctcacacccgcgtaccacgccgagaactacagccctgaggacaacaggtttgatctgcgaccatttckgtacaacacaagctggccttggcagtttcggtgcatagaaaatcaggtgctacagctcgagagggcagagccacagtccctggacggcgtggactgaggccggttccttcctggaggcctcctgtcctcggggaccccagcacctcatcatcagcattgctggagccaagggtaggagccctacactaggagcccaggatgggacggcgcatcagccgagagggagggaacttttcagtcaaattcctcaaaaagaggctggaataaagcctgggcttaaaaagaggctggaatccaatgcacatgattttgacctcccgccagcgtgcgcttccccgcgaagtctggcattctccgaaggaagccgcctgggtaggagggttccaaccgccgccccgtgtggcatctttgctgcaggaacaagaacagtagctcccgggaagggaggggtgtcatgagcagaaaatgaaggagagaagaccttctctcccacccacacacaccttcctgtcctgggttccagaaggttctggggagatggtccctgcagagctttcttcctgggagtctggggaccagtcggccttactcctgtc

SEQ ID NO: 3461 - DNA, 943 bp, Homo sapiens
tgcaaacgaggcgtgggtcccggaagctctgttctgcgggtggccgctcgcgcctgcgcagtggaggcggcccaggcccgccttccgcagggtgtcgccgctgtgccgctagcggtgccccgcctgctgcggtggcaccagccaggaggcggagtggaagtggccgtggggcgggtatgggactagctggcgtgtgcgccctgagacgctcagcgggctatatactcgtcggtggggccggcggtcagtctgcggcagcggcagcaagacggtrcagtgaaggagagtgggcgtctggcggggtccgcagtttcagcagagccgctgcagccatggccccaatcaaggtgggagatgccatcccagcagtggaggtgtttgaaggggagccagggaacaaggtgaacctggcagagctgttcaagggcaagaagggtgtgctgtttggagttcctggggccttcacccctggatgttccaagacacacctgccagggtttgtggagcaggctgaggctctgaaggccaagggagtccaggtggtggcctgtctgagtgttaatgatgcctttgtgactggcgagtggggccgagcccacaaggcggaaggcaaggttcggctcctggctgatcccactggggcctttgggaaggagacagacttattactagatgattcgctggtgtccatctttgggaatcgacgtctcaagaggttctccatggtggtacaggatggcatagtgaaggccctgaatgtggaaccaratggcacaggcctcacctgcagcctggcacccaatatcatctcacagctytgaggccctgggccagattacttcctccacccctccctatytcacctgcccagccstgtgctggggccctgcaattggaatgttggccagatttctgcaataaacacttgtggtttgcggccatc

SEQ ID NO: 3462 - DNA, 1829 bp, Homo sapiens
gaccggacgcggcgacggtgcggggcggcgctggccctgaggtaggcggcggtaagaggggccgcccgcggcccccggctcactccggcactccgggccgctcggcctccatgcctgcccgaccgcgctgccggagccccaggtgaccagcgccatgtccagccaggtggtgggcattgagcctctctacatcaaggcagagccggccagccctgacagtccaaagggttcctcggagacagagaccgagcctcctgtggccctggcccctggtccasctcccactcgctgcctcccaggccacaaggaagaggaggatggggagggggctgggcctggcgagcagggcggtgggaagctggtgctcagctccctgcccaagcgcctctgcctggtctgtggggacgtggcctccggctaccactatggtgtggcatcctgtgaggcctgcaaagccttcttcaagaggaccatccaggggagcatcgagtacagctgtccrgcctccaacgagtgtgagatcaccaagcggagacgcaaggcctgccaggcctgccgcttcaccaagtgcctgcgggtgggcatgctcaaggagggagtgcgcctggaccgcgtccggggtgggcggcagaagtacaagcggcggccggaggtggacccactgcccttcccgggccccttccctgctgggcccctggcagtcgctggaggcccccggaagacagccccagtgaatgcactggtgtctcatctgctggtggttgagcctgagaagctctatgccatgcctgaccccgcaggccctgatgggcacctcccagccgtggctaccctctgtgacctctttgaccgagagattgtggtcaccatcagctgggccaagagcatcccaggcttctcatcgctgtcgctgtctgaccagatgtcagtactgcagagcgtgtggatggaggtgctggtgctgggtgtggcccagcgctcactgccactgcaggatgagctggccttcgctgaggacttagtcctggatgaagagggggcacgggcagctggcctgggggaactgggggctgccctgctgcaactagtgcggcggctgcaggccctgcggctggagcgagaggagtatgttctactaaaggccttggcccttgccaattcagactctgtgcacatcgaagatgccgaggctgtggagcagctgcgagaagctctgcacgaggccctgctggagtatgaagccggccgggctggcccyggagggggtgctgagcggcggcgggcgggcaggctgctgctcacgctaccgctcctccgccagacagcgggcaaagtgctggcccatttctatggggtgaagctggagggcaaggtgcccatgcacaagctgttcttggagatgctcgaggccatgatggactgaggcaaggggtgggactggtgggggttctggcaggacctgcctagcatggggtcagccccaakggctggggcggagctggggtctgggcagtgccacagcctgctggcagggccagggcaatgccatcagcccctgggaacaggccccacgccctctcctccccctcctagggggtgtcagaagctgggaacgtgtgtccaggctctgggcacagtgctgccccctgcagagcaataacactatatttatttttgggtttggccagggaggcgcagggacatggggcaagccagggcccagagcccttgrctgtacagagactctattttaatgtatatttgctgcaaagagaaaccgcttttggttttaaacctttaatgagaaaaaaatatataataccgagctc

SEQ ID NO: 3463 - DNA, 2205 bp, Homo sapiens
gaccggacgcggcgacggtgcggggcggcgctggccctgaggtaggcggcggtaagaggggccgcccgcggcccccggctcactccggcactccgggccgctcggcctccatgcctgcccgaccgcgctgccggagccccaggtgaccagcgccatgtccagccaggtggtgggcattgagcctctctacatcaaggcagagccggccagccctgacagtccaaagggttcctcggagacagagaccgagcctcctgtggccctggcccctggtccasctcccactcgctgcctcccaggccacaaggaagaggaggatggggagggggctgggcctggcgagcagggcggtgggaagctggtgctcagctccctgcccaagcgcctctgcctggtctgtggggacgtggcctccggctaccactatggtgtggcatcctgtgaggcctgcaaagccttcttcaagaggaccatccaggggagcatcgagtacagctgtccrgcctccaacgagtgtgagatcaccaagcggagacgcaaggcctgccaggcctgccgcttcaccaagtgcctgcgggtgggcatgctcaaggagggagtgcgcctggaccgcgtccggggtgggcggcagaagtacaagcggcggccggaggtggacccactgcccttcccgggccccttccctgctgggcccctggcagtcgctggaggcccccggaagacagcagccccagtgaatgcactggtgtctcatctgctggtggttgagcctgagaagctctatgccatgcctgaccccgcaggccctgatgggcacctcccagccgtggctaccctctgtgacctctttgaccgagagattgtggtcaccatcagctgggccaagagcatcccaggcttctcatcgctgtcgctgtctgaccagatgtcagtactgcagagcgtgtggatggaggtgctggtgctgggtgtggcccagcgctcactgccactgcaggatgagctggccttcgctgaggacttagtcctggatgaagagggggcacgggcagctggcctgggggaactgggggctgccctgctgcaactagtgcggcggctgcaggccctgcggctggagcgagaggagtatgttctactaaaggccttggcccttgccaattcagactctgtgcacatcgaagatgccgaggctgtggagcagctgcgagaagctctgcacgaggccctgctggagtatgaagccggccgggctggcccyggagggggtgctgagcggcggcgggcgggcaggctgctgctcacgctaccgctcctccgccagacagcgggcaaagtgctggcccatttctatggggtgaagctggagggcaaggtgcccatgcacaagctgttcttggagatgctcgaggccatgatggactgaggcaaggggtgggactggtgggggttctggcaggacctgcctagcatggggtcagccccaakggctggggcggagctggggtctgggcagtgccacagcctgctggcagggccagggcaatgccatcagcccctgggaacaggccccacgccctctcctccccctcctagggggtgtcagaagctgggaacgtgtgtccaggctctgggcacagtgctgccccttgcaagccataacgtgcccccagagtgtagggggccttgcggaagccatagggggctgcacgggatgcgtgggaggcagaaacctatctcagggagggaaggggatggaggccagagtctcccagtgggtgatgcttttgctgctgcttaatcctaccccctcttcaaagcagagtgggacttggagagcaaaggcccatgcccccttcgctcctcctctcatcatttgcattgggcattagtgtccccccttgaagcaataactccaagcagactccagcccctggacccctggggtggccagggcttccccatcagctcccaacgagcctcctcagggggtaggagagcactgcctytatgccctgcagagcaataacactatatttatttttgggtttggccagggaggcgcagggacatggggcaagccagggcccagagcccttgrctgtacagagactctattttaatgtatatttgctgcaaagagaaaccgcttttggttttaaacctttaatgagaaaaaaatatataataccgagctcaaaaaca

SEQ ID NO: 3464 - DNA, 1539 bp, Homo sapiens
gaccggacgcggcgacggtgcggggcggcgctggccctgaggtaggcggcggtaagaggggccgcccgcggcccccggctcactccggcactccgggccgctcggcctccatgcctgcccgaccgcgctgccggagccccaggtgaccagcgccatgtccagccaggtggtgggcattgagcctctctacatcaaggcagagccggccagccctgacagtccaaagggttcctcggagacagagaccgagcctcctgtggccctggcccctggtccasctcccactcgctgcctcccaggccacaaggaagaggaggatggggagggggctgggcctggcgagcagggcggtgggaagctggtgctcagctccctgcccaagcgcctctgcctggtctgtggggacgtggcctccggctaccactatggtgtggcatcctgtgaggcctgcaaagccttcttcaagaggaccatccaggggagcatcgagtacagctgtccrgcctccaacgagtgtgagatcaccaagcggagacgcaaggcctgccaggcctgccgcttcaccaagtgcctgcgggtgggcatgctcaaggaggtgcaaacgaggcgtgggtcccggaagctctgttctgcgggtggccgctcgcgcctgcgcagtggaggcggcccaggcccgccttccgcagggtgtcgccgctgtgccgctagcggtgccccgcctgctgcggtggcaccagccaggaggcggagtggaagtggccgtggggcgggtatgggactagctggcgtgtgcgccctgagacgctcagcgggctatatactcgtcggtggggccggcggtcagtctgcggcagcggcagcaagacggtrcagtgaaggagagtgggcgtctggcggggtccgcagtttcagcagagccgctgcagccatggccccaatcaaggtgggagatgccatcccagcagtggaggtgtttgaaggggagccagggaacaaggtgaacctggcagagctgttcaagggcaagaagggtgtgctgtttggagttcctggggccttcacccctggatgttccaagacacacctgccagggtttgtggagcaggctgaggctctgaaggccaagggagtccaggtggtggcctgtctgagtgttaatgatgcctttgtgactggcgagtggggccgagcccacaaggcggaaggcaaggttcggctcctggctgatcccactggggcctttgggaaggagacagacttattactagatgattcgctggtgtccatctttgggaatcgacgtctcaagaggttctccatggtggtacaggatggcatagtgaaggccctgaatgtggaaccaratggcacaggcctcacctgcagcctggcacccaatatcatctcacagctytgaggccctgggccagattacttcctccacccctccctatytcacctgcccagccstgtgctggggccctgcaattggaatgttggccagatttctgcaataaacacttgtggtttgcggccatc

SEQ ID NO: 3465 - DNA, 2183 bp, Homo sapiens
gaccggacgcggcgacggtgcggggcggcgctggccctgaggtaggcggcggtaagaggggccgcccgcggcccccggctcactccggcactccgggccgctcggcctccatgcctgcccgaccgcgctgccggagccccaggtgaccagcgccatgtccagccaggtggtgggcattgagcctctctacatcaaggcagagccggccagccctgacagtccaaagggttcctcggagacagagaccgagcctcctgtggccctggcccctggtccasctcccactcgctgcctcccaggccacaaggaagaggaggatggggagggggctgggcctggcgagcagggcggtgggaagctggtgctcagctccctgcccaagcgcctctgcctggtctgtggggacgtggcctccggctaccactatggtgtggcatcctgtgaggcctgcaaagccttcttcaagaggaccatccaggggagcatcgagtacagctgtccrgcctccaacgagtgtgagatcaccaagcggagacgcaaggcctgccaggcctgccgcttcaccaagtgcctgcgggagtgcgcctggaccgcgtccggggtgggcggcagaagtacaagcggcggccggaggtggacccactgcccttcccgggccccttccctgctgggcccctggcagtcgctggaggcccccggaagacagccccagtgaatgcactggtgtctcatctgctggtggttgagcctgagaagctctatgccatgcctgaccccgcaggccctgatgggcacctcccagccgtggctaccctctgtgacctctttgaccgagagattgtggtcaccatcagctgggccaagagcatcccaggcttctcatcgctgtcgctgtctgaccagatgtcagtactgcagagcgtgtggatggaggtgctggtgctgggtgtggcccagcgctcactgccactgcaggatgagctggccttcgctgaggacttagtcctggatgaagagggggcacgggcagctggcctgggggaactgggggctgccctgctgcaactagtgcggcggctgcaggccctgcggctggagcgagaggagtatgttctactaaaggccttggcccttgccaattcagactctgtgcacatcgaagatgccgaggctgtggagcagctgcgagaagctctgcacgaggccctgctggagtatgaagccggccgggctggcccyggagggggtgctgagcggcggcgggcgggcaggctgctgctcacgctaccgctcctccgccagacagcgggcaaagtgctggcccatttctatggggtgaagctggagggcaaggtgcccatgcacaagctgttcttggagatgctcgaggccatgatggactgaggcaaggggtgggactggtgggggttctggcaggacctgcctagcatggggtcagccccaakggctggggcggagctggggtctgggcagtgccacagcctgctggcagggccagggcaatgccatcagcccctgggaacaggccccacgccctctcctccccctcctagggggtgtcagaagctgggaacgtgtgtccaggctctgggcacagtgctgccccttgcaagccataacgtgcccccagagtgtagggggccttgcggaagccatagggggctgcacgggatgcgtgggaggcagaaacctatctcagggagggaaggggatggaggccagagtctcccagtgggtgatgcttttgctgctgcttaatcctaccccctcttcaaagcagagtgggacttggagagcaaaggcccatgcccccttcgctcctcctctcatcatttgcattgggcattagtgtccccccttgaagcaataactccaagcagactccagcccctggacccctggggtggccagggcttccccatcagctcccaacgagcctcctcagggggtaggagagcactgcctytatgccctgcagagcaataacactatatttatttttgggtttggccagggaggcgcagggacatggggcaagccagggcccagagcccttgrctgtacagagactctattttaatgtatatttgctgcaaagagaaaccgcttttggttttaaacctttaatgagaaaaaaatatataataccgagctcaaaaaca

SEQ ID NO: 3466 - DNA, 786 bp, Homo sapiens
gagaacttcctcctccttggctctccccacttacttcctgataacctggtagaggtctcccgcgggcggggagggggaggcgtagcaactttaggcaacttcccaaaggtgtgcgcaggttgggggcgggacgcggcgccccgggaggtggcggcctctgcgacagcgggagtataagagtggacctgcaggctggtcgcgaggaggtggagcggcgcccgccgtgtgcctgggaccggcatgctggggcaggagggcagccgcgtgtcaggtgaccagcgccatgtccagccaggtggtgggcattgagcctctctacatcaaggcagagccggccagccctgacagtccaaagggttcctcggagacagagaccgagcctcctgtggccctggcccctggtccasctcccactcgctgcctcccaggccacaaggaagaggaggatggggagggggctgggcctggcgagcagggcggtgggaagctggtgctcagctccctgcccaagcgcctctgcctggtctgtggggacgtggcctccggctaccactatggtgtggcatcctgtgaggcctgcaaagccttcttcaagaggaccatccaggggagcatcgagtacagctgtccrgcctccaacgagtgtgagatcaccaagcggagacgcaaggcctgccaggcctgccgcttcaccaagtgcctgcgggtgggcatgctcaaggagggtgagcgctgggcaggggctgggcgagggctgggggagtcggggacccgggccaggtgggg

SEQ ID NO: 3467 - DNA, 890 bp, Homo sapiens
ctgcgcagtggaggcggcccaggcccgccttccgcagggtgtcgccgctgtgccgctagcggtgccccgcctgctgcggtggcaccagccaggaggcggagtggaagtggccgtggggcgggtatgggactagctggcgtgtgcgccctgagacgctcagcgggctatatactcgtcggtggggccggcggtcagtctgcggcagcggcagcaagacggtrcagtgaaggagagtgggcgtctggcggggtccgcagtttcagcagagccgctgcagccatggccccaatcaaggtgggagatgccatcccagcagtggaggtgtttgaaggggagccagggaacaaggtgaacctggcagagctgttcaagggcaagaagggtgtgctgtttggagttcctggggccttcacccctggatgttccaagacacacctgccagggtttgtggagcaggctgaggctctgaaggccaagggagtccaggtggtggcctgtctgagtgttaatgatgcctttgtgactggcgagtggggccgagcccacaaggcggaaggcaaggttcggctcctggctgatcccactggggcctttgggaaggagacagacttattactagatgattcgctggtgtccatctttgggaatcgacgtctcaagaggttctccatggtggtacaggatggcatagtgaaggccctgaatgtggaaccaratggcacaggcctcacctgcagcctggcacccaatatcatctcacagctytgaggccctgggccagattacttcctccacccctccctatytcacctgcccagccstgtgctggggccctgcaattggaatgttggccagatttctgcaataaacacttgtggtttgcggccatc

SEQ ID NO: 3468 - DNA, 1832 bp, Homo sapiens
gaccggacgcggcgacggtgcggggcggcgctggccctgaggtaggcggcggtaagaggggccgcccgcggcccccggctcactccggcactccgggccgctcggcctccatgcctgcccgaccgcgctgccggagccccaggtgaccagcgccatgtccagccaggtggtgggcattgagcctctctacatcaaggcagagccggccagccctgacagtccaaagggttcctcggagacagagaccgagcctcctgtggccctggcccctggtccasctcccactcgctgcctcccaggccacaaggaagaggaggatggggagggggctgggcctggcgagcagggcggtgggaagctggtgctcagctccctgcccaagcgcctctgcctggtctgtggggacgtggcctccggctaccactatggtgtggcatcctgtgaggcctgcaaagccttcttcaagaggaccatccaggggagcatcgagtacagctgtccrgcctccaacgagtgtgagatcaccaagcggagacgcaaggcctgccaggcctgccgcttcaccaagtgcctgcgggtgggcatgctcaaggagggagtgcgcctggaccgcgtccggggtgggcggcagaagtacaagcggcggccggaggtggacccactgcccttcccgggccccttccctgctgggcccctggcagtcgctggaggcccccggaagacagcagccccagtgaatgcactggtgtctcatctgctggtggttgagcctgagaagctctatgccatgcctgaccccgcaggccctgatgggcacctcccagccgtggctaccctctgtgacctctttgaccgagagattgtggtcaccatcagctgggccaagagcatcccaggcttctcatcgctgtcgctgtctgaccagatgtcagtactgcagagcgtgtggatggaggtgctggtgctgggtgtggcccagcgctcactgccactgcaggatgagctggccttcgctgaggacttagtcctggatgaagagggggcacgggcagctggcctgggggaactgggggctgccctgctgcaactagtgcggcggctgcaggccctgcggctggagcgagaggagtatgttctactaaaggccttggcccttgccaattcagactctgtgcacatcgaagatgccgaggctgtggagcagctgcgagaagctctgcacgaggccctgctggagtatgaagccggccgggctggcccyggagggggtgctgagcggcggcgggcgggcaggctgctgctcacgctaccgctcctccgccagacagcgggcaaagtgctggcccatttctatggggtgaagctggagggcaaggtgcccatgcacaagctgttcttggagatgctcgaggccatgatggactgaggcaaggggtgggactggtgggggttctggcaggacctgcctagcatggggtcagccccaakggctggggcggagctggggtctgggcagtgccacagcctgctggcagggccagggcaatgccatcagcccctgggaacaggccccacgccctctcctccccctcctagggggtgtcagaagctgggaacgtgtgtccaggctctgggcacagtgctgccccctgcagagcaataacactatatttatttttgggtttggccagggaggcgcagggacatggggcaagccagggcccagagcccttgrctgtacagagactctattttaatgtatatttgctgcaaagagaaaccgcttttggttttaaacctttaatgagaaaaaaatatataataccgagctc

SEQ ID NO: 3469 - DNA, 2866 bp, Homo sapiens
aactgcgcagctgctgactggcgggccgccaggcgcgtgcgtagagacgcccacacgcccgctgatgcgcacgcgccctgggccgcgcgtgcgcgcgtggggttccggaatgagccggggaaagcaargggaaggtttggggttggctcccggtttcgcgcatgcgtgcactgcacaaaccatttggcgggtttttccggccactcagttmtgccaccgtcactgagaagctcagcggtagcttttgggaagcaggacgttctcaccaggagagcgtcctctcgagatttctgctccctccattcagggcgtttgggagccaccccttcattttttaaaaaaagtatttctctgtgaccgacggccggggccttctgacggtctgaggtcttgcttgggccagtcacctcctgtcacggtccgcggaggggggaaggataagagggcgaggagctcatcgctcgccacccccgtgggcttcttgggcgcaggtcggagctgggtgggccggctccccggcccctggcttgggcgaccatgtccgcatccgcccagcagctggcggaggagctgcagatcttcggcctagactgcgaggaggctctaattgagaaattggtagagctttgtgttcagtatggacagaatgaggagggaatggtaggcgagcttatagccttctgcaccagcacacataaagttggccttacctcagagatcctgaactcttttgagcatgagtttctgagcaaaagattatcgaaagccaggcatagtacctgcaaggacagtggccatgcaggagctagagacattgtttccattcaagagctaattgaagtggaagaagaagaggaaatcctcttgaactcttacaccacaccttcaaagggttctcagaagcgagctatctctaccccagaaacccccctaacaaaaaggagtgtgtcaactcgtagcccccatcagctactctcaccgtcaagtttctctccaagtgctactccctcccagaaatacaactcacgaagtaaccgaggagaagtggttacctccttcggcttagcacagggagtatcttggtctgggagaggaggagctggaaacatcagcctgaaggtcttgggatgtccagaggcactaactgggagctacaaatccatgtttcagaagctcccagacattcgagaagttctgacctgtaagatagaagaacttggcagcgaactcaaggaacattacaagattgaagctttcactcctttgctagccccagcacaggagcctgtcactctgctgggccagattggctgtgatagcaacgggaagctgaacaacaagtcagtgattctcgagggagaccgggaacattcctcgggtgctcaaattccagtggatttatctgagcttaaggaatattctctgtttcctggacaggttgtaattatggaaggaatcaacaccactggtaggaaacttgttgccaccaaactctacgagggtgtgccacttccattttatcagcccactgaagaggatgcagactttgagcaaagcatggtcctggttgcctgtggaccatacaccacatctgacagcatcacgtatgaccccctgcttgacctgattgctgtcatcaaccatgaccggccagatgtctgcatcctgtttggccctttcctggatgctaagcatgaacaggtggagaattgtctactgacaagtccatttgaagacattttcaagcagtgtctacgaacaattattgaaggcacaagaagctccggctcccaccttgtctttgtcccgtcattgagagatgtgcaccatgagcctgtgtacccccagccgcctttcagctactccgatctgtctcgagaggacaaaaagcaagtacagtttgtgtccgagccctgcagcctctccataaacggagtgatcttcggcttgacatccacagatctgcttttccacctgggggccgaggagatcagtagttcttccggaacttcagacagattcagccgaatactcaagcacatcttgacccagaggagctactacccactctacccgccccaagaagacatggccattgactatgagtcgttctatgtttacgcacagctgcctgtcaccccagatgtcctcatcatcccgtcagagctgaggtacttygtgaaggatgtcctcggctgtgtctgtgtgaaccctgggcgccttaccaaagggcaggtgggaggcaccttcgcccgactctaccttaggaggccggcagcggacrgggcagagaggcagarcccatgcattgctgtgcaggtcgtcaggatctgaggcttctgtcctytgctgttctctgctgtgtgggcccttaaagtcttagccaagagccaagacatagccctgtgacaaggtgaacagttgggtgggaaaggagagaggagccagccagggaggggcagctgcagtgaccaggcccagcagggaggacttgtgcagccgggcctgcctstgagtggtgcctctcctggaaggaagctcttgcttctcagtccatgctccgtgtccagaagtaagccagctgtggatcccgcccactcagaaaaggcgagaaggctttgtgattttctacatgaatcaaacacagaaacaacttttggagaaattaaattctgagtgtgacttctgagtttgacctttcttctattttcttttatttatttattttgtttttagacggagtctcgatctgtcgcccaggctggagtgcagtggtgagatctcggctcactgcaagctctgccgcccgggttcatgccattctcctgcctcagcctcctgagtagctgggactacaggcacccac

SEQ ID NO: 3470 - DNA, 1534 bp, Homo sapiens
gagatggcggccaccgagggggtcggggaggctgcgcaaggcggtgagccccggcagctggagcagcccccgccccagccgcacccaccgctgccccaggagcagcacgaggaagagatggcagcagaggctggggaagccgtggcgtcccccatggacgacgggtttctgagcctggattcgccctccyatgtcccgtacagggacagaacagaatgggctgatacagatccagtgccgcagaatgatggccccaatcccgtggtccagatcatttatagtgacaaatttagagatgtttgattacttccgagctgtcctgcagcatgaagaaagaagcgaacgaggttttaagctaacccgggatgctgttgagttaaatgcagccaattatacagtaataggcgagtaatagtggaatggctaagagatccatctcaggagcctgaatttattgataatattcttaatcaggatgcaaagaattatcatgcctggcagcatcgacaatgggttattcaggaatttaaactttgggataatgagctgcagtatgtggaccaacttctcaaagaggatgtgagaaataactctgtctggaaccgaagatattttgttatttccaacaccactggctacaatgattgtgctgtattggagagagaagtccaatacactctggaaatgattcaactagtaccacataatagttcatggaactatttgaaaggaattttgcaggatcgtggtctttccaaatatcctaatctgttaaatcaattacttgatttacaaccaagtcatagttccccctacctaattgcctttcttgtgggtatctatgaagacatgctagaaaaccagtgtgtcaataaggaagacattcttaataatgcattagggttatgtgaaatcctagctaaagaaaaggacatgataagaaaggaatattggagataaattggaagatcctttcaaagcaaacacagcacagaaaatgactcaccaacaaatgtacagcaataacaccacccagaagaacttgatggaatgctttgatattttattaagggactctgcaggagtttaaaatgagggtgatccttccctttgcctgtggcgtaaaaatgcatcacacaggtattgctttttaacaagaactgacgctccttgggtgctgctgctactcagactagctctaagccatgtgattgttctaaagcaaagtcattgcatgggaagaggaagaaaaagtcccataaacgaacttttgtagtcttatcaacatgtaatcaaatcccttagcatcagctcctccctcagcggtacacgcgtcaagatttgtagcagtaataactgcaggtcacttgtatgtaatggatatgaggtagctgaagtttggttcagtaagcagggaatacagtggttccatcagagccagtctgcacactcacattatcttgctatcactgtaactaactaatgccaaaagaacagttttgtaataaaattatagctgtatctaaaaacaaaa

SEQ ID NO: 3471 - DNA, 1649 bp, Homo sapiens
cttgagatggcggccaccgagggggtcggggaggctgcgcaaggcggtgagccccggcagctggagcagcccccgccccagccgcacccaccgctgccccaggagcagcacgaggaagagatggcagcagaggctggggaagccgtggcgtcccccatggacgacgggtttctgagcctggattcgccctccyatgtcccgtacagggacagaacagaatgggctgatacagatccagtgccgcagaatgatggccccaatcccgtggtccagatcatttatagtgacaaatttagagatgtttgattacttccgagctgtcctgcagcatgaagaaagaagcgaacgaggttttaagctaacccgggatgctgttgagttaaatgcagccaattatacagtgtgacatttccggagagttctcttaaagtcacttcagaaggatctacatgaggaaatgaactacatcactgaaataattgaggggcagcccaaaaactatctagtttgtcacaataggcgagtaatagtggaatggctaagagatccatctcaggagcctgaatttattgataatattcttaatcaggatgcaaagaattatcatgcctggcagcatcgacaatgggttattcaggaatttaaactttgggataatgagctgcagtatgtggaccaacttctcaaagaggatgtgagaaataactctgtctggaaccgaagatattttgttatttccaacaccactggctacaatgattgtgctgtattggagagagaagtccaatacactctggaaatgattcaactagtaccacataatagttcatggaactatttgaaaggaattttgcaggatcgtggtctttccaaatatcctaatctgttaaatcaattacttgatttacaaccaagtcatagttccccctacctaattgcctttcttgtgggtatctatgaagacatgctagaaaaccagtgtgtcaataaggaagacattcttaataatgcattagggttatgtgaaatcctagctaaagaaaaggacatgataagaaaggaatattggagataaattggaagatcctttcaaagcaaacacagcacagaaaatgactcaccaacaaatgtacagcaataacaccacccagaagaacttgatggaatgctttgatattttattaagggactctgcaggagtttaaaatgagggtgatccttccctttgcctgtggcgtaaaaatgcatcacacaggtattgctttttaacaagaactgacgctccttgggtgctgctgctactcagactagctctaagccatgtgattgttctaaagcaaagtcattgcatgggaagaggaagaaaaagtcccataaacgaacttttgtagtcttatcaacatgtaatcaaatcccttagcatcagctcctccctcagcggtacacgcgtcaagatttgtagcagtaataactgcaggtcacttgtatgtaatggatatgaggtagctgaagtttggttcagtaagcagggaatacagtggttccatcagagccagtctgcacactcacattatcttgctatcactgtaactaactaatgccaaaagaacagttttgtaataaaattatagctgtatctaaaaacaaaa

SEQ ID NO: 3472 - DNA, 968 bp, Homo sapiens
gacagcttgaggttgggttttwatttttttatttgtatagtacaatctctgtggtagcagaaatatatgcacaaaaaacaattcaaataagagttcagagtaaaaaaaagtcagctaagactgtatcccgcaggacatttcatatatatggatttcacagctacactcgatccacgccccacaccacatacaggctgctgtctcccacaagaatgatgatgtcaggggcatcaggaaaggtaagggccgggaaaccgggcccttggagaaccctgcccaggggaggcccagcctactcacaggatccgacactccaggcagagcagagggcaggagaggcccaaagagctaggtcaagcagctggctcccctgggaggggagccgggagacagggaggtcctcacactgcccccgtggccacgcatggctgtctgcacactccatcaggaggaagggcaggggagaagtcacatgcagtacagtgaaactcatcagtgtcacacacgcccagcaggaggggagagctctgctccacacgctggcggccttggctgctccagagcaatccgctgctccagcttcagccatgggaccaagagggtaaaggagcagcttctggaggccccaggcagaggccaccttgcagcagtgactggcgactttgcagtacatctctgctcacttgctgtcccttgggagtgagcaccgtctataacacatcrccatctacaaaagcctggtcacagtgttcaccagcacattcatgaaaatttaaatcaacattaaccaaagtacctgcaagtaacactgcttactcttgctgtttgcctcatctgactggaaaccttagcccccaaatatgaaatgccttctctagattaaaagggtgcagaccgggcgaggtggctcacacctgtaatcccaacactttggaaggccaaggcagacggatcacttgaggtcagga

SEQ ID NO: 3473 - DNA, 710 bp, Homo sapiens
agtctgcctccctcggcgggccgggtctccagggaggacctgatttttcttcacccatagtyagggaggcgcaatcgccctggctttggggctggggcctccggggaggttccggtaggggcgttggagaggccgctctttttgcaaggcccgagacggcgggccctgcgcaggccgccctattcygcgccctcagggcgtcagtatccgcctgaggccggataccccagctgggcccggatgccgtcgmtgggcccggagcatcctcggcgctgccctcccagagccccgcagaggctgaggtggcgcggggggcgggcccggctccgcgagaagcagcggcagcgagggctggaggacccgggctacggggctctggggcgtctggcctgggtgggactgagcccattcggggggactccggggttctggtgtaggtagatccggggcaggctcaggaccaagtccctctccttccaccaaggagcgcccagaggccggcgggagctccaggttcacctcctcctcctccaggaaatcccacttccaactggatgtctggatgaactactgaaagctgctgagtgtcctgcagcaggtgagctgtggccagagcccaaggatgaagggggctccctcactctgttactgtgaagaggaagcctgaggtgtagcaggcccaggccccagaagtatggaaaaaaatgagg

SEQ ID NO: 3474 - DNA, 988 bp, Homo sapiens
agtctgcctccctcggcgggccgggtctccagggaggacctgatttttcttcacccatagtyagggaggcgcaatcgccctggctttggggctggggcctccggggaggttccggtaggggcgttggagaggccgctctttttgcaaggcccgagacggcgggccctgcgcaggccgccctattcygcgccctcagggcgtcagtatccgcctgaggccggataccccagctgggcccggatgccgtcgmtgggcccggagcatcctcggcgctgccctcccagagccccgcagaggctgaggtggcgcggggggcgggcccggctccgcgagaagcagcggcagcgagggctggaggacccgggctacggggctctggggcgtctggcctgggtgggactgagcccattcggggggactccggggttctggtgtaggtagatccggggcaggctcaggaccaagtccctctccttccaccaaggagcgcccagaggccggcgggagctccaggttcacctcctcctcctccaggaaatcccacttccaactggatgtctggatgaactactgaaagctgctgagtgtcctgcagcagggtcggtggacctgggtgtctgtctggacacatcctccagtggcctggacctgcccatgaaggtggtggacatgttcaggagctgtttgcctgcgtgtgctgtgaacttcaagtgcttacatgagctggtgaaacatgaagaaaatggcctggtctttgaggactcagaggaactggcagctcagctgcagacggtaagggccatgtagaattgaggagcccgctggtgctcccggcaggcagccagcctccgcaggaccccgaccagcgacacgatggcttctgggcaatacagcacgtctacggtgaaagcttcaggttactgaaagggaccagcggacagttccakgtcatgctgacctcagcagaagggcgaggccagagaggcag

SEQ ID NO: 3475 - DNA, 582 bp, Homo sapiens
tctctgtgaaggcaaagggcctctgagggagtattacagtcgcctcatccaccagaagcatttccagcacatccaggtctgcaccccytggctggagggccgaggactacccccgcttctagggtcggtggacctgggtgtctgtctggacacatcctccagtggcctggacctgcccatgaaggtggtggacatgttcaggagctgtttgcctgcgtgtgctgtgaacttcaagtgcttacatgagctggtgaaacatgaagaaaatggcctggtctttgaggactcagaggaactggcagctcagctgcagatgcttttctcaaactttcctgatcctgcaggcaagctaaaccagttctggaagaacctgcgggagtcgcagcagctctgatgggatgagagctgggtgcagactgtgctccctttggttatggacacataactcctgggccagaggctaaaaccccagggcccctgctgtccttcccgcagcttcttcttggtgtctcagggcaaaccctttcgagcagcgcctcccagtggccggaagctgaaatgaaggcagtggtgccacctggt

SEQ ID NO: 3476 - DNA, 3072 bp, Homo sapiens
cccctgccctgcgggtgactycgacccctggctagagggtaggcggcgtggagcagcgcgcgcaagcgaggccaggggaaggtgggcgcaggactttagccggttgagaaggatcaagcaggcatttggagcacaggtgtctagaaacttttaaggggccggttcaagaaggaaaagttcccttctgctgtgaaactatttggcaagaggctggagggcccaatrgctgcaaaatcgcaacccaacattcccaaagccaagagtctagatggcgtcaccaatgacagaaccgcatctcaagggcagtggggccgtgcctgggaggtggactgrttttcactggcgagcgtcatcttcctactgctgttcgccyccttcatcgtctactacttcatcakggcttgtgwccartacagctgcgccctgacyggccctgtggtggacatcgtcacyggacatgctcggctctcggacatctgggccaagactccacctataaygaggaaagccgcccagctctataccttgtgggtcaccttccasgtgcytctgtacacgtctctccctgacttctgccataagtttctacccggctacgtaggaggcatccaggagggggccgtgactcctgcaggggttgtgaacaagtatcagatcaayggcctgcaagcctrrctcctcabgcacctgcyctggtttgcaaacgctcatctcctgtcctggwtctygcccaccatcatcttcsacaacyggawccyactgctgtkstrcgccaacatccttggctatgccgtctccaccttcgccatggtcaagggctacttcttccccaccagcgccagagactgcaaattcacaggcaatttcttttacaactacatgatgggcatcgagtttaaccctcggatcgggaagtggtttgacttcaagctgttcttcaatgggyrccscrggatygtcgycygkaccctcatsarcctgtccttmgcagcgaagcagcgggagctccacagccatgtgaccaatgccrtggtcctggtcaacgtcctgcaggccatctrcrtgattgacttmttctggaacgaaacctggtacctgaagaccattgacatctgccatgaccacttsgggtggtacctggrctggggcgactgtgtctggctgccttatcttwacaygctgcagggtctgyacttgktgtaccaccccgtgcagctgtccaccccgcacgccgtgggcgtccygctgctgggcctggtgggctactacatcttcyrggyggccraccaccagaaggacctgttcygccgcacrgatgggcgctgcctcatctggggcaggaagcccaaggtcatcgaghvctcctacacatccgccgaygggcagaggcaccacagcaagctgctggtgtygggcttctggggcgtggcchgccacttcwacyacgtcvgcgacctgatgggcagcctggcctactgcctggcctgtggcggyrgccacctgctgccctacttctacatcatctacatggccatcctgctgacccacyrctrcctccrggacvagcacckctgcgccagcaagtacggccgggactgggagcgcyacaccgccgcagtgcyttaccscctgctgcctggaatcttctaagggcacgccctagggagaagccctgtggggctgtcaagagcgtgttctgccaggtccatgggggctggcatcccagctccaactcgaggagcctcagtttcctcatytgtaaactggagagagcccagcacttggcaggtgtccagtacctaatcacgctctgttccttgcttttgccttcaagggaattccgagtgtccagcactgccgtattgccagcacagacggattttctctaatcagtgtccctggggcaggaggatgacccagtcacctttactagtcctttggagacaatttacckgtattaggagcccaggccacgctacactctgcccacactggtgagcaggaggtcttcccacgccctgtcattaggctgcatttactcttgctaaatccccctcccctgcctgctctgcagtygtgggtggggcccgtgcgccgtttctccttggtagcgtgcacggtgttgaactgggacactggggagaaaggggctttcatgtcgtttccttcctgctcctgctgcacagctgccaggagtgctctgcctggagtctgcagacctcagagaggtcccagcacyggctgtggcctttcaggtgtaggcaggtgggctctgcttcccgattccctgtgagcgcccaccctctcgaaagaattttctgcttgccctrtgactgtkcagactctggctcgagcaacccggggaacttcaccctcaggggcctcycacaccttctccagcgaggaggtctcagtcccagcctcgggagggcacctccttttctgtgctttcttccctgaggcattcttcctcatccctagggtgttgtgtagaactctttttaaactctatgctccgagtagagttcatctttatattaaacttcccctgttcaaataagtggctgtgtggtttctgactggtgaatgggcctgactcgtgaatgggcctgactgcaggtctgactggtatacgtgggctctgtttctggtatgagaagggatgtctgagagagatgcttgggtctcggcgtcaaagcattgggtgcccgtgggtgcgtggcgccaccctgcccctctccctcccatgtcagccctttgctggggctgtttttgggttgaatgtggagagtattccattcccccccaaggagatgaaaccaggcttggccacctgcccccggcaagtgaatggagaagccagaaagagtgccaggtttgtcttgcacctggagaaacaagagtttcacacaggcagcccagtgcccatgccagggcagggggccaagctcagagtggcttcattgcttcacatgagaactggtcccacagccaggccgcctcccagacagcctggagggtatcggaactgtgacccgcccaggctgactgctgagccctagtgttcgtgca

SEQ ID NO: 3477 - DNA, 3149 bp, Homo sapiens
cccctgccctgcgggtgactycgacccctggctagagggtaggcggcgtggagcagcgcgcgcaagcgaggccaggggaaggtgggcgcaggtgaggggccgaggtgtgcgcaggactttagccggttgagaaggatcaagcaggcatttggagcacaggtgtctagaaacttttaaggggccggttcaagaaggaaaagttcccttctgctgtgaaactatttggcaagaggctggagggcccaatrgctgcaaaatcgcaacccaacattcccaaagccaagagtctagatggcgtcaccaatgacagaaccgcatctcaagggcagtggggccgtgcctgggaggtggactgrttttcactggcgagcgtcatcttcctactgctgttcgccyccttcatcgtctactacttcatcakggcttgtgwccartacagctgcgccctgacyggccctgtggtggacatcgtcacyggacatgctcggctctcggacatctgggccaagactccacctataaygaggaaagccgcccagctctataccttgtgggtcaccttccasgtgcytctgtacacgtctctccctgacttctgccataagtttctacccggctacgtaggaggcatccaggagggggccgtgactcctgcaggggttgtgaacaagtatcagatcaayggcctgcaagcctrrctcctcabgcacctgcyctggtttgcaaacgctcatctcctgtcctggwtctygcccaccatcatcttcsacaacyggawccyactgctgtkstrcgccaacatccttggctatgccgtctccaccttcgccatggtcaagggctacttcttccccaccagcgccagagactgcaaattcacaggcaatttcttttacaactacatgatgggcatcgagtttaaccctcggatcgggaagtggtttgacttcaagctgttcttcaatgggyrccscrggatygtcgycygkaccctcatsarcctgtccttmgcagcgaagcagcgggagctccacagccatgtgaccaatgccrtggtcctggtcaacgtcctgcaggccatctrcrtgattgacttmttctggaacgaaacctggtacctgaagaccattgacatctgccatgaccacttsgggtggtacctggrctggggcgactgtgtctggctgccttatcttwacaygctgcagggtctgyacttgktgtaccaccccgtgcagctgtccaccccgcacgccgtgggcgtccygctgctgggcctggtgggctactacatcttcyrggyggccraccaccagaaggacctgttcygccgcacrgatgggcgctgcctcatctggggcaggaagcccaaggtcatcgaghvctcctacacatccgccgaygggcagaggcaccacagcaagctgctggtgtygggcttctggggcgtggcchgccacttcwacyacgtcvgcgacctgatgggcagcctggcctactgcctggcctgtggcggyrgccacctgctgccctacttctacatcatctacatggccatcctgctgacccacyrctrcctccrggacvagcacckctgcgccagcaagtacggccgggactgggagcgcyacaccgccgcagtgcyttaccscctgctgcctggaatcttctaagggcacgccctagggagaagccctgtggggctgtcaagagcgtgttctgccaggtccatgggggctggcatcccagctccaactcgaggagcctcagtttcctcatytgtaaactggagagagcccagcacttggcaggtgtccagtacctaatcacgctctgttccttgcttttgccttcaagggaattccgagtgtccagcactgccgtattgccagcacagacggattttctctaatcagtgtccctggggcaggaggatgacccagtcacctttactagtcctttggagacaatttacckgtattaggagcccaggccacgctacactctgcccacactggtgagcaggaggtcttcccacgccctgtcattaggctgcatttactcttgctaaataaaagtgggagtggggcgtgcgcgttatccatgtattgcctttcagctctagatccccctcccctgcctgctctgcagtygtgggtggggcccgtgcgccgtttctccttggtagcgtgcacggtgttgaactgggacactggggagaaaggggctttcatgtcgtttccttcctgctcctgctgcacagctgccaggagtgctctgcctggagtctgcagacctcagagaggtcccagcacyggctgtggcctttcaggtgtaggcaggtgggctctgcttcccgattccctgtgagcgcccaccctctcgaaagaattttctgcttgccctrtgactgtkcagactctggctcgagcaacccggggaacttcaccctcaggggcctcycacaccttctccagcgaggaggtctcagtcccagcctcgggagggcacctccttttctgtgctttcttccctgaggcattcttcctcatccctagggtgttgtgtagaactctttttaaactctatgctccgagtagagttcatctttatattaaacttcccctgttcaaataagtggctgtgtggtttctgactggtgaatgggcctgactcgtgaatgggcctgactgcaggtctgactggtatacgtgggctctgtttctggtatgagaagggatgtctgagagagatgcttgggtctcggcgtcaaagcattgggtgcccgtgggtgcgtggcgccaccctgcccctctccctcccatgtcagccctttgctggggctgtttttgggttgaatgtggagagtattccattcccccccaaggagatgaaaccaggcttggccacctgcccccggcaagtgaatggagaagccagaaagagtgccaggtttgtcttgcacctggagaaacaagagtttcacacaggcagcccagtgcccatgccagggcagggggccaagctcagagtggcttcattgcttcacatgagaactggtcccacagccaggccgcctcccagacagcctggagggtatcggaactgtgacccgcccaggctgactgctgagccctagtgttcgtgca

SEQ ID NO: 3478 - DNA, 258 bp, Homo sapiens
atgaaaccaggcttggccacctgcccccggcaagtgaatggagaagccagaaagagtgccagatggagccagcttctctctgggcgagaacagggtgatccaggagctcagattagacagtgccagcctctaccattctccatgtacagagagcattctgttcccagtgaagccacagtgcctgatccctgggaagctggcctggcctttgcccccttccagaatgaaggacggctcggaccaattgccaggrccatc

SEQ ID NO: 3479 - DNA, 1520 bp, Homo sapiens
tggcctcggctcgcctcggctgcgctcggcaggctgcggtaaatccgggcttgcggccgctggcgtagtctgtggccgggtggtcgttgctgcgcgccccgagccccgagagccatgcagatgtcctacgccatccggtgcgccttctaccagctgctgctggccgcgctcatgctggtggcgatgctgcagctgctctacctgycgctgctgtccggactgcacgggcargaggagcaagaccaatattttgagttctttcccccgtccccacggtccgtggaccaggtcaaggcgcagctccgcaccgcgctggcctctggaggcgtcctggacgctagcggcgattaccgcgtctacaggggcctgctgaagaccaccatggaccccaacgatgtgatcctggccacgcacgccagcgtggacaacctgctgcacctgtcgggtctgctggagcgctgggagggcccgctgtccgtgtcggtgttcgcggccaccaaggaggaggcgcagctggccacggtgctggcctacgcgctgagcagccactgccccgacatgcgcgccagggtcgccatgcacctcgtgtgcccctcgcgttacgaggcagccgtgcccgacccccgggagccgggggagtttgccctgctgcggtcctgccaggaggtctttgacaagctagccagggtggcccagcccgggattaattatgcgctgggcaccaatgtctcctaccccaataacctgctgaggaatctggctcgtgagggggccaactatgccctggtgatcgatgtggacatggtgcccagcgaggggctgtggagaggcctgcgggaaatgctggatcagagcaaccagtggggaggcaccgcgctggtggtgcctgccttcgaaatccgaagagcccgccgcatgcccatgaacaaaaacgagctggtgcagctctaccaggttggcgaggtgcggcccttctattatgggttgtgcaccccctgccaggcacccaccaactattcccgctgggtcaacctgccggaagagagcttgctgcggcccgcctacgtggtaccttggcaggacccctgggagccattctaygtggcaggaggcaaggtgcccaccttcgacgagcgctttcggcagtacggcttcaaccgaatcagccaggcctgcgagctgcatgtggcggggtttgattttgaggtcctgaacgaaggtttcttggttcataagggcttcaaagaagcgttgaagttccatccccaaaaggaggctgaaaatcagcacaataagatcctatatcgccagttcaaacaggagttgaaggccaagtaccccaactctccccgacgctgctgagcycttccctcccctaatctgagaatctgaatacttaatgaaatggactttttggaaagaaatcagaygaaggcataaaatttagttcttagctcttgaacagaagcctaaaattcctggttctctcagggcttcgccttcaagggttctggaggagg

SEQ ID NO: 3480 - DNA, 2039 bp, Homo sapiens
tggcctcggctcgcctcggctgcgctcggcaggctgcggtaaatccgggcttgcggccgctggcgtagtctgtggccgggtggtcgttgctgcgcgccccgagccccgagagccatgcagatgtcctacgccatccggtgcgccttctaccagctgctgctggccgcgctcatgctggtggcgatgctgcagctgctctacctgycgctgctgtccggactgcacgggcargaggagcaagaccaatattttgagttctttcccccgtccccacggtccgtggaccaggtcaaggcgcagctccgcaccgcgctggcctctggaggcgtcctggacgctagcggcgattaccgcgtctacaggggcctgctgaagaccaccatggaccccaacgatgtgatcctggccacgcacgccagcgtggacaacctgctgcacctgtcgggtctgctggagcgctgggagggcccgctgtccgtgtcggtgttcgcggccaccaaggaggaggcgcagctggccacggtgctggcctacgcgctgagcagccactgccccgacatgcgcgccagggtcgccatgcacctcgtgtgcccctcgcgttacgaggcagccgtgcccgacccccgggagccgggggagtttgccctgctgcggtcctgccaggaggtctttgacaagctagccagggtggcccagcccgggattaattatgcgctgggcaccaatgtctcctaccccaataacctgctgaggaatctggctcgtgagggggccaactatgccctggtgatcgatgtggacatggtgcccagcgaggggctgtggagaggcctgcgggaaatgctggatcagagcaaccagtggggaggcaccgcgctggtggtgcctgccttcgaaatccgaagagcccgccgcatgcccatgaacaaaaacgagctggtgcagctctaccaggttggcgaggtgcggcccttctattatgggttgtgcaccccctgccaggcacccaccaactattcccgctgggtcaacctgccggaagagagcttgctgcggcccgcctacgtggtaccttggcaggacccctgggagccattctaygtggcaggaggcaaggtgcccaccttcgacgagcgctttcggcagtacggcttcaaccgaatcagccaggcctgcgagctgcatgtggcggggtttgattttgaggtcctgaacgaaggtttcttggttcataagggcttcaaagaagcgttgaagttccatccccaaaaggaggctgaaaatcagcacaataagatcctatatcgccagttcaaacaggagttgaaggccaagtaccccaactctccccgacgctgctgagcycttccctcccctaatctgagaagtcagcctcttggctcctcaggccaccatttaggcctgactggggtaagaaatgtcgctccactttacagaggtagctgtggtgttgaaacactggacttggatatggggtgctgggatcgattcctagctttaccactaactagctgtgtggccttgagtaaatccygttacctctctgagcctcggttaccctgtctgtaaaaagggaggtgagaatacctacctcacggaactgttgggaggctcagatgagatgctatatgtgaaaacattctgtaagcttcgtacaaatgtgaagtattaatattatcgcagtattattgttgttattattattgttattattaacaatcttgggtgggtagtaggagagcaaaaagtatgaatgggatggagctaagaagtctgaatacttaatgaaatggactttttggaaagaaatcagaygaaggcataaaatttagttcttagctcttgaacagaagcctaaaattcctggttctctcagggcttcgccttcaagggttctggaggagggaagggtctgcaggttccatgggtgacagcctgagatctgtcccttcaacgggctgggctgggtatgtgcctaccgatgacaatgtgtaaataaatgcgtgttcacacccaca

SEQ ID NO: 3481 - DNA, 1408 bp, Homo sapiens
gagaawtgcgcatgcgcgcctgtctcccgggacgctagagcaggcggttccygggctgctccggtaggtttggcgtgcgcgggtttctgcagatctagggcgagcttgcacgttacatcaccgatgcatctcttcttgcttgcttaatttgccaccacttaggcctttcttgcagaattcgccatatactccttaagggccgcggaatcggagcgaccttggtgactggcaaactctcggcagatgtgcgtgcactggtttgatgcagacgtggttgtaggcgatttaatttttcccagctttgcagcgactgttggcttcccagaacggatctccccagcctcgactggaagctgagggacaaaaattcataaaagcaattactctttcccggcgaggcttctagaagagcaagaagagcgatatgattacacctgcagccctataaagattgatctgtccgtctttcccttacagtcgtggcctgttaaacgttcctgtgttgttcagtgccagaatgagtgaccgctatttagaacaaaggattagtatcaaattttgcgtgaaattgaacaagtctgcaagtgagacccaccatcttttaaaagaagcttatggggatgaagtcatgtcaagggccagagtttttgactggcacaaaaggtttaaagaaggacgggaagatgttcgagatgatgcccgaagtgggcgtccagtcacccaccgaacagatgacaatatccagaaggtcaaggacttggtttgttcaaacaggcagttaaccgtkaggatgatggctgaagagttaaatttagacaaagaaactgttaggctcattttgaaagaaaacttgaacatgaggaagatttctgcaaaagttatttcgggtgttttgaagggtgagcctaaaccacgaaaacttgactttcggtccgatctttcaaaggaaactaggaaaaatagctcatgtttgaggaaaaaggtaacaggttctgaaacatggagttatctccagggtgaagctggtggggaaatgcccctgccggtatcccatcccagagtcyactactctgccagtcagcttctgcaggcgtcatcttcaacaagccttccccccaggtcctatgaacagggctggtatgtccctgccagtgatgctggaccaagacccatggtggagtgtagagtaccagaagctatgttggtccagacatggtttagacacagcaaccagaagcaggtccatgtgatttccctaacatctcttactgtcacctactgcaactggacaggggtggtcacccacctctcacctcactgtctgaagaccatcccctacactgctcctgtgctatttggcttggagtttgctgaaaactggagacttttggacaccaactttttgagc

SEQ ID NO: 3482 - DNA, 967 bp, Homo sapiens
agggaggcggaggttgctgcaaagcatggtgaggcccaggtgaagatctggaggcactcctatgatgtcccaccacctccaatggagcccaaccatcctttctatagcaacatcagtaaggatcgcaggtatgcagacctcacagaagatctgctaccctcctgtgagagtctgaaggacactattgccagagctctgaccttctggaatgaagaaatagttccccagatcaaggaggggaaacgtgtactgattgcagcccatggcaacagcctccggggcattgccaagcatctggagggtctctctgaagaggctatcatggagctgaacctgccgactggtattcccattgtctatgaatgggacaagaacttgaagcctatcaagcccatgcagtttctgggggatgaagagatggtacgcaaagccatggaagctgtggctgcccagggcaaggccaagaagtgaaggccagcagggaggatactgtycccaggagcaccctccctgcctgtcttgtccctctgcccctcccacctgcacatgtcacactgaccmcatctgtagacatcttgagttgtagctgcagatggggaccagtgactcccattttcattttagccattttgtctcctgcacccactcccttcatacaatctagtcagaatagcacttctagagcacaggttctcagtccaagctgtggaaaagctccccttatccaacagagtttaaaagtagtgacttgggtttttgcgatgcttcctggtgtgggtattacaatcccttcctgccttgtttcgtgacagtgaaatgcctcttggtcctgtccaagtatgtctttcactgatttctgaatcatgttctacttgcttggccctgccacatgggtccagtgttcatctgagcataactgtactaaatctttttccagatcagtataataaaggagtgatgtgaaaaa

SEQ ID NO: 3483 - DNA, 473 bp, Homo sapiens
tcctgtgagagtctgaaggacactattgccagagctctgaccttctccggggcattgccaagcatctggagggtctctctgaagaggctatcatggagctgaacctgccgactggtattcccattgtctatgaatgggacaagaacttgaagcctatcaagcccatgcagtttctgggggatgaagagatggtacgcaaagccatggaagctgtggctgcccagggcaaggccaagaagtgaaggccagcagggaggatactgtycccaggagtgcttcctggtgtgggtattacaatcccttcctgccttgtttcgtgacagtgaaatgcctcttggtcctgtccaagtatgtctttcactgatttctgaatcatgttctacttgcttggccctgccacatgggtccagtgttcatctgagcataactgtactaaatctttttccagatcagtataataaaggagtgatgtg

SEQ ID NO: 3484 - DNA, 1378 bp, Homo sapiens
gcggaggttgctgcaaagcatggtgaggcccaggtgaagatctggaggcactcctatgatgtcccaccacctccaatggagcccaaccatcctttctatagcaacatcagtaaggatcgcaggtatgcagacctcacagaagatctgctaccctcctgtgagagtctgaaggacactattgccagagctctgaccttctggaatgaagaaatagttccccagatcaaggaggggaaacgtgtactgattgcagcccatggcaacagcctccggggcattgccaagcatctggagggtctctctgaagaggctatcatggagctgaacctgccgactggtattcccattgtctatgaatgggacaagaacttgaagcctatcaagcccatgcagtttctgggggatgaagagatggtacgcaaagccatggaagctgtggctgcccagggcaaggccaagaagtgaaggccagcagggaggatactgtycccaggagcaccctccctgcctgtcttgtccctctgcccctcccacctgcacatgtcacactgaccmcatctgtagacatcttgagttgtagctgcagatggggaccagtgactcccattttcattttagccattttgtctcctgcacccactcccttcatacaatctagtcagaatagcacttctagagcacaggttctcagtccaagctgtggaaaagctccccttatccaacagagtttaaaagtagtgacttgggtttttgcgagttgctttgtttactaaggacttgtggggaggaaccatgctaagccatgaccaatgaggagaagcaacagagcctgtctgtccccaggagccagtcctctgctcgtctgcagtcaggccactgcctgagggctctagtcattccagtggaagatgaatgtaacctgcatggtgatgtgacaactgtttcctccctgacgccagaggagctggctctagaaggttgggatcaatcctgaatttagttatgtgttacatttaatttaagaagtatagtatatataaataatacaaaacaataacccttctggggtttctcgtggcrgttgaaatagtcccacatgtrgtcatcagaaaataagccattcctcataccaatataggatcagctccttgacctctgaggggcaggagtgcttcctggtgtgggtattacaatcccttcctgccttgtttcgtgacagtgaaatgcctcttggtcctgtccaagtatgtctttcactgatttctgaatcatgttctacttgcttggccctgccacatgggtccagtgttcatctgagcataactgtactaaatctttttccagatcagtataataaaggagtgatgtgaaaaaaaaa

SEQ ID NO: 3485 - DNA, 1364 bp, Homo sapiens
agggaggcggaggttgctgcaaagcatggtgaggcccaggtgaagatctggaggcactcctatgatgtcccaccacctccaatggagcccaaccatcctttctatagcaacatcagtaaggatcgcaggtatgcagacctcacagaagatctgctaccctcctgtgagagtctgaaggacactattgccagagctctgaccttctggaatgaagaaatagttccccagatcaaggaggggaaacgtgtactgattgcagcccatggcaacagcctccggggcattgccaagcatctggagggtctctctgaagaggctatcatggagctgaacctgccgactggtattcccattgtctatgaatgggacaagaacttgaagcctatcaagcccatgcagtttctgggggatgaagagatggtacgcaaagccatggaagctgtggctgcccagggcaaggccaagaagtgaaggccagcagggaggatactgtycccaggagcaccctccctgcctgtcttgtccctctgcccctcccacctgcacatgtcacactgaccmcatctgtagacatcttgagttgtagctgcagatggggaccagtgactcccattttcattttagccattttgtctcctgcacccactcccttcatacaatctagtcagaatagcacttctagagcacaggttctcagtccaagctgtggaaaagctccccttatccaacagagtttaaaagtagtgacttgggtttttgcgagttgctttgtttactaaggacttgtggggaggaaccatgctaagccatgaccaatgaggagaagcaacagagcctgtctgtccccaggagccagtcctcactgcctgagggctctagtcattccagtggaagatgaatgtaacctgcatggtgatgtgacaactgtttcctccctgacgccagaggagctggctctagaaggttgggatcaatcctgaatttagttatgtgttacatttaatttaagaagtatagtatatataaataatacaaaacaataacccttctggggtttctcgtggcrgttgaaatagtcccacatgtrgtcatcagaaaataagccattcctcataccaatataggatcagctccttgacctctgaggggcaggagtgcttcctggtgtgggtattacaatcccttcctgccttgtttcgtgacagtgaaatgcctcttggtcctgtccaagtatgtctttcactgatttctgaatcatgttctacttgcttggccctgccacatgggtccagtgttcatctgagcataactgtactaaatctttttccagatcagtataataaaggagtgatgtgaaaaaaaaa

SEQ ID NO: 3486 - DNA, 3171 bp, Homo sapiens
gggccgcacgccgccacccagcagccagggccgcctcttaaagggaggtggccggccttaaaggacccccgcgcgcccagccggcgggagcgcggcggcccggctcccgcagggccgcgccgaggcaggcgagcccccgcggcgcccaggcgcgggcccgggcccccgccgccgccgccgccgccgggcgcggcatttttattcaggcgacgcttaagggagcccggccgcgcccggtgcattgtgggagcggcccgcggccgttttcgggaggaggcggagggcgcaaagcgagccggtggatccataaagaacccagccaacccgcagagggaggggaggggctgagctgtgaggagagcggggcccaagaaccatgtctacgcgggagtcctttaacccggaaagttacgaattggacaaaagcttccggctaaccagattcactgaactgaagggcacaggctgcaaagtgccccaagatgtcctgcaaaaattgytggaatctttacaggagaaccacttccaagaagatgagcagtttctgggagccgttatgccaaggcttggcattggaatggatacttgtgtcattcctttgaggcacggtgggctttccttggttcaaaccacagattacatttacccgatcgtagacgacccttacatgatgggcaggatagcgtgtgccaatgtcctcagtgacctctatgcaatgggggtyacggaatgtgacaatatgctgatgctscttggagtcagtaataaaatgaccgacagggaaagggataaagtgatgcctctgattatccaaggttttaaagacgcagctgaggaagcaggaacrtctgtaacaggcggccaaacagtactaaacccctggattgtcctgggaggagtggctaccactgtctgccaacccaatgaatttatcatgccagacaatgcagtgccaggggacgtgctggtgctgacaaaacccctggggacacaggtggcagtggctgtgcaccagtggctggatatccctgagaaatggaataagattaaactagtggtcacccaagaagatgtagagctggcctaccaggaggcgatgatgaacatggcgaggctcaacaggacagctgcaggactcatgcacacgttcaatgcccacgccgccactgacatcacgggcttcgggattttgggycatgcgcagaacctggccaagcagcagaggaacgaggtgtcgtttgtaattcacaacctcccggtsctggccaagatggctgcggtgagcaaggcctgcggaaacatgttcggcctcatgcacgggacctgcccggagacttcaggcggccttctgatctgtttaccacgtgagcaagcagctcggttctgtgcagagataaagtcccccaaatatggtgaaggccaccaagcatggattattgggattgtagagaagggcaamcgcacagccagaatcatagacaaaccccggatcatcgaggtcgcaccacaagtggccactcaaaatgtgaatcccacacccggggccacctcttaatctagacagaaatagctgtttggttttgtttttaaatagatctatttcccttatcacttcaattaaagactataaacaacaaaaatctcattgtgtctacacatcggggtgaccttaggtcggtttgtaagtggatacaattaataaaataaaatccattgcctttttttcctgttacattaactgaagatgcacctaatcttgaggcagcttctgagttgagaattatattgttatccaatactgttgattcattttgaatctttagacacttatctcttgccgcataggctttttaaaggtgctttcacatagcacaggcattacccgtagtcgtgtcaaatagcagttggtgtcttcattttatgtatatttatcatataagtctgatttttttttttaagcgtcttgaatggttttctggagagacagcattggtaagtggcacatgacggtatcccagtcataagagggttgcatgattcctttgagtgtttgatttgaaaagcctagtcttgtctctcaagagcatctcggacccagaacattctccagtagtgcattcagttcaacacagcaagtgcttcattgcatggaaaacactttgaagacaaaaaagaaatcttatttctttttttgtagccttcctgatatttacagtaataccattaactgttttatcgatagcaaaaaaggatactttttgcaatgttattagatgttctatagtgctacaaggaattgccttccgaatggaggttcatgtataatactcatttacaattcaatatataattacacaaataatttttaaatataatcaatagtaaagactgttctgtggatggtagtgtttaatacattttctattttgtacagtgatttcaggccttttgttttcttaaaatcagcagctgtttggcctaattcttagcattattttgtcctttgcgccagtacttttttgtgcaygctttttgtgatctgtgttaaaaacctgcattgccaacattgcagctcgaacttaaacttgttattcaaataaatatttaattttttaaattgctcttgtataatcagatgccccttttagtattattttagaagcgttgggagggttttgcctaaagtacaatttatcgggaaaaactagattttagttttataaaacttttaagtctttcatgggacctaagcaatgaggagggattcctgtcattaagcacaagggcgctggatcctcaagtgcccatcttcgtgagagaaaaagcagcacatcctgcccatttctggtgctttctgctcacaggcaccaaagctgcacatgtaaactgactwcttgccaaaggaaatgacccctgggaagttcaagctcctggaagaggctttaactcggacgcgccctcctccaggaaccagtgggcagggcagccttcatgcatgtgtaactggacctccagccataagcatggtgtgcagtatggaagagcctgctacggaactgaaagtgattggacattttataggaattgatagagatgttggtcctcaaaagctacaaaccagtggtctgcaaaataaagtgtgttggaaacctctagtgagataaacctact

SEQ ID NO: 3487 - DNA, 2534 bp, Homo sapiens
gggccgcacgccgccacccagcagccagggccgcctcttaaagggaggtggccggccttaaaggacccccgcgcgcccagccggcgggagcgcggcggcccggctcccgcagggccgcgccgaggcaggcgagcccccgcggcgcccaggcgcgggcccgggcccccgccgccgccgccgccgccgggcgcggcatttttattcaggcgacgcttaagggagcccggccgcgcccggtgcattgtgggagcggcccgcggccgttttcgggaggaggcggagggcgcaaagcgagccggtggatccataaagaacccagccaacccgcagagggaggggaggggctgagctgtgaggagagcggggcccaagaaccatgtctacgcgggagtcctttaacccggaaagttacgaattggacaaaagcttccggctaaccagattcactgaactgaagggcacaggctgcaaagtgccccaagatgtcctgcaaaaattgytggaatctttacaggagaaccacttccaagaagatgagcagtttctgggagccgttatgccaaggcttggcattggaatggatacttgtgtcattcctttgaggcacggtgggctttccttggttcaaaccacagattacatttacccgatcgtagacgacccttacatgatgggcaggatagcgtgtgccaatgtcctcagtgacctctatgcaatgggggtyacggaatgtgacaatatgctgatgctscttggagtcagtaataaaatgaccgacagggaaagggataaagtgatgcctctgattatccaaggttttaaagacgcagctgaggaagcaggaacrtctgtaacaggcggccaaacagtactaaacccctggattgtcctgggaggagtggctaccactgtctgccaacccaatgaatttatcatgccagacaatgcagtgccaggggacgtgctggtgctgacaaaacccctggggacacaggtggcagtggctgtgcaccagtggctggatatccctgagaaatggaataagattaaactagtggtcacccaagaagatgtagagctggcctaccaggaggcgatgatgaacatggcgaggctcaacaggacaggcggccttctgatctgtttaccacgtgagcaagcagctcggttctgtgcagagataaagtcccccaaatatggtgaaggccaccaagcatggattattgggattgtagagaagggcaamcgcacagccagaatcatagacaaaccccggatcatcgaggtcgcaccacaagtggccactcaaaatgtgaatcccacacccggggccacctcttaatctagacagaaatagctgtttggttttgtttttaaatagatctatttcccttatcacttcaattaaagactataaacaacaaaaatctcattgtgtctacacatcggggtgaccttaggtcggtttgtaagtggatacaattaataaaataaaatccattgcctttttttcctgttacattaactgaagatgcacctaatcttgaggcagcttctgagttgagaattatattgttatccaatactgttgattcattttgaatctttagacacttatctcttgccgcataggctttttaaaggtgctttcacatagcacaggcattacccgtagtcgtgtcaaatagcagttggtgtcttcattttatgtatatttatcatataagtctgatttttttttttaagcgtcttgaatggttttctggagagacagcattggtaagtggcacatgacggtatcccagtcataagagggttgcatgattcctttgagtgtttgatttgaaaagcctagtcttgtctctcaagagcatctcggacccagaacattctccagtagtgcattcagttcaacacagcaagtgcttcattgcatggaaaacactttgaagacaaaaaagaaatcttatttctttttttgtagccttcctgatatttacagtaataccattaactgttttatcgatagcaaaaaaggatactttttgcaatgttattagatgttctatagtgctacaaggaattgccttccgaatggaggttcatgtataatactcatttacaattcaatatataattacacaaataatttttaaatataatcaatagtaaagactgttctgtggatggtagtgtttaatacattttctattttgtacagtgatttcaggccttttgttttcttaaaatcagcagctgtttggcctaattcttagcattattttgtcctttgcgccagtacttttttgtgcaygctttttgtgatctgtgttaaaaacctgcattgccaacattgcagctcgaacttaaacttgttattcaaataaatatttaattttttaaattgctcttgtataatcagatgccccttttagtattattttagaagcgttgggagggttttgcctaaagtacaatttatcgggaaaaactagattttagttttataaaacttttaagtctttcatgggacc

SEQ ID NO: 3488 - DNA, 3275 bp, Homo sapiens
gggccgcacgccgccacccagcagccagggccgcctcttaaagggaggtggccggccttaaaggacccccgcgcgcccagccggcgggagcgcggcggcccggctcccgcagggccgcgccgaggcaggcgagcccccgcggcgcccaggcgcgggcccgggcccccgccgccgccgccgccgccgggcgcggcatttttattcaggcgacgcttaagggagcccggccgcgcccggtgcattgtgggagcggcccgcggccgttttcgggaggaggcggagggcgcaaagcgagccggtggatccataaagaacccagccaacccgcagagggaggggaggggctgagctgtgaggagagcggggcccaagaaccatgtctacgcgggagtcctttaacccggaaagttacgaattggacaaaagcttccggctaaccagattcactgaactgaagggcacaggctgcaaagtgccccaagatgtcctgcaaaaattgytggaatctttacaggagaaccacttccaagaagatgagcagtttctgggagccgttatgccaaggcttggcattggaatggatacttgtgtcattcctttgaggcacggtgggctttccttggttcaaaccacagattacatttacccgatcgtagacgacccttacatgatgggcaggatagcgtgtgccaatgtcctcagtgacctctatgcaatgggggtyacggaatgtgacaatatgctgatgctscttggagtcagtaataaaatgaccgacagggaaagggataaagtgatgcctctgattatccaaggttttaaagacgcagctgaggaagcaggaacrtctgtaacaggcggccaaacagtactaaacccctggattgtcctgggaggagtggctaccactgtctgccaacccaatgaatttatcatgccagacaatgcagtgccaggggacgtgctggtgctgacaaaacccctggggacacaggtggcagtggctgtgcaccagtggctggatatccctgagaaatggaataagattaaactagtggtcacccaagaagatgtagagctggcctaccaggaggcgatgatgaacatggcgaggctcaacaggacagctgcaggactcatgcacacgttcaatgcccacgccgccactgacatcacgggcttcgggattttgggycatgcgcagaacctggccaagcagcagaggaacgaggtgtcgtttgtaattcacaacctcccggtsctggccaagatggctgcggtgagcaaggcctgcggaaacatgttcggcctcatgcacgggacctgcccggagacttcaggcggccttctgatctgtttaccacgtgagcaagcagctcggttctgtgcagagataaagtcccccaaatatggtgaaggccaccaagcatggattattgggattgtagagaagggcaamcgcacagccagaatcatagacaaaccccggatcatcgaggtcgcaccacaagtggccactcaaaatgtgaatcccacacccggggccacctcttaatctagacagaaatagctgtttggttttgtttttaaatagatctatttcccttatcacttcaattaaagactataaacaacaaaaatctcattgtgtctacacatcggggtgaccttaggtcggtttgtaagtggatacaattaataaaataaaatccattgcctttttttcctgttacattaactgaagatgcacctaatcttgaggcagcttctgagttgagaattatattgttatccaatactgttgattcattttgaatctttagacacttatctcttgccgcataggctttttaaaggtgctttcacatagcacaggcattacccgtagtcgtgtcaaatagcagttggtgtcttcattttatgtatatttatcatataagtctgatttttttttttaagcgtcttgaatggttttctggagagacagcattggtaagtggcacatgacggtatcccagtcataagagggttgcatgattcctttgagtgtttgatttgaaaagcctagtcttgtctctcaagagcatctcggacccagaacattctccagtagtgcattcagttcaacacagcaagtgcttcattgcatggaaaacactttgaagacaaaaaagaaatcttatttctttttttgtagccttcctgatatttacagtaataccattaactgttttatcgatagcaaaaaaggatactttttgcaatgttattagatgttctatagtgctacaaggaattgccttccgaatggaggttcatgtataatactcatttacaattcaatatataattacacaaataatttttaaatataatcaatagtaaagactgttctgtggatggtagtgtttaatacattttctattttgtacagtgatttcaggccttttgttttcttaaaatcagcagctgtttggcctaattcttagcattattttgtcctttgcgccagtacttttttgtgcaygctttttgtgatctgtgttaaaaacctgcattgccaacattgcagctcgaacttaaacttgttattcaaataaatatttaattttttaaattgctcttgtataatcagatgccccttttagtattattttagaagcgttgggagggttttgcctaaagtacaatttatcgggaaaaactagattttagttttataaaacttttaagtctttcatgggacctatattttcttgaattaaattttgtagttctagaataaataggcaatctaaaaaggtgttctctgtgttatgtaaagtggaggcttccttatattttaacctactaagcaatgaggagggattcctgtcattaagcacaagggcgctggatcctcaagtgcccatcttcgtgagagaaaaagcagcacatcctgcccatttctggtgctttctgctcacaggcaccaaagctgcacatgtaaactgactwcttgccaaaggaaatgacccctgggaagttcaagctcctggaagaggctttaactcggacgcgccctcctccaggaaccagtgggcagggcagccttcatgcatgtgtaactggacctccagccataagcatggtgtgcagtatggaagagcctgctacggaactgaaagtgattggacattttataggaattgatagagatgttggtcctcaaaagctacaaaccagtggtctgcaaaataaagtgtgttggaaacctctagtgagataaacctact

SEQ ID NO: 3489 - DNA, 3338 bp, Homo sapiens
tggggtcgcggggtgcctccggggcctccccgcctccccttttctccgcgcgggccctgtcgacccggggcgggtgcgtcccggcgtcctccccggctcctgggccgcacgcgcggtgcccgccggctcccgccgcctcccgccggcccgaacagggatggcccggccggggccccgagctgccgcctccgccccgccgccggcccgcagcccgggcctgctgggccttccgaggcggcggcgagggcctgagcctgagcctgagcccgaaggtgtccccgggttccttgctcccctccccggccgcctccgacgcgggcgtcctggagagcgcgccccattgtgcggggccggcggggaggtggatccataaagaacccagccaacccgcagagggaggggaggggctgagctgtgaggagagcggggcccaagaaccatgtctacgcgggagtcctttaacccggaaagttacgaattggacaaaagcttccggctaaccagattcactgaactgaagggcacaggctgcaaagtgccccaagatgtcctgcaaaaattgytggaatctttacaggagaaccacttccaagaagatgagcagtttctgggagccgttatgccaaggcttggcattggaatggatacttgtgtcattcctttgaggcacggtgggctttccttggttcaaaccacagattacatttacccgatcgtagacgacccttacatgatgggcaggatagcgtgtgccaatgtcctcagtgacctctatgcaatgggggtyacggaatgtgacaatatgctgatgctscttggagtcagtaataaaatgaccgacagggaaagggataaagtgatgcctctgattatccaaggttttaaagacgcagctgaggaagcaggaacrtctgtaacaggcggccaaacagtactaaacccctggattgtcctgggaggagtggctaccactgtctgccaacccaatgaatttatcatgccagacaatgcagtgccaggggacgtgctggtgctgacaaaacccctggggacacaggtggcagtggctgtgcaccagtggctggatatccctgagaaatggaataagattaaactagtggtcacccaagaagatgtagagctggcctaccaggaggcgatgatgaacatggcgaggctcaacaggacagctgcaggactcatgcacacgttcaatgcccacgccgccactgacatcacgggcttcgggattttgggycatgcgcagaacctggccaagcagcagaggaacgaggtgtcgtttgtaattcacaacctcccggtsctggccaagatggctgcggtgagcaaggcctgcggaaacatgttcggcctcatgcacgggacctgcccggagacttcaggcggccttctgatctgtttaccacgtgagcaagcagctcggttctgtgcagagataaagtcccccaaatatggtgaaggccaccaagcatggattattgggattgtagagaagggcaamcgcacagccagaatcatagacaaaccccggatcatcgaggtcgcaccacaagtggccactcaaaatgtgaatcccacacccggggccacctcttaatctagacagaaatagctgtttggttttgtttttaaatagatctatttcccttatcacttcaattaaagactataaacaacaaaaatctcattgtgtctacacatcggggtgaccttaggtcggtttgtaagtggatacaattaataaaataaaatccattgcctttttttcctgttacattaactgaagatgcacctaatcttgaggcagcttctgagttgagaattatattgttatccaatactgttgattcattttgaatctttagacacttatctcttgccgcataggctttttaaaggtgctttcacatagcacaggcattacccgtagtcgtgtcaaatagcagttggtgtcttcattttatgtatatttatcatataagtctgatttttttttttaagcgtcttgaatggttttctggagagacagcattggtaagtggcacatgacggtatcccagtcataagagggttgcatgattcctttgagtgtttgatttgaaaagcctagtcttgtctctcaagagcatctcggacccagaacattctccagtagtgcattcagttcaacacagcaagtgcttcattgcatggaaaacactttgaagacaaaaaagaaatcttatttctttttttgtagccttcctgatatttacagtaataccattaactgttttatcgatagcaaaaaaggatactttttgcaatgttattagatgttctatagtgctacaaggaattgccttccgaatggaggttcatgtataatactcatttacaattcaatatataattacacaaataatttttaaatataatcaatagtaaagactgttctgtggatggtagtgtttaatacattttctattttgtacagtgatttcaggccttttgttttcttaaaatcagcagctgtttggcctaattcttagcattattttgtcctttgcgccagtacttttttgtgcaygctttttgtgatctgtgttaaaaacctgcattgccaacattgcagctcgaacttaaacttgttattcaaataaatatttaattttttaaattgctcttgtataatcagatgccccttttagtattattttagaagcgttgggagggttttgcctaaagtacaatttatcgggaaaaactagattttagttttataaaacttttaagtctttcatgggacctatattttcttgaattaaattttgtagttctagaataaataggcaatctaaaaaggtgttctctgtgttatgtaaagtggaggcttccttatattttaacctactaagcaatgaggagggattcctgtcattaagcacaagggcgctggatcctcaagtgcccatcttcgtgagagaaaaagcagcacatcctgcccatttctggtgctttctgctcacaggcaccaaagctgcacatgtaaactgactwcttgccaaaggaaatgacccctgggaagttcaagctcctggaagaggctttaactcggacgcgccctcctccaggaaccagtgggcagggcagccttcatgcatgtgtaactggacctccagccataagcatggtgtgcagtatggaagagcctgctacggaactgaaagtgattggacattttataggaattgatagagatgttggtcctcaaaagctacaaaccagtggtctgcaaaataaagtgtgttggaaacctctagtgagataaacctact

SEQ ID NO: 3490 - DNA, 3163 bp, Homo sapiens
ccggctcccgcagggccgcgccgaggcaggcgagcccccgcggcgcccaggcgcgggcccggccgccgccgccgggcgcggcatttttattcaggcgacgcttaagggagcccggccgcgcccggtgcattgtgggagcggcccgcggccgttttcgggaggaggcggagggcgcaaagcgagccggtggatccataaagaacccagccaacccgcagagggaggggaggggctgagctgtgaggagagcggggcccaagaaccatgtctacgcgggagtcctttaacccggaaagttacgaattggacaaaagcttccggctaaccagattcactgaactgaagggcacaggctgcaaagtgccccaagatgtcctgcaaaaattgytggaatctttacaggagaaccacttccaagaagatgagcagtttctgggagccgttatgccaaggcttggcattggaatggatacttgtgtcattcctttgaggcacggtgggctttccttggttcaaaccacagattacatttacccgatcgtagacgacccttacatgatgggcaggatagcgtgtgccaatgtcctcagtgacctctatgcaatgggggtyacggaatgtgacaatatgctgatgctscttggagtcagtaataaaatgaccgacagggaaagggataaagtgatgcctctgattatccaaggttttaaagacgcagctgaggaagcaggaacrtctgtaacaggcggccaaacagtactaaacccctggattgtcctgggaggagtggctaccactgtctgccaacccaatgaatttatcatgccagacaatgcagtgccaggggacgtgctggtgctgacaaaacccctggggacacaggtggcagtggctgtgcaccagtggctggatatccctgagaaatggaataagattaaactagtggtcacccaagaagatgtagagctggcctaccaggaggcgatgatgaacatggcgaggctcaacaggacagctgcaggactcatgcacacgttcaatgcccacgccgccactgacatcacgggcttcgggattttgggycatgcgcagaacctggccaagcagcagaggaacgaggtgtcgtttgtaattcacaacctcccggtsctggccaagatggctgcggtgagcaaggcctgcggaaacatgttcggcctcatgcacgggacctgcccggagacttcaggcggccttctgatctgtttaccacgtgagcaagcagctcggttctgtgcagagataaagtcccccaaatatggtgaaggccaccaagcatggattattgggattgtagagaagggcaamcgcacagccagaatcatagacaaaccccggatcatcgaggtcgcaccacaagtggccactcaaaatgtgaatcccacacccggggccacctcttaatctagacagaaatagctgtttggttttgtttttaaatagatctatttcccttatcacttcaattaaagactataaacaacaaaaatctcattgtgtctacacatcggggtgaccttaggtcggtttgtaagtggatacaattaataaaataaaatccattgcctttttttcctgttacattaactgaagatgcacctaatcttgaggcagcttctgagttgagaattatattgttatccaatactgttgattcattttgaatctttagacacttatctcttgccgcataggctttttaaaggtgctttcacatagcacaggcattacccgtagtcgtgtcaaatagcagttggtgtcttcattttatgtatatttatcatataagtctgatttttttttttaagcgtcttgaatggttttctggagagacagcattggtaagtggcacatgacggtatcccagtcataagagggttgcatgattcctttgagtgtttgatttgaaaagcctagtcttgtctctcaagagcatctcggacccagaacattctccagtagtgcattcagttcaacacagcaagtgcttcattgcatggaaaacactttgaagacaaaaaagaaatcttatttctttttttgtagccttcctgatatttacagtaataccattaactgttttatcgatagcaaaaaaggatactttttgcaatgttattagatgttctatagtgctacaaggaattgccttccgaatggaggttcatgtataatactcatttacaattcaatatataattacacaaataatttttaaatataatcaatagtaaagactgttctgtggatggtagtgtttaatacattttctattttgtacagtgatttcaggccttttgttttcttaaaatcagcagctgtttggcctaattcttagcattattttgtcctttgcgccagtacttttttgtgcaygctttttgtgatctgtgttaaaaacctgcattgccaacattgcagctcgaacttaaacttgttattcaaataaatatttaattttttaaattgctcttgtataatcagatgccccttttagtattattttagaagcgttgggagggttttgcctaaagtacaatttatcgggaaaaactagattttagttttataaaacttttaagtctttcatgggacctatattttcttgaattaaattttgtagttctagaataaataggcaatctaaaaaggtgttctctgtgttatgtaaagtggaggcttccttatattttaacctactaagcaatgaggagggattcctgtcattaagcacaagggcgctggatcctcaagtgcccatcttcgtgagagaaaaagcagcacatcctgcccatttctggtgctttctgctcacaggcaccaaagctgcacatgtaaactgactwcttgccaaaggaaatgacccctgggaagttcaagctcctggaagaggctttaactcggacgcgccctcctccaggaaccagtgggcagggcagccttcatgcatgtgtaactggacctccagccataagcatggtgtgcagtatggaagagcctgctacggaactgaaagtgattggacattttataggaattgatagagatgttggtcctcaaaagctacaaaccagtggtctgcaaaataaagtgtgttggaaacctctagtgagataaacctact

SEQ ID NO: 3491 - DNA, 1491 bp, Homo sapiens
tccggtccctaaagcaagaaggaagaccgagaaaaggaagcggaggagaatcccggggcatacgcttgacacacacgcatacaaaaagagctttagtctcgaaagaggaattaccgaagtgtcgagagaggaattttaagaagtttacaactccgtcttcgccctaaacgcacgctgacccggaaagtaatctcctgaagctaggtcaaaggcgggggttctacggatgccggaaggagggtgcgcgcccatccttttagcaccgcgagaggcgccggtgtttcgagccgtggcaccggcatcggctgacactgctgcctccagctagttatttcgtcctcttccgttcttcacccctacaccttggaggtgaacttctcacctgagggctgtaaagactcrtttgaaaatggagagccaagaaccaacggaatcttctcagaatggcaaacagtatatcatttcagaggagttaatttcagaaggaaaatgggtcaagcttgaaaaaacaacgtacatggatcctactggtaaaactagaacttgggaatcagtgaaacgtacaaccaggaaagagcagactgcggatggtgtcgcggtcatccccgtgctgcagagaacacttcactatgagtgtatcgttctggtgaaacagttccgaccaccaatggggggctactgcatagagttccctgcaggtctcatagatgatggtgaaaccccagaagcagctgctctccgggagcttgaagaagaaactggctacaaaggggacaytgccgaatgttctccagcggtctgtatggacccaggcttgtcaaactgtactatacacatcgtgacagtcaccattaacggagatgatgccgaaaacgcaaggccgaagccaaagccagagtttgtggaagtcatttctttacccaagaatgacctgctgcagagacttgatgctctggtagctgaagaacatctcacagtggacgccagggtctattcctacgctctagcrctgaaacatgcaaatgcaaagccatttgaagtgcccttcttgaaattttaagcccaaatatgacactggccatttttgtaaacgagaccaccaggccttcttcactaagactttgtattcaacttagtttaatgtagatttgccattagctttttcgtaaaataaaagcacagaacagatgtggtggtggtatggaattgtaattacaggtaggttgtgaccttcctttaaatttgttataactccagctaaaattaacaaagaatataaatgcaagtatgtttactccaatttttttaaagctcaacagcagttaactacagctcagttacttttctagtccagtctggtasacaggggtatttgtatagagaaatagacctgagttctcaattaggtcatttccactctcaacccccaatataaaattctaagctgggtatgcaaataaccatgtactccgttagtgtttaaaacagcgt

SEQ ID NO: 3492 - DNA, 1500 bp, Homo sapiens
tccggtccctaaagcaagaaggaagaccgagaaaaggaagcggaggagaatcccggggcatacgcttgacacacacgcatacaaaaagagctttagtctcgaaagaggaattaccgaagtgtcgagagaggaattttaagaagtttacaactccgtcttcgccctaaacgcacgctgacccggaaagtaatctcctgaagctaggtcaaaggcgggggttctacggatgccggaaggagggtgcgcgcccatccttttagcaccgcgagaggcgccggtgtttcgagccgtggcaccggcatcggctgacactgctgcctccagctagttatttcgtcctcttccgttcttcacccctacaccttggaggtgaacttctcacctgagggctgtaaagactcrtttgaaaatggagagccaagaaccaacggaatcttctcagaatggcaaacagtatatcatttcagaggagttaatttcagaaggaaaatgggtcaagcttgaaaaaacaacgtacatggatcctactggtaaaactagaacttgggaatcagtgaaacgtacaaccaggaaagagcagactgcggatggtgtcgcggtcatccccgtgctgcagagaacacttcactatgagtgtatcgttctggtgaaacagttccgaccaccaatggggggctactgcatagagttccctgcaggtctcatagatgatggtgaaaccccagaagcagctgctctccgggagcttgaagaagaaactggctacaaaggggacaytgccgaatgttctccagcggtctgtatggacccaggcttgtcaaactgtactatacacatcgtgacagtcaccattaacggagatgatgccgaaaacgcaaggccgaagccaaagccaggggatggagagtttgtggaagtcatttctttacccaagaatgacctgctgcagagacttgatgctctggtagctgaagaacatctcacagtggacgccagggtctattcctacgctctagcrctgaaacatgcaaatgcaaagccatttgaagtgcccttcttgaaattttaagcccaaatatgacactggccatttttgtaaacgagaccaccaggccttcttcactaagactttgtattcaacttagtttaatgtagatttgccattagctttttcgtaaaataaaagcacagaacagatgtggtggtggtatggaattgtaattacaggtaggttgtgaccttcctttaaatttgttataactccagctaaaattaacaaagaatataaatgcaagtatgtttactccaatttttttaaagctcaacagcagttaactacagctcagttacttttctagtccagtctggtasacaggggtatttgtatagagaaatagacctgagttctcaattaggtcatttccactctcaacccccaatataaaattctaagctgggtatgcaaataaccatgtactccgttagtgtttaaaacagcgt

SEQ ID NO: 3493 - DNA, 3355 bp, Homo sapiens
ccttctctctctctctccctctccctctcctgccagccaagtgaagacatgcttacttccccttcaccttccttcatgatggtaagaaacggttgaactggatgcaatttttatcacagcttgtgtaagactgcctctgtccctcctctcacatgccattggttaaccagcagacagtgtgctcaggggcgttgcagctcattgctcttatagcctgtgagggcacggaagaaacatttgctaaccaggccagtgacagaaatggattcgaaataycagtgtgtgaagctgaatgatggtcacttcatgcctgtcctgggatttggcacctatgcgcctgcagaggttcctaaaagtaaagctytagaggccgtcaaattggcaatwgaagcyggstwccrccatattgattctgcwcatgtttacaataatgaggagcaggttggactggccatccgaagcaagattgcagatggcagtgtgaagagagaagacatattctacacttcaaagctttggagcaattcccatcgaccagagttggtccgaccagccttggaaaggtcactgaaaaatcttcaattggaytatgttgacctctatcttattcattttccagtgtctgtaaaggtaggcagcttgtgtgatcaaattaatttcacttttgttctcagcataaatattgttttcatggagatttgaactaarctttttcttaggaggacatagggattttaacatggaagaagagccctaaacataactcctaattcctttctatggaacagaaagcaattttgaatccatacttccgtgattgcatgtctacaagaaaagagagtgcagaatcctcaaagcctctgcctcaaaaacttgaggaaatgacaatcatctccttgaaggcacaaggtcttatttatgattcctgatttcacctcttgggatgttcacagacacagagtttcatgaagctgtggtgtccagaaaacctgctgcacatagggtgcacaatgagtttccatcttcttgcctcttttcaaggggcaagaactcagtccgggaatgtcttaaactacaaaccttcatgggaaaccttgttgcttctgcttcctctcttttcacactggasgtttyatttttgcttagccatgaattcttgtgtcattcataacttttgtcttaaggtactgaaaactagtcaggctagttaatgcaaaagggtatattagatatgataatgggaaatcaaagccagggctacattaagaatttgataaaaactctaaaaatatatcctttctccacccttatctctgctttattacaaaaggctttttaaatatttgttccaacctttttcgttggtggcatttatggctttggagcactgtcaggcccatgttcattaccgtgagctcctgtgcatctcctaatttccaaactagcctkgaaaacrcctccattgaccatgattggttcatggtcctgtgcayggaacatcayatgttcagggagataaagaactctgatagtggcacctgggtaaaaagtacaatccattatatctggatatcaagatcttttgcagttgaagagaggtattgccacagagaaaattataggagcagaagaaagtcaatgaaagtcaatgatgacactccattaggaaccagaaagatggtatttatttayacatataataggtgtaagagattagaggaagcctgtcacctgaagacattccttataccttcatatgtagtacactttgtacataccactctctggagcgctgcatcacctacctcatggaggattagtgtccttaaatgtacctcagagcatggctatgtgtggagaaattgacttgtgacatcactaaactgactgcttctacttcagccaggtgaggaagtgatcccaaaagatgaaaatggaaaaatactatttgacacagtggatctctgtgccacatgggaggtgagtgtttggaggtgagagaacggataagaaagatgaggtaggatacatctgtttcctatcttcttagtacaagtatggaaaatgcaccattggatcaaaaacttaggaactttacaaaggtagtttttgtgagcagcgaggaaaaagaaatgacaggcatacaaaagagagaagtggwggagaagaattgggggtaaggaggactgggatttctttccttgcctgtacattaatctctccactttcctaaggaggaaacagaaattctcactcttgcaatcactatcttcttccccaatttttctgttttattttctcccttttaagaaccacggctagctagtttgattgtcacrtctagacagttgttgctttcacagttctatgttacatttatcttgctcttcagtcgactacacaaatgatacctcacaattcctttttcccaggccatggagaagtgtaaagatgcaggattggccaagtccatcggggtgtccaacttcaaccrcaggctgctggagatgatcctcaacragccagggctcaagtacragcctgtctgcaaccaggtggaatgtcatccttacttcaaccagagaaaactgctggatttctgcaagtcaaaagacattgttctggttgcctatagtgctctgggatcccatcgagaagaaccatggtaataagagatacaggaagtttacctaaaacactggtttgataaaaaaaatttaatcagatcatgctgtttcctggagttcactcacagctgacttggggtgagggaagaatttgcatttctgacgagatcccaggtgatgttgaggctgctgttcgggggcctcgcttgagaagctccggtgcagagtggacgccttagtctgtttagggagccgcctaacaaactatccccagcctcagggcctcagcctttctgcctttccttccagggtggacccgaactccccggtgctcttggaggacccagtcctttgtgccttggcaaaaaagcacaagcgaaccccagccctgattgccctgcgctaccagctgcagcgtggggttgtggtcctggccaagagctacaatgagcagcgcatcagacagaacgtgcaggtgttttgctggcccccctaattatccattttctgatgaatattaacatggagggcattgcatgaggtctgccagaaggccctgcrtgtggatggtgacacagaggatggctctatgctggtgactggacacatcgcctctggttaaatctctcctgcttggygayttcagyaagctacagcwaagcccatcggccrgaaargaaagacaataattttgtttttcattttgaaaaaattaaatgctctctcct

SEQ ID NO: 3494 - DNA, 1294 bp, Homo sapiens
gtaagaaacggttgaactggatgcaatttttatcacagcttgtgtaagactgcctctgtccctcctctcacatgccattggttaaccagcagacagtgtgctcaggggcgttgcagctcattgctcttatagcctgtgagggcacggaagaaacatttgctaaccaggccagtgacagaaatggattcgaaataycagtgtgtgaagctgaatgatggtcacttcatgcctgtcctgggatttggcacctatgcgcctgcagaggttcctaaaagtaaagctytagaggccgtcaaattggcaatwgaagcyggstwccrccatattgattctgcwcatgtttacaataatgaggagcaggttggactggccatccgaagcaagattgcagatggcagtgtgaagagagaagacatattctacacttcaaagctttggagcaattcccatcgaccagagttggtccgaccagccttggaaaggtcactgaaaaatcttcaattggaytatgttgacctctatcttattcattttccagtgtctgtaaagccaggtgaggaagtgatcccaaaagatgaaaatggaaaaatactatttgacacagtggatctctgtgccacatgggaggccatggagaagtgtaaagatgcaggattggccaagtccatcggggtgtccaacttcaaccrcaggctgctggagatgatcctcaacragccagggctcaagtacragcctgtctgcaaccaggtggaatgtcatccttacttcaaccagagaaaactgctggatttctgcaagtcaaaagacattgttctggttgcctatagtgctctgggatcccatcgagaagaaccatgggtggacccgaactccccggtgctcttggaggacccagtcctttgtgccttggcaaaaaagcacaagcgaaccccagccctgattgccctgcgctaccagctgcagcgtggggttgtggtcctggccaagagctacaatgagcagcgcatcagacagaacgtgcaggtgttttgctggcccccctaattatccattttctgatgaatattaacatggagggcattgcatgaggtctgccagaaggccctgcrtgtggatggtgacacagaggatggctctatgctggtgactggacacatcgcctctggttaaatctctcctgcttggygayttcagyaagctacagcwaagcccatcggccrgaaargaaagacaataattttgtttttcattttgaaaaaattaaatgctctctcctaaagattcttcacct

SEQ ID NO: 3495 - DNA, 1375 bp, Homo sapiens
ccttctctctctctctccctctccctctcctgccagccaagtgaagacatgcttacttccccttcaccttccttcatgatggtaagaaacggttgaactggatgcaatttttatcacagcttgtgtaagactgcctctgtccctcctctcacatgccattggttaaccagcagacagtgtgctcaggggcgttgcagctcattgctcttatagcctgtgagggcacggaagaaacatttgctaaccaggccagtgacagaaatggattcgaaataycagtgtgtgaagctgaatgatggtcacttcatgcctgtcctgggatttggcacctatgcgcctgcagaggttcctaaaagtaaagctytagaggccgtcaaattggcaatwgaagcyggstwccrccatattgattctgcwcatgtttacaataatgaggagcaggttggactggccatccgaagcaagattgcagatggcagtgtgaagagagaagacatattctacacttcaaagctttggagcaattcccatcgaccagagttggtccgaccagccttggaaaggtcactgaaaaatcttcaattggaytatgttgacctctatcttattcattttccagtgtctgtaaagccaggtgaggaagtgatcccaaaagatgaaaatggaaaaatactatttgacacagtggatctctgtgccacatgggaggccatggagaagtgtaaagatgcaggattggccaagtccatcggggtgtccaacttcaaccrcaggctgctggagatgatcctcaacragccagggctcaagtacragcctgtctgcaaccaggtggaatgtcatccttacttcaaccagagaaaactgctggatttctgcaagtcaaaagacattgttctggttgcctatagtgctctgggatcccatcgagaagaaccatgggtggacccgaactccccggtgctcttggaggacccagtcctttgtgccttggcaaaaaagcacaagcgaaccccagccctgattgccctgcgctaccagctgcagcgtggggttgtggtcctggccaagagctacaatgagcagcgcatcagacagaacgtgcaggtgttttgctggcccccctaattatccattttctgatgaatattaacatggagggcattgcatgaggtctgccagaaggccctgcrtgtggatggtgacacagaggatggctctatgctggtgactggacacatcgcctctggttaaatctctcctgcttggygayttcagyaagctacagcwaagcccatcggccrgaaargaaagacaataattttgtttttcattttgaaaaaattaaatgctctctcctaaagattcttcacct

SEQ ID NO: 3496 - DNA, 1933 bp, Homo sapiens
gactcggccccgcccacgtcatgcgcccgaggagaacgcggggaccgaactctgctgcagagtttggagcgccgcttcctggcggcgcgtgcactgcgctccttcccctggcagagcttagaagcaaagttaagagactcatcagattctgagctgctgcgggatattttgcagaagactgtgaagcatcctgtgtgtgtgaagcaccggccatcagtcaagtatgcctggtgctttctctcagaactcatcaaaaagacgtgctgtatagcccagaagccatcgtgtcgctggtcggggtcctgcggaggctggctgcctgccgggagcaccagcgggctcctcaagtctatgtggcccttaccgtctgcaacccagagacgtgccagctgttcaccactgagctatgccgggctgggatcagatgggaagtggaacctcgtcatgaccagaaactgtttccctacgaagagcacttggagatggcaatgctgaacctcacactgtaggactcacatacgactccaacgggattgtgagaatcaagtcactctcgtgggaagagtttttatatgggaaagcggataaaactttcattggactggaatgtttggagaatgttaatttccaaatcaggaaccacaaactgccctctaataagacatcggctatctaagcatgtgggtgctccctttctgccagcaattctggttcttaagaaaatcaccatcaatcagacatgaaatctctggctccaaaaatagcattttctttgtgcaaataaaaacgtgtgtatcaagtatgatgttcccccaatgtggacacactcggttccccacaaagccaagcccgctgcagctgccacatccctggacacatttggttcctcacaaagccaagccygctgcagctgccacatccgtggacacactcrgttcttcacaaagccaagcccactgcagctgccacatccctgggcttacrgtgcagcaggtgcttttttcaagacaggaatcaaaatgttaggaacacggcggaaagatgacacctggagagcaaacgcaggatgaggagtactgcagaggtcacacggaagtcgcagaacagtaatccgctagcaggggcatggggcgtgaagaacagaagaagataggaagtgtttccgagcctccagaaaagaaatcagagccaagcacagcttcccgggtcacagaaccaattcatttaccaggcggcaccactgccgtcatttcaccttctggccactgggaggygctgctcgaaagggtttgccctgagactccgagaagaagctgcgggaaggacagcaggggtcccggggttttagcctctggcccaggagttatgtgtccataaccaaatggagcacactctgcacccatctctcatcccatcggagctgctgcgattcccgcaggttcttccggaactggtttagcttgcccgcaggatcaggaaagtttgagaaaagcatctgcaaaaaaataaagagcagagcttaactcatttcctgtccccaccccatcccaggtcaccacctggctgaccccaggtccccgacccaacaacaaaccctcccaagttcctaactccctcacttggactcgagactcttcacgccccagcagcgctccgcctccaacttgacatcacgctttctgtcccactttcccacacttcgtgccctggagcacctcccggcctctacacgctgtatgttcccctgcgagcaccctcctcttggcctctggccaagtcccacccatctgtgggtaacaagggggtgttggtgttcttttcagccttgctaaactgtctgaatcaaggatcacaaactacagcctgcaggccaaatccagcccacagcctgtgtttgtaaataaagttttattggaacaaagccacacccctt

SEQ ID NO: 3497 - DNA, 1423 bp, Homo sapiens
cctagcagccccacacaatacgctcatgtcctgtccccaaacactgccatcctgaaacacatgtcctctgtttccaggccgggctgggatcagatgggaagtggaacctcgtcatgaccagaaactgtttccctacgaagagcacttggagatggcaatgctgaacctcacactgtaggactcacatacgactccaacgggattgtgagaatcaagtcactctcgtgggaagagtttttatatgggaaagcggataaaactttcattggactggaatgtttggagaatgttaatttccaaatcaggaaccacaaactgccctctaataagacatcggctatctaagcatgtgggtgctccctttctgccagcaattctggttcttaagaaaatcaccatcaatcagacatgaaatctctggctccaaaaatagcattttctttgtgcaaataaaaacgtgtgtatcaagtatgatgacacatttggttcctcacaaagccaagccygctgcagctgccacatccgtggacacactcrgttcttcacaaagccaagcccactgcagctgccacatccctgggcttacrgtgcagcaggtgcttttttcaagacaggaatcaaaatgttaggaacacggcggaaagatgacacctggagagcaaacgcaggatgaggagtactgcagaggtcacacggaagtcgcagaacagtaatccgctagcaggggcatggggcgtgaagaacagaagaagataggaagtgtttccgagcctccagaaaagaaatcagagccaagcacagcttcccgggtcacagaaccaattcatttaccaggcggcaccactgccgtcatttcaccttctggccactgggaggygctgctcgaaagggtttgccctgagactccgagaagaagctgcgggaaggacagcaggggtcccggggttttagcctctggcccaggagttatgtgtccataaccaaatggagcacactctgcacccatctctcatcccatcggagctgctgcgattcccgcaggttcttccggaactggtttagcttgcccgcaggatcaggaaagtttgagaaaagcatctgcaaaaaaataaagagcagagcttaactcatttcctgtccccaccccatcccaggtcaccacctggctgaccccaggtccccgacccaacaacaaaccctcccaagttcctaactccctcacttggactcgagactcttcacgccccagcagcgctccgcctccaacttgacatcacgctttctgtcccactttcccacacttcgtgccctggagcacctcccggcctctacacgctgtatgttcccctgcgagcaccctcctcttggcctctggccaagtcccacccatctgtgggtaacaagggggtgttggtgttctttt

SEQ ID NO: 3498 - DNA, 1384 bp, Homo sapiens
cctagcagccccacacaatacgctcatgtcctgtccccaaacactgccatcctgaaacacatgtcctctgtttccaggccgggctgggatcagatgggaagtggaacctcgtcatgaccagaaactgtttccctacgaagagcacttggagatggcaatgctgaacctcacactgtaggactcacatacgactccaacgggattgtgagaatcaagtcactctcgtgggaagagtttttatatgggaaagcggataaaactttcattggactggaatgtttggagaatgttaatttccaaatcaggaaccacaaactgccctctaataagacatcggctatctaagcatgtgggtgctccctttctgccagcaattctggttcttaagaaaatcaccatcaatcagacatgaaatctctggctccaaaaatagcattttctttgtgcaaataaaaacgtgtgtatcaagtatgatgttcccccaattggacacactcrgttcttcacaaagccaagcccactgcagctgccacatccctgggcttacrgtgcagcaggtgcttttttcaagacaggaatcaaaatgttaggaacacggcggaaagatgacacctggagagcaaacgcaggatgaggagtactgcagaggtcacacggaagtcgcagaacagtaatccgctagcaggggcatggggcgtgaagaacagaagaagataggaagtgtttccgagcctccagaaaagaaatcagagccaagcacagcttcccgggtcacagaaccaattcatttaccaggcggcaccactgccgtcatttcaccttctggccactgggaggygctgctcgaaagggtttgccctgagactccgagaagaagctgcgggaaggacagcaggggtcccggggttttagcctctggcccaggagttatgtgtccataaccaaatggagcacactctgcacccatctctcatcccatcggagctgctgcgattcccgcaggttcttccggaactggtttagcttgcccgcaggatcaggaaagtttgagaaaagcatctgcaaaaaaataaagagcagagcttaactcatttcctgtccccaccccatcccaggtcaccacctggctgaccccaggtccccgacccaacaacaaaccctcccaagttcctaactccctcacttggactcgagactcttcacgccccagcagcgctccgcctccaacttgacatcacgctttctgtcccactttcccacacttcgtgccctggagcacctcccggcctctacacgctgtatgttcccctgcgagcaccctcctcttggcctctggccaagtcccacccatctgtgggtaacaagggggtgttggtgttctttt

SEQ ID NO: 3499 - DNA, 1853 bp, Homo sapiens
gactcggccccgcccacgtcatgcgcccgaggagaacgcggggaccgaactctgctgcagagtttggagcgccgcttcctggcggcgcgtgcactgcgctccttcccctggcagagcttagaagcaaagttaagagactcatcagattctgagctgctgcgggatattttgcagaagcacgaggctgtccacacagagcctttggacgagctgtacgaggtgctggcggagaccctgatggccaaggagtccacccagggccaccggagctatttgctgacgtgctgtatagcccagaagccatcgtgtcgctggtcggggtcctgcggaggctggctgcctgccgggagcaccagcgggctcctcaagtctatgtggcccttaccgtctgcaacccagagacgtgccagctgttcaccactgagctatgccgggctgggatcagatgggaagtggaacctcgtcatgaccagaaactgtttccctacgaagagcacttggagatggcaatgctgaacctcacactgtaggactcacatacgactccaacgggattgtgagaatcaagtcactctcgtgggaagagtttttatatgggaaagcggataaaactttcattggactggaatgtttggagaatgttaatttccaaatcaggaaccacaaactgccctctaataagacatcggctatctaagcatgtgggtgctccctttctgccagcaattctggttcttaagaaaatcaccatcaatcagacatgaaatctctggctccaaaaatagcattttctttgtgcaaataaaaacgtgtgtatcaagtatgatggacacactcggttccccacaaagccaagcccgctgcagctgccacatccctggacacatttggttcctcacaaagccaagccygctgcagctgccacatccgtggacacactcrgttcttcacaaagccaagcccactgcagctgccacatccctgggcttacrgtgcagcaggtgcttttttcaagacaggaatcaaaatgttaggaacacggcggaaagatgacacctggagagcaaacgcaggatgaggagtactgcagaggtcacacggaagtcgcagaacagtaatccgctagcaggggcatggggcgtgaagaacagaagaaccaggcggcaccactgccgtcatttcaccttctggccactgggaggygctgctcgaaagggtttgccctgagactccgagaagaagctgcgggaaggacagcaggggtcccggggttttagcctctggcccaggagttatgtgtccataaccaaatggagcacactctgcacccatctctcatcccatcggagctgctgcgattcccgcaggttcttccggaactggtttagcttgcccgcaggatcaggaaagtttgagaaaagcatctgcaaaaaaataaagagcagagcttaactcatttcctgtccccaccccatcccaggtcaccacctggctgaccccaggtccccgacccaacaacaaaccctcccaagttcctaactccctcacttggactcgagactcttcacgccccagcagcgctccgcctccaacttgacatcacgctttctgtcccactttcccacacttcgtgccctggagcacctcccggcctctacacgctgtatgttcccctgcgagcaccctcctcttggcctctggccaagtcccacccatctgtgggtaacaagggggtgttggtgttcttttcagccttgctaaactgtctgaatcaaggatcacaaactacagcctgcaggccaaatccagcccacagcctgtgtttgtaaataaagttttattggaacaaagcc

SEQ ID NO: 3500 - DNA, 5171 bp, Homo sapiens
tcccgctcgtctgccgcctcagcctcagccccaacctcagccgccgccgttgcgcttgctcccgggcggtcctggcctgtgccgccgccgcccccagcgtcggagccatggcgggcgccgcgtccccttgcgccaacggctgcgggcccggcgcgccctcggacgccgaggtgctgcacctctgccgcagcctcgaggtgggcaccgtcatgactttgttctactccaagaagtcgcagcgacccgagcggaagaccttccaggtcaagctggagacgcgccagatcacgtggagccggggcgccgacaagatcgagggggccattgacattcgtgaaattaaggagatccgcccagggaagacctcacgggactttgatcgctatcaagaggacccagctttccggccggaccagtcacattgctttgtcattctctatggaatggaatttcgcctgaaaacgctgagcctgcaagccacatctgaggatgaagtgaacatgtggatcaagggcttaacttggctgatggaggatacattgcaggcacccacacccctgcagattgagaggtggctccggaagcagttttactcagtggatcggaatcgtgaggatcgtatatcagccaaggacctgaagaacatgctgtcccaggtcaactaccgggtccccaacatgcgcttcctccgagagcggctgacggacctggagcagcgcagcggggacatcamctacgggcagtttgctcagctgtaccgcagcctcatgtacagcgcccagaagacgatggacctccccttcttggaagccagtactctgagggctggggagcggccggagctttgccgagtgtcccttcctgagttccagcagttccttcttgactaccagggggagctgtgggctgttgatcgcctccaggtgcaggagttcatgctcrgcttcctccgagaccccttacgagagatcgaggagccatacttcttcctggatgagtttgtcaccttcctgttctccaaagagaacagtgtgtggaactcgcagctggatgcagtatgcccggacaccatgaacaaccctctttcccactactggatctcctcctcgcacaacacgtacctgaccggggaccagttctccagtgagtcctccttggaagcctatgctcgctgcctgcggatgggctgtcgctgcattgagttggactgctgggacggcccggaagttctcagatgtcctgcacaccatcaaggagcatgcctttgtggcctcagagtacccagtcatcctgtccattgaggaccactgcagcattgcccagcagagaaacatggcccaatacttcaagaaggtgctgggggacacactcctcaccaagcccgtggagatctctgccgacgggctcccctcacccaaccagcttaagaggaagatcctcatcaagcacaagaagctggctgagggcagtgcctacgaggaggtgcctacatccatgatgtactctgagaacgacatcagcaactctatcaagaatggcatcctctacctggaggaccctgtgaaccacgaatggtatccccactactttgttctgaccagcagcaagatctactactctgaggagaccagcagtgaccagggcaacgaggatgaggaggagcccaaggaggtcagcagcagcacagagctgcactccaatgagaagtggttccatgggaagctaggggcagggcgtgacgggcgtcacatcgctgagcgcctgcttactgagtactgcatcgagaccggagcccctgacggctccttcctcgtgcgagagagtgagaccttcgtgggcgactacacgctctctttctggcggaacgggaaagtccagcactgccgtatccactcccggcaagatgctgggacccccaagttcttcttgacagacaacctcgtctttgactccctctatgacctcatcacgcactaccagcaggtgcccctgcgctgtaatgagtttgagatgcgactttcagagcctgtcccacagaccaacgcccacgagagcaaagagtggtaccacgcgagcctgaccagagcacaggctgagcacatgctaatgcgcgtccctcgtgatggggccttcctggtgcggaagcggaatgaacccaactcatatgccatctctttccgggctgagggcaagatcaagcattgccgtgtccagcaagagggccagacagtgatgctagggaactcggagttcgacagccttgttgacctcatcagctactatgagaaacacccgctataccgcaagatgaagctgcgctatcccatcaacgaggaggcactggagaagattggcacagctgagcctgactacggggccctgtatgagggacgcaaccctggcttctatgtagaggcaaaccctatgccaactttcaagtgtgcagtcaaagccctctttgactacaaggcccagagggaggacgagctgaccttcaycaagagcgccatcatccagaatgtggagaagcaagagggaggctggtggcgaggggactacggagggaagaagcagctgtggttcccatcaaactacgtggaagagatggtcaaccccgtggccctggagccggagagggagcacttggacgagaacagccccctaggggacttgctgcggggggtcttggatgtgccggcttgtcagattgccatccgtcctgagggcaagaacaaccggctcttcgtcttctccatcagcatggcgtcggtggcccactggtccctggatgttgctgccgactcacaggaggagctgcaggactgggtgaaaaagatccgtgaagtggcccagacagcagacgccaggctcactgaagggaagataatggaacggaggaagaagaytgccctggagctctctgaacttgtcgtctactgccggcctgttccctttgatgaagagaagattggcacagaacgtgcttgctaccgggacatgtcatccttcccggaaaccaaggctgagaaataygtgaacaaggccaaaggcaagaagttccttcagtacaatcgactgcagctctcccgcatctaccccaagggccagcgactggattcctccaactacgatcctttgcccatgtggatctgtggcagtcagcttgtggccctcaacttccagacccctgacaagcctatgcagatgaaccaggccctcttcatgacgggcaggcactgtggctacgtgctgcagccaagcaccatgcgggatgaggccttcgacccctttgacaagagcagcctccgcgggctggagccatgtgccatctctattgaggtgctgggggcccgacatctgccaaagaatggccgaggcattgtgtgtccttttgtggagattgaggtggctggagctgagtatgacagcaccaagcagaagacagagtttgtggtggacaatggactcaaccctgtatggccagccaagcccttccacttccagatcagtaaccctgaatttgcctttctgcgcttcgtggtgtatgaggaagacatgtttagtgaccagaatttcctggctcaggctactttcccagtaaaaggcctgaagacaggatacagagcagtgcctttgaagaacaactacagtgaggacctggagttggcctccctgctgatcaagattgacattttccctgccaagcaggagaatggtgacctcagtcccttcagtggtacgtccctgcgggagcgkggctcagatgcctcaggccagctgtttcatggccgagcccgggaaggctcctttgaatcccgctaccagcagccgtttgaggacttccgcatctcccaggagcatctcgcagaccattttgacagtcgagaacgaagtaaggacactcttcccttctgtccagggccccaagaaggactcgggtcaatggagacaaccgcctctagttgtaccccagcctcgttggagagcagcaggtrctgtgcgccttgtagaatgccgcgaactgggttctttggaagcagccccctgtggcggccttccgggtctcgcagcctgaagcctggattccagcagtgaatgctagacagaaaccaagccattaatgagatgttattactgttttgggcctccatgccccagctctggatgaaggcaaaaactgtactgtgtttcgcattaagcacacacatctggccctgacttctggagatggatccttccatcttgtggggccaggaccatggccgaagccccttggagagagaggctgcctcagccagtggcacaggagactccaaggagctactgacattcctaagagtggaggaggaggaggagccttgctgggccagggaaacaaagtttacattgtcctgtagctttaaaaccacagctgggcagggtgagaagctagatgcccctgcagtttggccctggagccagggcagaggaatgtagggcctgcatggagaagggttctgccctgcctgaggaggaggacacagcacaagggcacattgcccatggctgggaacatgacccagcctgaaagatacaggggatcatgttaaaaatagcagtattatttttcgtctcaatggtattgtaactaagttatttactcctcctgctcctcacccctgtagggaaaccttggagaggagagtggcaggtgggctgcctgctgtgttaagaggacttagtttgtgatgtaaggcactgtcaggaatggggggcgggccagggtgggaagagaagaaatagcagagcctattttggtgaggttttttgtttttaagtcaaagaagactcagtatgctttccctgaggaatgaaaaagggattgaggagttgcctgactcctgggtgggtggggtacaggcagttaggtgctgaatgaagctgccatccttgctgcagcttctaactggtaaaaagatccagggatggagatgggaaggttagaaaggcagccctcacctctgaggacagaggccggggtccaggcccgtgggcgcaaaggtgcctcatagcatagccagcattcagcacacacaaacctactgcccacatttgggctcagggttggccatttgctagttctgctgccctcttaagatctgactgccaaataaatcatcctcatgtccttt

SEQ ID NO: 3501 - DNA, 3257 bp, Homo sapiens
tcccgctcgtctgccgcctcagcctcagccccaacctcagccgccgccgttgcgcttgctcccgggcggtcctggcctgtgccgccgccgcccccagcgtcggagccatggcgggcgccgcgtccccttgcgccaacggctgcgggcccggcgcgccctcggacgccgaggtgctgcacctctgccgcagcctcgaggtgggcaccgtcatgactttgttctactccaagaagtcgcagcgacccgagcggaagaccttccaggtcaagctggagacgcgccagatcacgtggagccggggcgccgacaagatcgagggggccattgacattcgtgaaattaaggagatccgcccagggaagacctcacgggactttgatcgctatcaagaggacccagctttccggccggaccagtcacattgctttgtcattctctatggaatggaatttcgcctgaaaacgctgagcctgcaagccacatctgaggatgaagtgaacatgtggatcaagggcttaacttggctgatggaggatacattgcaggcacccacacccctgcagattgagaggtggctccggaagcagttttactcagtggatcggaatcgtgaggatcgtatatcagccaaggacctgaagaacatgctgtcccaggtcaactaccgggtccccaacatgcgcttcctccgagagcggctgacggacctggagcagcgcagcggggacatcamctacgggcagtttgctcagctgtaccgcagcctcatgtacagcgcccagaagacgatggacctccccttcttggaagccagtactctgagggctggggagcggccggagctttgccgagtgtcccttcctgagttccagcagttccttcttgactaccagggggagctgtgggctgttgatcgcctccaggtgcaggagttcatgctcrgcttcctccgagaccccttacgagagatcgaggagccatacttcttcctggatgagtttgtcaccttcctgttctccaaagagaacagtgtgtggaactcgcagctggatgcagtatgcccggacaccatgaacaaccctctttcccactactggatctcctcctcgcacaacacgtacctgaccggggaccagttctccagtgagtcctccttggaagcctatgctcgctgcctgcggatgggctgtcgctgcattgagttggactgctgggacggcccggaagttctcagatgtcctgcacaccatcaaggagcatgcctttgtggcctcagagtacccagtcatcctgtccattgaggaccactgcagcattgcccagcagagaaacatggcccaatacttcaagaaggtgctgggggacacactcctcaccaagcccgtggagatctctgccgacgggctcccctcacccaaccagcttaagaggaagatcctcatcaagcacaagaagctggctgagggcagtgcctacgaggaggtgcctacatccatgatgtactctgagaacgacatcagcaactctatcaagaatggcatcctctacctggaggaccctgtgaaccacgaatggtatccccactactttgttctgaccagcagcaagatctactactctgaggagaccagcagtgaccagggcaacgaggatgaggaggagcccaaggaggtcagcagcagcacagagctgcactccaatgagaagtggttccatgggaagctaggggcagggcgtgacgggcgtcacatcgctgagcgcctgcttactgagtactgcatcgagaccggagcccctgacggctccttcctcgtgcgagagagtgagaccttcgtgggcgactacacgctctctttctggcggaacgggaaagtccagcactgccgtatccactcccggcaagatgctgggacccccaagttcttcttgacagacaacctcgtctttgactccctctatgacctcatcacgcactaccagcaggtgcccctgcgctgtaatgagtttgagatgcgactttcagagcctgtcccacagaccaacgcccacgagagcaaagagtggtaccacgcgagcctgaccagagcacaggctgagcacatgctaatgcgcgtccctcgtgatggggccttcctggtgcggaagcggaatgaacccaactcatatgccatctctttccgggctgagggcaagatcaagcattgccgtgtccagcaagagggccagacagtgatgctagggaactcggagttcgacagccttgttgacctcatcagctactatgagaaacacccgctataccgcaagatgaagctgcgctatcccatcaacgaggaggcactggagaagattggcacagctgagcctgactacggggccctgtatgagggacgcaaccctggcttctatgtagaggcaaaccctatgccaactttcaagtgtgcagtcaaagccctctttgactacaaggcccagagggaggacgagctgaccttcaycaagagcgccatcatccagaatgtggagaagcaagagggaggctggtggcgaggggactacggagggaagaagcagctgtggttcccatcaaactacgtggaagagatggtcaaccccgtggccctggagccggagagggagcacttggacgagaacagccccctaggggacttgctgcggggggtcttggatgtgccggcttgtcagattgccatccgtcctgagggcaagaacaaccggctcttcgtcttctccatcagcatggcgtcggtggcccactggtccctggatgttgctgccgactcacaggaggagctgcaggactgggtgaaaaagatccgtgaagtggcccagacagcagacgccagggtgagattctgctggaaccttctggggggcagtgtgtgggcccgtcaggcagctgaggcctccagctcccagcacaggccccctcagagcagtggggcagccgatggcctatgctagataggccacagcccctgccttagctagggattgagaagaaacagacwcataagatgcaatgtggtgtgtttaggttgtgttgagtttgagatactgatgggtcgttgaagtgggtctgcttagtgggcaattggatacacaagaccagaggtaagaggagaagtcctgggctggaagcaggagtggagtgggggctgaggcatagaagggatgaggtggtgtcgcataggaagagaacttgggatggattgagaagctccatatgagaaggc

SEQ ID NO: 3502 - DNA, 5189 bp, Homo sapiens
tcccgctcgtctgccgcctcagcctcagccccaacctcagccgccgccgttgcgcttgctcccgggcggtcctggcctgtgccgccgccgcccccagcgtcggagccatggcgggcgccgcgtccccttgcgccaacggctgcgggcccggcgcgccctcggacgccgaggtgctgcacctctgccgcagcctcgaggtgggcaccgtcatgactttgttctactccaagaagtcgcagcgacccgagcggaagaccttccaggtcaagctggagacgcgccagatcacgtggagccggggcgccgacaagatcgagggggccattgacattcgtgaaattaaggagatccgcccagggaagacctcacgggactttgatcgctatcaagaggacccagctttccggccggaccagtcacattgctttgtcattctctatggaatggaatttcgcctgaaaacgctgagcctgcaagccacatctgaggatgaagtgaacatgtggatcaagggcttaacttggctgatggaggatacattgcaggcacccacacccctgcagattgagaggtggctccggaagcagttttactcagtggatcggaatcgtgaggatcgtatatcagccaaggacctgaagaacatgctgtcccaggtcaactaccgggtccccaacatgcgcttcctccgagagcggctgacggacctggagcagcgcagcggggacatcamctacgggcagtttgctcagctgtaccgcagcctcatgtacagcgcccagaagacgatggacctccccttcttggaagccagtactctgagggctggggagcggccggagctttgccgagtgtcccttcctgagttccagcagttccttcttgactaccagggggagctgtgggctgttgatcgcctccaggtgcaggagttcatgctcrgcttcctccgagaccccttacgagagatcgaggagccatacttcttcctggatgagtttgtcaccttcctgttctccaaagagaacagtgtgtggaactcgcagctggatgcagtatgcccggacaccatgaacaaccctctttcccactactggatctcctcctcgcacaacacgtacctgaccggggaccagttctccagtgagtcctccttggaagcctatgctcgctgcctgcggatgggctgtcgctgcattgagttggactgctgggacggcccggatgggatgccagttatttaccatgggcacacccttaccaccaagatcaagttctcagatgtcctgcacaccatcaaggagcatgcctttgtggcctcagagtacccagtcatcctgtccattgaggaccactgcagcattgcccagcagagaaacatggcccaatacttcaagaaggtgctgggggacacactcctcaccaagcccgtggagatctctgccgacgggctcccctcacccaaccagcttaagaggaagatcctcatcaagcacaagaagctggctgagggcagtgcctacgaggaggtgcctacatccatgatgtactctgagaacgacatcagcaactctatcaagaatggcatcctctacctggaggaccctgtgaaccacgaatggtatccccactactttgttctgaccagcagcaagatctactactctgaggagaccagcagtgaccagggcaacgaggatgaggaggagcccaaggaggtcagcagcagcacagagctgcactccaatgagaagtggttccatgggaagctaggggcagggcgtgacgggcgtcacatcgctgagcgcctgcttactgagtactgcatcgagaccggagcccctgacggctccttcctcgtgcgagagagtgagaccttcgtgggcgactacacgctctctttctggcggaacgggaaagtccagcactgccgtatccactcccggcaagatgctgggacccccaagttcttcttgacagacaacctcgtctttgactccctctatgacctcatcacgcactaccagcaggtgcccctgcgctgtaatgagtttgagatgcgactttcagagcctgtcccacagaccaacgcccacgagagcaaagagtggtaccacgcgagcctgaccagagcacaggctgagcacatgctaatgcgcgtccctcgtgatggggccttcctggtgcggaagcggaatgaacccaactcatatgccatctctttccgggctgagggcaagatcaagcattgccgtgtccagcaagagggccagacagtgatgctagggaactcggagttcgacagccttgttgacctcatcagctactatgagaaacacccgctataccgcaagatgaagctgcgctatcccatcaacgaggaggcactggagaagattggcacagctgagcctgactacggggccctgtatgagggacgcaaccctggcttctatgtagaggcaaaccctatgccaactttcaagtgtgcagtcaaagccctctttgactacaaggcccagagggaggacgagctgaccttcaycaagagcgccatcatccagaatgtggagaagcaagagggaggctggtggcgaggggactacggagggaagaagcagctgtggttcccatcaaactacgtggaagagatggtcaaccccgtggccctggagccggagagggagcacttggacgagaacagccccctaggggacttgctgcggggggtcttggatgtgccggcttgtcagattgccatccgtcctgagggcaagaacaaccggctcttcgtcttctccatcagcatggcgtcggtggcccactggtccctggatgttgctgccgactcacaggaggagctgcaggactgggtgaaaaagatccgtgaagtggcccagacagcagacgccaggctcactgaagggaagataatggaacggaggaagaagaytgccctggagctctctgaacttgtcgtctactgccggcctgttccctttgatgaagagaagattggcacagaacgtgcttgctaccgggacatgtcatccttcccggaaaccaaggctgagaaataygtgaacaaggccaaaggcaagaagttccttcagtacaatcgactgcagctctcccgcatctaccccaagggccagcgactggattcctccaactacgatcctttgcccatgtggatctgtggcagtcagcttgtggccctcaacttccagacccctgacaagcctatgcagatgaaccaggccctcttcatgacgggcaggcactgtggctacgtgctgcagccaagcaccatgcgggatgaggccttcgacccctttgacaagagcagcctccgcgggctggagccatgtgccatctctattgaggtgctgggggcccgacatctgccaaagaatggccgaggcattgtgtgtccttttgtggagattgaggtggctggagctgagtatgacagcaccaagcagaagacagagtttgtggtggacaatggactcaaccctgtatggccagccaagcccttccacttccagatcagtaaccctgaatttgcctttctgcgcttcgtggtgtatgaggaagacatgtttagtgaccagaatttcctggctcaggctactttcccagtaaaaggcctgaagacaggatacagagcagtgcctttgaagaacaactacagtgaggacctggagttggcctccctgctgatcaagattgacattttccctgccaaggagaatggtgacctcagtcccttcagtggtacgtccctgcgggagcgkggctcagatgcctcaggccagctgtttcatggccgagcccgggaaggctcctttgaatcccgctaccagcagccgtttgaggacttccgcatctcccaggagcatctcgcagaccattttgacagtcgagaacgaagggccccaagaaggactcgggtcaatggagacaaccgcctctagttgtaccccagcctcgttggagagcagcaggtrctgtgcgccttgtagaatgccgcgaactgggttctttggaagcagccccctgtggcggccttccgggtctcgcagcctgaagcctggattccagcagtgaatgctagacagaaaccaagccattaatgagatgttattactgttttgggcctccatgccccagctctggatgaaggcaaaaactgtactgtgtttcgcattaagcacacacatctggccctgacttctggagatggatccttccatcttgtggggccaggaccatggccgaagccccttggagagagaggctgcctcagccagtggcacaggagactccaaggagctactgacattcctaagagtggaggaggaggaggagccttgctgggccagggaaacaaagtttacattgtcctgtagctttaaaaccacagctgggcagggtgagaagctagatgcccctgcagtttggccctggagccagggcagaggaatgtagggcctgcatggagaagggttctgccctgcctgaggaggaggacacagcacaagggcacattgcccatggctgggaacatgacccagcctgaaagatacaggggatcatgttaaaaatagcagtattatttttcgtctcaatggtattgtaactaagttatttactcctcctgctcctcacccctgtagggaaaccttggagaggagagtggcaggtgggctgcctgctgtgttaagaggacttagtttgtgatgtaaggcactgtcaggaatggggggcgggccagggtgggaagagaagaaatagcagagcctattttggtgaggttttttgtttttaagtcaaagaagactcagtatgctttccctgaggaatgaaaaagggattgaggagttgcctgactcctgggtgggtggggtacaggcagttaggtgctgaatgaagctgccatccttgctgcagcttctaactggtaaaaagatccagggatggagatgggaaggttagaaaggcagccctcacctctgaggacagaggccggggtccaggcccgtgggcgcaaaggtgcctcatagcatagccagcattcagcacacacaaacctactgcccacatttgggctcagggttggccatttgctagttctgctgccctcttaagatctgactgccaaataaatcatcctcatgtccttt

SEQ ID NO: 3503 - DNA, 4474 bp, Homo sapiens
tcccgctcgtctgccgcctcagcctcagccccaacctcagccgccgccgttgcgcttgctcccgggcggtcctggcctgtgccgccgccgcccccagcgtcggagccatggcgggcgccgcgtccccttgcgccaacggctgcgggcccggcgcgccctcggacgccgaggtgctgcacctctgccgcagcctcgaggtgggcaccgtcatgactttgttctactccaagaagtcgcagcgacccgagcggaagaccttccaggtcaagctggagacgcgccagatcacgtggagccggggcgccgacaagatcgagggggccattgacattcgtgaaattaaggagatccgcccagggaagacctcacgggactttgatcgctatcaagaggacccagctttccggccggaccagtcacattgctttgtcattctctatggaatggaatttcgcctgaaaacgctgagcctgcaagccacatctgaggatgaagtgaacatgtggatcaagggcttaacttggctgatggaggatacattgcaggcacccacacccctgcagattgagaggtggctccggaagcagttttactcagtggatcggaatcgtgaggatcgtatatcagccaaggacctgaagaacatgctgtcccaggtcaactaccgggtccccaacatgcgcttcctccgagagcggctgacggacctggagcagcgcagcggggacatcamctacgggcagtttgctcagctgtaccgcagcctcatgtacagcgcccagaagacgatggacctccccttcttggaagccagtactctgagggctggggagcggccggagctttgccgagtgtcccttcctgagttccagcagttccttcttgactaccagggggagctgtgggctgttgatcgcctccaggtgcaggagttcatgctcrgcttcctccgagaccccttacgagagatcgaggagccatacttcttcctggatgagtttgtcaccttcctgttctccaaagagaacagtgtgtggaactcgcagctggatgcagtatgcccggacaccatgaacaaccctctttcccactactggatctcctcctcgcacaacacgtacctgaccggggaccagttctccagtgagtcctccttggaagcctatgctcgctgcctgcggatgggctgtcgctgcattgagttggactgctgggacggcccggatgggatgccagttatttaccatgggcacacccttaccaccaagatcaagttctcagatgtcctgcacaccatcaaggagcatgcctttgtggcctcagagtacccagtcatcctgtccattgaggaccactgcagcattgcccagcagagaaacatggcccaatacttcaagaaggtgctgggggacacactcctcaccaagcccgtggagatctctgccgacgggctcccctcacccaaccagcttaagaggaagatcctcatcaagcacaagaagctggctgagggcagtgcctacgaggaggtgcctacatccatgatgtactctgagaacgacatcagcaactctatcaagaatggcatcctctacctggaggaccctgtgaaccacgaatggtatccccactactttgttctgaccagcagcaagatctactactctgaggagaccagcagtgaccagggcaacgaggatgaggaggagcccaaggaggtcagcagcagcacagagctgcactccaatgagaagtggttccatgggaagctaggggcagggcgtgacgggcgtcacatcgctgagcgcctgcttactgagtactgcatcgagaccggagcccctgacggctccttcctcgtgcgagagagtgagaccttcgtgggcgactacacgctctctttctggcggaacgggaaagtccagcactgccgtatccactcccggcaagatgctgggacccccaagttcttcttgacagacaacctcgtctttgactccctctatgacctcatcacgcactaccagcaggtgcccctgcgctgtaatgagtttgagatgcgactttcagagcctgtcccacagaccaacgcccacgagagcaaagagtggtaccacgcgagcctgaccagagcacaggctgagcacatgctaatgcgcgtccctcgtgatggggccttcctggtgcggaagcggaatgaacccaactcatatgccatctctttccgggctgagggcaagatcaagcattgccgtgtccagcaagagggccagacagtgatgctagggaactcggagttcgacagccttgttgacctcatcagctactatgagaaacacccgctataccgcaagatgaagctgcgctatcccatcaacgaggaggcactggagaagattggcacagctgagcctgactacggggccctgtatgagggacgcaaccctggcttctatgtagaggcaaaccctatgccaactttcaagtgtgcagtcaaagccctctttgactacaaggcccagagggaggacgagctgaccttcaycaagagcgccatcatccagaatgtggagaagcaagagggaggctggtggcgaggggactacggagggaagaagcagctgtggttcccatcaaactacgtggaagagatggtcaaccccgtggccctggagccggagagggagcacttggacgagaacagccccctaggggacttgctgcggggggtcttggatgtgccggcttgtcagattgccatccgtcctgagggcaagaacaaccggctcttcgtcttctccatcagcatggcgtcggtggcccactggtccctggatgttgctgccgactcacaggaggagctgcaggactgggtgaaaaagatccgtgaagtggcccagacagcagacgccaggctcactgaagggaagataatggaacggaggaagaagaytgccctggagctctctgaacttgtcgtctactgccggcctgttccctttgatgaagagaagattggcacagaacgtgcttgctaccgggacatgtcatccttcccggaaaccaaggctgagaaataygtgaacaaggccaaaggcaagaagttccttcagtacaatcgactgcagctctcccgcatctaccccaagggccagcgactggattcctccaactacgatcctttgcccatgtggatctgtggcagtcagcttgtggccctcaacttccagacccctgacaagcctatgcagatgaaccaggccctcttcatgacgggcaggcactgtggctacgtgctgcagccaagcaccatgcgggatgaggccttcgacccctttgacaagagcagcctccgcgggctggagccatgtgccatctctattgaggtgctgggggcccgacatctgccaaagaatggccgaggcattgtgtgtccttttgtggagattgaggtggctggagctgagtatgacagcaccaagcagaagacagagtttgtggtggacaatggactcaaccctgtatggccagccaagcccttccacttccagatcagtaaccctgaatttgcctttctgcgcttcgtggtgtatgaggaagacatgtttagtgaccagaatttcctggctcaggctactttcccagtaaaaggcctgaagacaggatacagagcagtgcctttgaagaacaactacagtgaggacctggagttggcctccctgctgatcaagattgacattttccctgccaaggagaatggtgacctcagtcccttcagtggtacgtccctgcgggagcgkggctcagatgcctcaggccagctgtttcatggccgagcccgggaaggctcctttgaatcccgctaccagcagccgtttgaggacttccgcatctcccaggagcatctcgcagaccattttgacagtcgagaacgaagggccccaagaaggactcgggtcaatggagacaaccgcctctagttgtaccccagcctcgttggagagcagcaggtrctgtgcgccttgtagaatgccgcgaactgggttctttggaagcagccccctgtggcggccttccgggtctcgcagcctgaagcctggattccagcagtgaatgctagacagaaaccaagccattaatgagatgttattactgttttgggcctccatgccccagctctggatgaaggcaaaaactgtactgtgtttcgcattaagcacacacatctggccctgacttctggagatggatccttccatcttgtggggccaggaccatggccgaagcagccctcacctctgaggacagaggccggggtccaggcccgtgggcgcaaaggtgcctcatagcatagccagcattcagcacacacaaacctactgcccacatttgggctcagggttggccatttgctagttctgctgccctcttaagatctgactgccaaataaatcatcctcatgtcctttttcct

SEQ ID NO: 3504 - DNA, 1283 bp, Homo sapiens
atggcttttccctgccgcaggtccctgactgccaagactctggcctgcctcctggtgggcgtgagtttcttagcactgcagcagtggttcctccaggcgccaaggtccccgcgggaggagaggtccccgcaggaggagacgccagagggtcccaccgacgctcccgcggctgacgagccgccctcggagctcgtccccgggcccccgtgcgtggcgaacgcctcggcgaacgccacggccgacttcgagcagctgcccgcgcgcatccaggacttcctgcggtaccgccactgccgccacttcccgctgctttgggacgcaccggccaagtgcgccggcggccgaggcgtgttcctgctcctggcggtgaagtcggcgcctgagcactacgagcgacgcgagctcatccggcgcacgtgggggcaagagcgcagctacggcgggcggccagtgcgccgcctctttctattgggcaccccgggccccgaggacgaggcgcgcgcggagcggctggcggagctggtggcgctggaggcgcgcgagcacggcgacgtgctgcagtgggccttcgcggacaccttcctcaacctcacgctcaagcacctgcacttgctcgactggctggctgcacgctgcccgcacgcgcgctttctgctcagcggcgacgacgacgtgttcgtgcacaccgccaacgtagtccgcttcctgcaggcgcagccacccggccgccacctgttctccggccagctcatggagggctccgtgcccatccgcgacagctggagcaagtacttcgtgccgccgcagctcttccccgggtccgcttacccggtgtactgcagcggcggcggcttcctcctgtccggccccacggcccgggccctgcgcgcggccgcccgccacaccccgctcttccccatcgacgacgcctacatgggcatgtgtctggagcgcgccggcctggcgcccagcggccacgagggcatccgrcccttcggcgtgcagctgcctggcgcacagcagtcctccttcgacccctgcatgtaccgcgagttgctgctagtgcaccgcttcgcgccctacgagatgctgctcatgtggaaggcgctgcacagccccgcgctcagctgtgaccggggacaccgggtctcctgaggccagttgggcggcttcagccccgggcctccaaccatgtccatgctgagaaggcagctttcccgctctgggtaccttacgtcctgcccagctctgtgcacctgaaccccagctgcgcactgaaatca

SEQ ID NO: 3505 - DNA, 246 bp, Homo sapiens
gaatcccagagaaggagaagcccctgtcaaccttttattgggagtggaacacatgaggttcagctcgtgccgggcactgtacattcactgaagcagctcaaggggctcagccccgmcactgacgccacactgagcaggatgcacggcccggggctcacactgtccatggaggaggtggggtcagcccgaggtgggcggatggtggcccgagacaccgagagcttggttctgggactgtggctcagc

SEQ ID NO: 3506 - DNA, 1933 bp, Homo sapiens
cgcgctcaggcgcctgcgctttagctgctaactcgctctagtagctgtggtcggggctcgggaccggctgccatcttagtctagggactgaggagtcgccgccgccccgagtcccggtaccatgcatttcacrgtggccttgtggagacaacgccttaacccaaggaagtgactcaaactgtgagaacttcaggttttccaacctattggtggtatgtctgacagtggatcacaacttggttcaatgggtagcctcaccatgaaatcacagcttcagatcactgtcatctcagcaaaacttaaggaaaataagaagaattggtttggaccaagtccttacgtagaggtcacagtagatggacagtcaaagaagacagaaaaatgcaacaacacaaacagtcccaagtggaagcaaccccttacagttatcgttacccctgtgagtaaattacattttcgtgtgtggagtcaccagacactgaaatctgatgttttgttgggaactgctgcattagatatttatgaaacattaaagtcaaacaatatgaaacttgaagaagtagttgtgactttgcagcttggaggtgacaaagagccaacagagacaataggagacttgtcaatttgtcttgatgggctacagttagagtctgaagttgttaccaatggtgaaactacatgttcagaaagtgcttctcagaatgatgatggctccagatccaaggatgaaacaagagtgagcacaaatggatcagatgaccctgaagatgcaggagctggtgaaaataggagagtcagtgggaataattctccatcactctcaaatggtggttttaaaccttctagacctccaagaccttcacgaccaccaccacccaccccacgtagaccagcatctgtcaatggttcaccatctgccacttctgaaagtgatgggtctagtacaggctctctgccgccgacaaatacaaatacaaatacatctgaaggagcaacatctggattaataattcctcttactatatctggaggctcaggccctaggccattaaatcctgtaactcaagctcccttgccacctggttgggagcagagagtggaccagcacgggcgagtttactatgtagatcatgttgagaaaagaacaacatgggatagaccagaacctctacctcctggctgggaacggcgggttgacaacatgggacgtatttattatgttgaccatttcacaagaacaacaacgtggcagaggccaacactggaatccgtccggaactatgaacaatggcagctacagcgtagtcagcttcaaggagcaatgcagcagtttaaccagagattcatttatgggaatcaagatttatttgctacatcacaaagtaaagaatttgatcctcttggtccattgccacctggatgggagaagagaacagacagcaatggcagagtatatttcgtcaaccacaacacacgaattayacaatgggaagaccccagaagtcaaggtcaattaaatgaaaagcccttacctgaaggttgggaaatgagattcacagtggatggaattccatattttgtggaccacaatagaagaactaccacctatatagatccccgcacaggaaaatctgccctagacaatggacctcagatagcctatgttcgggacttcaaagcaaaggttcagtatttccggttctggtgtcagcaactggccatgccacagcacataaagattacagtgacaagaaaaacattgtttgaggattcctttcaacaggtaaacagatgagattatatgaaaacattttgctaaagtcgctaaacaaacataagaaaaaatatgtaaggtttttctatcacattaactattttttaatatctgactgacatttttgtaatataaccaaaataaaaattgcatactttc

SEQ ID NO: 3507 - DNA, 5496 bp, Homo sapiens
cgcgctcaggcgcctgcgctttagctgctaactcgctctagtagctgtggtcggggctcgggaccggctgccatcttagtctagggactgaggagtcgccgccgccccgagtcccggtaccatgcatttcacrgtggccttgtggagacaacgccttaacccaaggaagtgactcaaactgtgagaacttcagtgtctcctttgccatgttcaggttttccaacctattggtggtatgtctgacagtggatcacaacttggttcaatgggtagcctcaccatgaaatcacagcttcagatcactgtcatctcagcaaaacttaaggaaaataagaagaattggtttggaccaagtccttacgtagaggtcacagtagatggacagtcaaagaagacagaaaaatgcaacaacacaaacagtcccaagtggaagcaaccccttacagttatcgttacccctgtgagtaaattacattttcgtgtgtggagtcaccagacactgaaatctgatgttttgttgggaactgctgcattagatatttatgaaacattaaagtcaaacaatatgaaacttgaagaagtagttgtgactttgcagcttggaggtgacaaagagccaacagagacaataggagacttgtcaatttgtcttgatgggctacagttagagtctgaagttgttaccaatggtgaaactacatgttcagaaaatggggtttcgctctgtttgcccaggctggagtgcaatagtgcgatctcggctcactgcaacctctgcctcccgggtttaagtgattctcctatctcagcctcccgagtagctgggtttacaggtgcttctcagaatgatgatggctccagatccaaggatgaaacaagagtgagcacaaatggatcagatgaccctgaagatgcaggagctggtgaaaataggagagtcagtgggaataattctccatcactctcaaatggtggttttaaaccttctagacctccaagaccttcacgaccaccaccacccaccccacgtagaccagcatctgtcaatggttcaccatctgccacttctgaaagtgatgggtctagtacaggctctctgccgccgacaaatacaaatacaaatacatctgaaggagcaacatctggattaataattcctcttactatatctggaggctcaggccctaggccattaaatcctgtaactcaagctcccttgccacctggctgggaacggcgggttgacaacatgggacgtatttattatgttgaccatttcacaagaacaacaacgtggcagaggccaacactggaatccgtccggaactatgaacaatggcagctacagcgtagtcagcttcaaggagcaatgcagcagtttaaccagagattcatttatgggaatcaagatttatttgctacatcacaaagtaaagaatttgatcctcttggtccattgccacctggatgggagaagagaacagacagcaatggcagagtatatttcgtcaaccacaacacacgaattayacaatgggaagaccccagaagtcaaggtcaattaaatgaaaagcccttacctgaaggttgggaaatgagattcacagtggatggaattccatattttgtggaccacaatagaagaactaccacctatatagatccccgcacaggaaaatctgccctagacaatggacctcagatagcctatgttcgggacttcaaagcaaaggttcagtatttccggttctggtgtcagcaactggccatgccacagcacataaagattacagtgacaagaaaaacattgtttgaggattcctttcaacagataatgagcttcagtccccaagatctgcgaagacgtttgtgggtgatttttccaggagaagaaggtttagattatggaggtgtagcaagagaatggttctttcttttgtcacatgaagtgttgaacccaatgtattgcctgtttgaatatgcagggaaggataactactgcttgcagataaaccccgcttcttacatcaatccagatcacctgaaatattttcgttttattggcagatttattgccatggctctgttccatgggaaattcatagacacgggtttttctttaccattctataagcgtatcttgaacaaaccagttggactcaaggatttagaatctattgatccagaattttacaattctctcatctgggttaaggaaaacaatattgaggaatgtgatttggaaatgtacttctccgttgacaaagaaattctaggtgaaattaagagtcatgatctgaaacctaatggtggcaatattcttgtaacagaagaaaataaagaggaatacatcagaatggtagctgagtggaggttgtctcgaggtgttgaagaacagacacaagctttctttgaaggctttaatgaaattcttccccagcaatatttgcaatactttgatgcaaaggaattagaggtccttttatgtggaatgcaagagattgatttgaatgactggcaaagacatgccatctaccgtcattatgcaaggaccagcaaacaaatcatgtggttttggcagtttgttaaagaaattgataatgagaagagaatgagacttctgcagtttgttactggaacctgccgattgccagtaggaggatttgctgatctcatggggagcaatggaccacagaaattctgcattgaaaaagttgggaaagaaaattggctacccagaagtcatacctgttttaatcgcctggacctgccaccatacaagagctatgagcaactgaaggaaaagctgttgtttgccatagaagaaacagaaggatttggwcaagagtaacttctgagaacttgcaccatgaatgggcaagaacttatttgcaatgtttgtccttctctgcctgttgcacatcttgtaaaattggacaatggctctttagagagttatctgagtgtaagtaaattaatgttctcatttagatttatctcccagtgatttctactcagcgtttccagaaatcaggtctgcaaatgactagtcagaaccttgcttaacatgagattttaacacaacaatgaaatttgccttgtcttattccactagtttattcctttaacaacaatattttatrtgtgtcaaaagtctcacttgggagtagtgtttttttcttttagacattctgcagacatgcagggaagtcctttggtaactgcaatatacaagattttcctattaagcctcttggtaagaggcatttgttaaaagtgcaagcttactcctgcttctggggatgtgagcaaaattcgggcttgtgttctccctctcattttagtctgacttgactattgtttttcctttctggcgcatgaatccatacatcattcctggaagtgaggcaagactcttgcatctctacaaagtagttttgtcaatttgaattcagggaaaagttggtcacagcctgcaaatgacttcatttggaagtctgattgtttcagttgcctgacaaatactacactttacaaacaatgttaacactgtgattccttcattgttttaagaagttaacctagggccgggcatggtggctcatacctgtaatcctagcactctgggaggccgaggcaggaggatccctttagcccaggagttaaagaccagcctgggcaacatagggagaccctgtcttttttttgggcagcgtggtgggggataaataaataaaaggaaaaaaaacttagcctagaattagaattaatttaattgaattcatctaaagatgtctctggtgatttttatatgttccgctatataattgatgctttatagttttatcataatccaacaacttcagttatatttaattattgttaaggagtttaagactagaaagactagagtgctttctagtccaaatagaggtcagtgaaacagcttttgacatcagattttcatttgagagggagagctgtggtactggctaaaaagaaaggaagataacatccagtaaccacaggaatatattctctgtgaattaaaagtcttcaaagttatcatttctctgacatatgttggagtagtcatttccattctttacattgtcatgaactggattgataaccctcatctgcaatattttcacccctaaaatttttaacagggtttcctttttttctcacgactatttaagtttagattgctccattattaactgattaatgcactttgaagttctctggaattaattattttaacttggcctagcttcgactgtcaaggtggctgttataaatttgacttcattggcagtggatgaagcctaagccagctgagtctctatcatagctgaaccctgaggacagcctcatagctcatgtatcagggacttttgccacatttcagaggcatagcatgaacaagtaatattaagccaagaataagcagcagaaccctgttccatatggaaaaaagaaaaacaattttttgtccctaatgttcttccttttacatcctggaacaacaataaaaacatttttttaaacttgtctactgtaagatactgccatcataaagcagagacttacatgagtgaaagggttgcctcatcaagcagctcagtgtaaatggggaggctaggctctccccagccctatggtttttttatttcatgtaccccaggaaatactgtgtggtttctaaaagccctggttgttaaaagtagggactctgcctttttgttggtagggagaaaaaacgctattgctttgtcttacagagcgaatgtctgccaactacccgttcattatataagtctgaacttggtaatatatggctaatgaagattaagccctctataaagacttcctgttgaggtgaattctcatactgaaatgtagttacctacaatatttactagagatttatgaaattaaattaagagataatgtaagaaaatacattttttttggttctatataatgcttcatgattcatttagggacctagaaatattgtgtgaaaatatataaatatcacccaaaaggctttctgccctatatttttaaaatacagaatagttatatttgaagtagccctggccctagttctatagggcttggctatttaatatttttatggaagaagtgtttagttctggaaaaggtaaatgcttgtatatatttttgcagcctgggatctccctactccattttttcctttaatttaagtggccacatgtatatgtcttccctgctgtgttaggaaaatgggggctggatatcccaagaatcagaggttatataaaaatactgcaaatagaccgcagacataaatatctaccaaatgctatcttaaattttggtccaaactgaacatatggaaatagatttattgtaagtatttrcttagagctttttcttaaatctgaactaacttgcttttagaagtctttttctttgtaagcattgtaaatgctaataaatcct

SEQ ID NO: 3508 - DNA, 2061 bp, Homo sapiens
cgcgctcaggcgcctgcgctttagctgctaactcgctctagtagctgtggtcggggctcgggaccggctgccatcttagtctagggactgaggagtcgccgccgccccgagtcccggtaccatgcatttcacrgtggccttgtggagacaacgccttaacccaaggaagtgactcaaactgtgagaacttcaggttttccaacctattggtggtatgtctgacagtggatcacaacttggttcaatgggtagcctcaccatgaaatcacagcttcagatcactgtcatctcagcaaaacttaaggaaaataagaagaattggtttggaccaagtccttacgtagaggtcacagtagatggacagtcaaagaagacagaaaaatgcaacaacacaaacagtcccaagtggaagcaaccccttacagttatcgttacccctgtgagtaaattacattttcgtgtgtggagtcaccagacactgaaatctgatgttttgttgggaactgctgcattagatatttatgaaacattaaagtcaaacaatatgaaacttgaagaagtagttgtgactttgcagcttggaggtgacaaagagccaacagagacaataggagacttgtcaatttgtcttgatgggctacagttagagtctgaagttgttaccaatggtgaaactacatgttcagaaagtgcttctcagaatgatgatggctccagatccaaggatgaaacaagagtgagcacaaatggatcagatgaccctgaagatgcaggagctggtgaaaataggagagtcagtgggaataattctccatcactctcaaatggtggttttaaaccttctagacctccaagaccttcacgaccaccaccacccaccccacgtagaccagcatctgtcaatggttcaccatctgccacttctgaaagtgatgggtctagtacaggctctctgccgccgacaaatacaaatacaaatacatctgaaggagcaacatctggattaataattcctcttactatatctggaggctcaggccctaggccattaaatcctgtaactcaagctcccttgccacctggctgggaacggcgggttgacaacatgggacgtatttattatgttgaccatttcacaagaacaacaacgtggcagaggccaacactggaatccgtccggaactatgaacaatggcagctacagcgtagtcagcttcaaggagcaatgcagcagtttaaccagagattcatttatgggaatcaagatttatttgctacatcacaaagtaaagaatttgatcctcttggtccattgccacctggatgggagaagagaacagacagcaatggcagagtatatttcgtcaaccacaacacacgaattayacaatgggaagaccccagaagtcaaggtcaattaaatgaaaagcccttacctgaaggttgggaaatgagattcacagtggatggaattccatattttgtggaccacaatagaagaactaccacctatatagatccccgcacaggaaaatctgccctgtaagttttctaaacattgtagattaagagtaaaatactagtccttcagattttgatataaagatttgtattagcaaggartggaagtcttagtatttcttgagttagcttgacaataggtttctgttcattaagtattttgcatttccatctccctcttggatattttatcctagagattttcatatttgttaccatttgttcacacagcactaaatgaaactatttagaatttataggtattgtactgcttaccaattagtctctgatttctgattttcagcttctttcattcccttaactttttgacgttaaaaaagctctcattacttatcccccaccccatttctgagaaagtaaccttttgatttgcttatgtgctttatgacttcttttgtgggaaaatatataacctaaagtttcttgttttatgtgtacagttcagtggcattaagcacattcatattgtggcataatcattaccaccatccatctccagaatgttttcatcattccaca

SEQ ID NO: 3509 - DNA, 2976 bp, Homo sapiens
cgcgctcaggcgcctgcgctttagctgctaactcgctctagtagctgtggtcggggctcgggaccggctgccatcttagtctagggactgaggagtcgccgccgccccgagtcccggtaccatgcatttcacrgtggccttgtggagacaacgctgtctcctttgccatgttcaggttttccaacctattggtggtatgtctgacagtggatcacaacttggttcaatgggtagcctcaccatgaaatcacagcttcagatcactgtcatctcagcaaaacttaaggaaaataagaagaattggtttggaccaagtccttacgtagaggtcacagtagatggacagtcaaagaagacagaaaaatgcaacaacacaaacagtcccaagtggaagcaaccccttacagttatcgttacccctgtgagtaaattacattttcgtgtgtggagtcaccagacactgaaatctgatgttttgttgggaactgctgcattagatatttatgaaacattaaagtcaaacaatatgaaacttgaagaagtagttgtgactttgcagcttggaggtgacaaagagccaacagagacaataggagacttgtcaatttgtcttgatgggctacagttagagtctgaagttgttaccaatggtgaaactacatgttcagaaagtgcttctcagaatgatgatggctccagatccaaggatgaaacaagagtgagcacaaatggatcagatgaccctgaagatgcaggagctggtgaaaataggagagtcagtgggaataattctccatcactctcaaatggtggttttaaaccttctagacctccaagaccttcacgaccaccaccacccaccccacgtagaccagcatctgtcaatggttcaccatctgccacttctgaaagtgatgggtctagtacaggctctctgccgccgacaaatacaaatacaaatacatctgaaggagcaacatctggattaataattcctcttactatatctggaggctcaggccctaggccattaaatcctgtaactcaagctcccttgccacctggttgggagcagagagtggaccagcacgggcgagtttactatgtagatcatgttgagaaaagaacaacatgggatagaccagaacctctacctcctggctgggaacggcgggttgacaacatgggacgtatttattatgttgaccatttcacaagaacaacaacgtggcagaggccaacactggaatccgtccggaactatgaacaatggcagctacagcgtagtcagcttcaaggagcaatgcagcagtttaaccagagattcatttatgggaatcaagatttatttgctacatcacaaagtaaagaatttgatcctcttggtccattgccacctggatgggagaagagaacagacagcaatggcagagtatatttcgtcaaccacaacacacgaattayacaatgggaagaccccagaagtcaaggtcaattaaatgaaaagcccttacctgaaggttgggaaatgagattcacagtggatggaattccatattttgtggaccacaatagaagaactaccacctatatagatccccgcacaggaaaatctgccctagacaatggacctcagatagcctatgttcgggacttcaaagcaaaggttcagtatttccggttctggtgtcagcaactggccatgccacagcacataaagattacagtgacaagaaaaacattgtttgaggattcctttcaacagataatgagcttcagtccccaagatctgcgaagacgtttgtgggtgatttttccaggagaagaaggtttagattatggaggtgtagcaagagaatggttctttcttttgtcacatgaagtgttgaacccaatgtattgcctgtttgaatatgcagggaaggataactactgcttgcagataaaccccgcttcttacatcaatccagatcacctgaaatattttcgttttattggcagatttattgccatggctctgttccatgggaaattcatagacacgggtttttctttaccattctataagcgtatcttgaacaaaccagttggactcaaggatttagaatctattgatccagaattttacaattctctcatctgggttaaggaaaacaatattgaggaatgtgatttggaaatgtacttctccgttgacaaagaaattctaggtgaaattaagagtcatgatctgaaacctaatggtggcaatattcttgtaacagaagaaaataaagaggaatacatcagaatggtagctgagtggaggttgtctcgaggtgttgaagaacagacacaagctttctttgaaggctttaatgaaattcttccccagcaatatttgcaatactttgatgcaaaggaattagaggtccttttatgtggaatgcaagagattgatttgaatgactggcaaagacatgccatctaccgtcattatgcaaggaccagcaaacaaatcatgtggttttggcagtttgttaaagaaattgataatgagaagagaatgagacttctgcagtttgttactggaacctgccgattgccagtaggaggatttgctgatctcatggggagcaatggaccacagaaattctgcattgaaaaagttgggaaagaaaattggctacccagaagtcatacctgttttaatcgcctggacctgccaccatacaagagctatgagcaactgaaggaaaagctgttgtttgccatagaagaaacagaaggatttggwcaagagtaacttctgagaacttgcaccatgaatgggcaagaacttatttgcaatgtttgtccttctctgcctgttgcacatcttgtaaaattggacaatggctctttagagagttatctgagtgtattgtactcgggaggctgaggtgggaggatcccaggagttcaaatcctgcctgggcaacatagcaagaccctgtc

SEQ ID NO: 3510 - DNA, 3138 bp, Homo sapiens
cgcgctcaggcgcctgcgctttagctgctaactcgctctagtagctgtggtcggggctcgggaccggctgccatcttagtctagggactgaggagtcgccgccgccccgagtcccggtaccatgcatttcacrgtggccttgtggagacaacgccttaacccaaggaagtgactcaaactgtgagaacttcagtgtctcctttgccatgttcaggttttccaacctattggtggtatgtctgacagtggatcacaacttggttcaatgggtagcctcaccatgaaatcacagcttcagatcactgtcatctcagcaaaacttaaggaaaataagaagaattggtttggaccaagtccttacgtagaggtcacagtagatggacagtcaaagaagacagaaaaatgcaacaacacaaacagtcccaagtggaagcaaccccttacagttatcgttacccctgtgagtaaattacattttcgtgtgtggagtcaccagacactgaaatctgatgttttgttgggaactgctgcattagatatttatgaaacattaaagtcaaacaatatgaaacttgaagaagtagttgtgactttgcagcttggaggtgacaaagagccaacagagacaataggagacttgtcaatttgtcttgatgggctacagttagagtctgaagttgttaccaatggtgaaactacatgttcagaaaatggggtttcgctctgtttgcccaggctggagtgcaatagtgcgatctcggctcactgcaacctctgcctcccgggtttaagtgattctcctatctcagcctcccgagtagctgggtttacaggtgcttctcagaatgatgatggctccagatccaaggatgaaacaagagtgagcacaaatggatcagatgaccctgaagatgcaggagctggtgaaaataggagagtcagtgggaataattctccatcactctcaaatggtggttttaaaccttctagacctccaagaccttcacgaccaccaccacccaccccacgtagaccagcatctgtcaatggttcaccatctgccacttctgaaagtgatgggtctagtacaggctctctgccgccgacaaatacaaatacaaatacatctgaaggagcaacatctggattaataattcctcttactatatctggaggctcaggccctaggccattaaatcctgtaactcaagctcccttgccacctggttgggagcagagagtggaccagcacgggcgagtttactatgtagatcatgttgagaaaagaacaacatgggatagaccagaacctctacctcctggctgggaacggcgggttgacaacatgggacgtatttattatgttgaccatttcacaagaacaacaacgtggcagaggccaacactggaatccgtccggaactatgaacaatggcagctacagcgtagtcagcttcaaggagcaatgcagcagtttaaccagagattcatttatgggaatcaagatttatttgctacatcacaaagtaaagaatttgatcctcttggtccattgccacctggatgggagaagagaacagacagcaatggcagagtatatttcgtcaaccacaacacacgaattayacaatgggaagaccccagaagtcaaggtcaattaaatgaaaagcccttacctgaaggttgggaaatgagattcacagtggatggaattccatattttgtggaccacaatagaagaactaccacctatatagatccccgcacaggaaaatctgccctagacaatggacctcagatagcctatgttcgggacttcaaagcaaaggttcagtatttccggttctggtgtcagcaactggccatgccacagcacataaagattacagtgacaagaaaaacattgtttgaggattcctttcaacagataatgagcttcagtccccaagatctgcgaagacgtttgtgggtgatttttccaggagaagaaggtttagattatggaggtgtagcaagagaatggttctttcttttgtcacatgaagtgttgaacccaatgtattgcctgtttgaatatgcagggaaggataactactgcttgcagataaaccccgcttcttacatcaatccagatcacctgaaatattttcgttttattggcagatttattgccatggctctgttccatgggaaattcatagacacgggtttttctttaccattctataagcgtatcttgaacaaaccagttggactcaaggatttagaatctattgatccagaattttacaattctctcatctgggttaaggaaaacaatattgaggaatgtgatttggaaatgtacttctccgttgacaaagaaattctaggtgaaattaagagtcatgatctgaaacctaatggtggcaatattcttgtaacagaagaaaataaagaggaatacatcagaatggtagctgagtggaggttgtctcgaggtgttgaagaacagacacaagctttctttgaaggctttaatgaaattcttccccagcaatatttgcaatactttgatgcaaaggaattagaggtccttttatgtggaatgcaagagattgatttgaatgactggcaaagacatgccatctaccgtcattatgcaaggaccagcaaacaaatcatgtggttttggcagtttgttaaagaaattgataatgagaagagaatgagacttctgcagtttgttactggaacctgccgattgccagtaggaggatttgctgatctcatggggagcaatggaccacagaaattctgcattgaaaaagttgggaaagaaaattggctacccagaagtcatacctgttttaatcgcctggacctgccaccatacaagagctatgagcaactgaaggaaaagctgttgtttgccatagaagaaacagaaggatttggwcaagagtaacttctgagaacttgcaccatgaatgggcaagaacttatttgcaatgtttgtccttctctgcctgttgcacatcttgtaaaattggacaatggctctttagagagttatctgagtgtattgtactcgggaggctgaggtgggaggatcccaggagttcaaatcctgcctgggcaacatagcaagaccctgtc

SEQ ID NO: 3511 - DNA, 5571 bp, Homo sapiens
cgcgctcaggcgcctgcgctttagctgctaactcgctctagtagctgtggtcggggctcgggaccggctgccatcttagtctagggactgaggagtcgccgccgccccgagtcccggtaccatgcatttcacrgtggccttgtggagacaacgccttaacccaaggaagtgactcaaactgtgagaacttcaggttttccaacctattggtggtatgtctgacagtggatcacaacttggttcaatgggtagcctcaccatgaaatcacagcttcagatcactgtcatctcagcaaaacttaaggaaaataagaagaattggtttggaccaagtccttacgtagaggtcacagtagatggacagtcaaagaagacagaaaaatgcaacaacacaaacagtcccaagtggaagcaaccccttacagttatcgttacccctgtgagtaaattacattttcgtgtgtggagtcaccagacactgaaatctgatgttttgttgggaactgctgcattagatatttatgaaacattaaagtcaaacaatatgaaacttgaagaagtagttgtgactttgcagcttggaggtgacaaagagccaacagagacaataggagacttgtcaatttgtcttgatgggctacagttagagtctgaagttgttaccaatggtgaaactacatgttcagaaaatggggtttcgctctgtttgcccaggctggagtgcaatagtgcgatctcggctcactgcaacctctgcctcccgggtttaagtgattctcctatctcagcctcccgagtagctgggtttacaggtgcttctcagaatgatgatggctccagatccaaggatgaaacaagagtgagcacaaatggatcagatgaccctgaagatgcaggagctggtgaaaataggagagtcagtgggaataattctccatcactctcaaatggtggttttaaaccttctagacctccaagaccttcacgaccaccaccacccaccccacgtagaccagcatctgtcaatggttcaccatctgccacttctgaaagtgatgggtctagtacaggctctctgccgccgacaaatacaaatacaaatacatctgaaggagcaacatctggattaataattcctcttactatatctggaggctcaggccctaggccattaaatcctgtaactcaagctcccttgccacctggttgggagcagagagtggaccagcacgggcgagtttactatgtagatcatgttgagaaaagaacaacatgggatagaccagaacctctacctcctggctgggaacggcgggttgacaacatgggacgtatttattatgttgaccatttcacaagaacaacaacgtggcagaggccaacactggaatccgtccggaactatgaacaatggcagctacagcgtagtcagcttcaaggagcaatgcagcagtttaaccagagattcatttatgggaatcaagatttatttgctacatcacaaagtaaagaatttgatcctcttggtccattgccacctggatgggagaagagaacagacagcaatggcagagtatatttcgtcaaccacaacacacgaattayacaatgggaagaccccagaagtcaaggtcaattaaatgaaaagcccttacctgaaggttgggaaatgagattcacagtggatggaattccatattttgtggaccacaatagaagaactaccacctatatagatccccgcacaggaaaatctgccctagacaatggacctcagatagcctatgttcgggacttcaaagcaaaggttcagtatttccggttctggtgtcagcaactggccatgccacagcacataaagattacagtgacaagaaaaacattgtttgaggattcctttcaacagataatgagcttcagtccccaagatctgcgaagacgtttgtgggtgatttttccaggagaagaaggtttagattatggaggtgtagcaagagaatggttctttcttttgtcacatgaagtgttgaacccaatgtattgcctgtttgaatatgcagggaaggataactactgcttgcagataaaccccgcttcttacatcaatccagatcacctgaaatattttcgttttattggcagatttattgccatggctctgttccatgggaaattcatagacacgggtttttctttaccattctataagcgtatcttgaacaaaccagttggactcaaggatttagaatctattgatccagaattttacaattctctcatctgggttaaggaaaacaatattgaggaatgtgatttggaaatgtacttctccgttgacaaagaaattctaggtgaaattaagagtcatgatctgaaacctaatggtggcaatattcttgtaacagaagaaaataaagaggaatacatcagaatggtagctgagtggaggttgtctcgaggtgttgaagaacagacacaagctttctttgaaggctttaatgaaattcttccccagcaatatttgcaatactttgatgcaaaggaattagaggtccttttatgtggaatgcaagagattgatttgaatgactggcaaagacatgccatctaccgtcattatgcaaggaccagcaaacaaatcatgtggttttggcagtttgttaaagaaattgataatgagaagagaatgagacttctgcagtttgttactggaacctgccgattgccagtaggaggatttgctgatctcatggggagcaatggaccacagaaattctgcattgaaaaagttgggaaagaaaattggctacccagaagtcatacctgttttaatcgcctggacctgccaccatacaagagctatgagcaactgaaggaaaagctgttgtttgccatagaagaaacagaaggatttggwcaagagtaacttctgagaacttgcaccatgaatgggcaagaacttatttgcaatgtttgtccttctctgcctgttgcacatcttgtaaaattggacaatggctctttagagagttatctgagtgtaagtaaattaatgttctcatttagatttatctcccagtgatttctactcagcgtttccagaaatcaggtctgcaaatgactagtcagaaccttgcttaacatgagattttaacacaacaatgaaatttgccttgtcttattccactagtttattcctttaacaacaatattttatrtgtgtcaaaagtctcacttgggagtagtgtttttttcttttagacattctgcagacatgcagggaagtcctttggtaactgcaatatacaagattttcctattaagcctcttggtaagaggcatttgttaaaagtgcaagcttactcctgcttctggggatgtgagcaaaattcgggcttgtgttctccctctcattttagtctgacttgactattgtttttcctttctggcgcatgaatccatacatcattcctggaagtgaggcaagactcttgcatctctacaaagtagttttgtcaatttgaattcagggaaaagttggtcacagcctgcaaatgacttcatttggaagtctgattgtttcagttgcctgacaaatactacactttacaaacaatgttaacactgtgattccttcattgttttaagaagttaacctagggccgggcatggtggctcatacctgtaatcctagcactctgggaggccgaggcaggaggatccctttagcccaggagttaaagaccagcctgggcaacatagggagaccctgtcttttttttgggcagcgtggtgggggataaataaataaaaggaaaaaaaacttagcctagaattagaattaatttaattgaattcatctaaagatgtctctggtgatttttatatgttccgctatataattgatgctttatagttttatcataatccaacaacttcagttatatttaattattgttaaggagtttaagactagaaagactagagtgctttctagtccaaatagaggtcagtgaaacagcttttgacatcagattttcatttgagagggagagctgtggtactggctaaaaagaaaggaagataacatccagtaaccacaggaatatattctctgtgaattaaaagtcttcaaagttatcatttctctgacatatgttggagtagtcatttccattctttacattgtcatgaactggattgataaccctcatctgcaatattttcacccctaaaatttttaacagggtttcctttttttctcacgactatttaagtttagattgctccattattaactgattaatgcactttgaagttctctggaattaattattttaacttggcctagcttcgactgtcaaggtggctgttataaatttgacttcattggcagtggatgaagcctaagccagctgagtctctatcatagctgaaccctgaggacagcctcatagctcatgtatcagggacttttgccacatttcagaggcatagcatgaacaagtaatattaagccaagaataagcagcagaaccctgttccatatggaaaaaagaaaaacaattttttgtccctaatgttcttccttttacatcctggaacaacaataaaaacatttttttaaacttgtctactgtaagatactgccatcataaagcagagacttacatgagtgaaagggttgcctcatcaagcagctcagtgtaaatggggaggctaggctctccccagccctatggtttttttatttcatgtaccccaggaaatactgtgtggtttctaaaagccctggttgttaaaagtagggactctgcctttttgttggtagggagaaaaaacgctattgctttgtcttacagagcgaatgtctgccaactacccgttcattatataagtctgaacttggtaatatatggctaatgaagattaagccctctataaagacttcctgttgaggtgaattctcatactgaaatgtagttacctacaatatttactagagatttatgaaattaaattaagagataatgtaagaaaatacattttttttggttctatataatgcttcatgattcatttagggacctagaaatattgtgtgaaaatatataaatatcacccaaaaggctttctgccctatatttttaaaatacagaatagttatatttgaagtagccctggccctagttctatagggcttggctatttaatatttttatggaagaagtgtttagttctggaaaaggtaaatgcttgtatatatttttgcagcctgggatctccctactccattttttcctttaatttaagtggccacatgtatatgtcttccctgctgtgttaggaaaatgggggctggatatcccaagaatcagaggttatataaaaatactgcaaatagaccgcagacataaatatctaccaaatgctatcttaaattttggtccaaactgaacatatggaaatagatttattgtaagtatttrcttagagctttttcttaaatctgaactaacttgcttttagaagtctttttctttgtaagcattgtaaatgctaataaatcct

SEQ ID NO: 3512 - DNA, 2068 bp, Homo sapiens
cacgattagcacgcacgcggtccccaggcgcagctgtccgtgcacgcccagctcgggcagcactagctgccggctatagcgcagaatctcatctcgggacagagcggccttcggcggcagcggcgacaccggaaccagccgttctggctgcggttcctgctcagccaaaagagccgacgccagcttctgcttcagcgaattcaattcctcctcacgttgggcaacttcagcttgtaaggckagtacctcctcccgggaagccatggcgacctcttccggaagttgtcgtgaaaggcatttccgcttccgkcttctgtctcctagcgactgggataaactaaaaaactttatggagcttgggaaaaggtgatgaatagatatttacttcctgaagaaaccttcagattaaacttcaaagatgtataaatccagaatatttctaattgaaccacgcaatggccctagaagaactagcgatcaatcacacaggtcatcccccgcttccgaatttggtacggtccgacccgtccttttccgcgccacattacgtaattccgcttccggcatctggctcagttccgccatggcctccttggaagtcagtcgtagtcctcgcaggtctcggcgggagctggaagtgcgcagtccacgacagaacaaatattcggtgcttttacctacctacaacgagcgcgagaacctgccgctcatcgtgtggctgctggtgaaaagcttctccgagagtggaatcaactatgaaattataatcatagatgatggaagcccagatggaacaagggatgttgctgaacagttggagaagatctatgggtcagacagaattcttctaagaccacgagagaaaaagttgggactaggaactgcatatattcatggaatgaaacatgccacaggaaactacatcattattatggatgctgatctctcacaccatccaaaatttattcctgaatttattaggaagcaaaaggagggtaattttgatattgtctctggaactcgctacaaaggaaatggaggtgtatatggctgggatttgaaaagaaaaataatcagccgtggggccaattttttaactcagatcttgctgagaccaggagcatctgatttaacaggaagtttcagattataccgaaaagaagttctagagaaattaatagaaaaatgtgtttctaaaggctacgtcttccagatggagatgattgttcgggcaagacagttgaattatactattggcgaggttccaatatcatttgtggatcgtgtttatggtgaatccaagttgggaggaaatgaaatagtatctttcttgaaaggattattgactctttttgctactacataaaagaaagatactcatttatagttacgttcatttcaggttaaacatgaaagaagcctggttactgatttgtataaaatgtactcttaaagtataaaatataaggtaaggtaaatttcatgcatctttttatkaagaccacctattttatatttcaaattaaataattttaaagttgctggcctaatgagcaatgttctcaattttcgttttcattttgctgtattgagacctataaataaatgtatatttttttttgcataaagtattgctgccttcattagagtatgtgaatgtagaattttttacatggggaataatttgaaatagtctttttaaaaactggaatcatagatctttatacctaattgatctcagaagtaagrtaatgttaactgatgaaatgtttatggctgtgtctgtatgaattgaaaaagaaatacacacctctgccctttccttaaaaatgtatctcaaatttcttaaactagaaaatacatttagagcaggcatttacagttcggttcttttcagctgttgaattgatgaaacatttcatctatcaaagcaggtctatttaaaatgcatattgtgaattgggaaacaatttgacagcagttgattacatagccgtttttttctcttttgagcaataacctctatcagtaaggaaaaatattaatgacactgaggcagaaacttagc

SEQ ID NO: 3513 - DNA, 1034 bp, Homo sapiens
atggccccgtgctggccctgctggccttgctgcggctggggagaggctgcttctaygatgccaacccaggttgtcatggaaattagccagagcaggtaccccagggcccagcaggtttcctgcatacrgtttggtacacagaatgttgaaattcctcatcttcctcaagattttgaagttgcaaaatataacaccttggagaaagtgggaatggagggaggccaggaagctgtggttgtggaactgcagtgttcgcaggactccagggactgtcctttcctgatatcctcacacttcctcctggatgatggcatgacagtaagagcccagtggatgtcttgcagatatttagagttggcagagtgaatgaaaccacagagtttttgagcaaacctggcaatgtgaggcccttgttgcatggttctcctgtatgaaacatcgtgggaatcttgtgtcgagggttgcttttacccaaagtagtggaagatcgtggtgtgcaaagaacagacgtcggaaaccttggaagtgggatttatttcagtgatttgctcagtatcaagtactcacamcygggagagacagatggcaccagactcctgctcatttgtgacgtagccctcrgaaagtgtrtggacttacacgagaagaacttttccttgactgaagcaccaccaggctacgacagtgtgcatggagtttcacaaacagcctctgtcaccacagacttagagaatgatgaatttgttgtctataaaaccaatcaggttaaaatgaaatatattattaaatttcccatgcctggagatcaaataaaggactttcatcctagtgatcmtactgaattagaggaatacagacctgagttttcaaatttttcaaaggatgaagattaccagttaccagatgccaaaacttccagcagcaccaaggccagcctccaggatgcctctgggaacttggttcctctggaggatgtccacatcraggagaatcatagacactgtagcccaggtatgttgtctgtggctttatga

SEQ ID NO: 3514 - DNA, 1742 bp, Homo sapiens
agccccggagcctcatggaagcccgggagggcggcggagcggggcccgcagcgcggggcccggaggggcagccggcgcccgaagccagggtgcacttccgagtggcgaggttcatcatgsaggcaagtgtcaagctagggatgcggtccrttcccatygccactgcttgcaccatttaccataagttcttctgcgagaccagcctggacgcctgtgacccttacctgattgccatgtcttccatttacttggccggcaaagtggaagagcagcacctgcagactcgtgacatcatcartgtgtccaacaggtactttaacccaagcggtgagcccctggaattggactcccgcttctgggagctccgggacagcattgtgcagtgtcagcttctcatgctgagagttctgcgcttccaggtctccttccagcatccacacaagtacctgctccactacctgctttccctcragaastggctgaaccgccacagctggcagcggayccccgttgccgtcactgcctgggccctgctgcgggacagctaccacgggggtctgtgcctccgcttccaggaccagcacatcaccgtggcggtgctctacctggccctgcaggtctgcggagttgaggtgcccgctgaggtcgaggctgagaagccgtggtggcagatgatccacaagctggcaayccgagctctaatcggagattacgaagatggcattcttcacgaaaatgaaaccagtcatgagaccasggcctcagcagaggggcccctcagccaggccaccaggactgcccagctgttctctsrgggatgagatcttcaacaaggctgatgagaatgaatcgcctttccctgatattccaaaagtttctgaacttattgccaaagaagatgtagacttcctgccctacatgagctggcagggggagccccaagaagccgtcaggaaccagcctcttttagtgtcctctgagtggcaagaattacgttcatccaaaccaaaatttagggctaaaagaaaaatgaaattatctaagccagaagtttctgaagattttgaagaggatgscttaggtgtactactagctttcacatcaactttagaacgtggascctttggttcctctcttccccggctgcccgctctcacaatgctgcttccttgccttttgcctcatattgtcagatagctagttttggttttgctgctccttccagacggtttgatgcatctcaattcagccaaggccctgcgcctggcagttgtgctgactggatcccacagttggcgtcttgtcccacaggacctcyccagaacccstcttctgcaccctactgtggcattactytttcagggagytcattgagctccacacagtctgctccactgcaacctgctggaggccgtatgaccaggccttctgctggcaccttccctgagctggattctccccagcttcatttctctcttcctacagaccctgatcccatcagaggttttgggtcttatcatccctctgcttcctctccttttcattttcaaccttccgcagcctctttgactgccaacctgaggctgccaatagcctctgccttacctgagcctctttacagtcagtcctggactaccccagtagatctctgtcttctggaagaatcagtaagcggtctcgaaggaagtcaatatcctgactatggttttcaaagttgttctgaaacagaaagtcatgagcta

SEQ ID NO: 3515 - DNA, 916 bp, Homo sapiens
agccccggagcctcatggaagcccgggagggcggcggagcggggcccgcagcgcggggcccggaggggcagccggcgcccgaagccagggtgcacttccgagtggcgaggttcatcatgsaggcaagtgtcaagctagggatgcggtccrttcccatygccactgcttgcaccatttaccataagttcttctgcgagaccagcctggacgcctgtgacccttacctgattgccatgtcttccatttacttggccggcaaagtggaagagcagcacctgcagactcgtgacatcatcartgtgtccaacaggtactttaacccaagcggtgagcccctggaattggactcccgcttctgggagctccgggacagcattgtgcagtgtcagcttctcatgctgagagttctgcgcttccaggtctccttccagcatccacacaagtacctgctccactacctgctttccctcragaastggctgaaccgccacagctggcagcggayccccgttgccgtcactgcctgggccctgctgcgggacagctaccacgggggtctgtgcctccgcttccaggaccagcacatcaccgtggcggtgctctacctggccctgcaggtctgcggagttgaggtgcccgctgaggtcgaggctgagaagccgtggtggcagatttataccacggacacagagatcccctaaggccctggcccaggtctgcccaaagagcagccacatctgcttttgtcctttgagaggactctgactacaatataggcatgacatcaatgaaaggaaaatcatgaaatcgatgagactgaatccctagggatttttttaaagccagatttatagcgagaatgaatgtgcaacgtggctgaaatctattttgtgtaataaaaggtgatgctagtcaa

SEQ ID NO: 3516 - DNA, 3519 bp, Homo sapiens
ttctagaagtgaaaacggaaggtctatgcccgggcaatgccacagaggaggaagacactggaactcactgagtttggtacacagaatgttgaaattcctcatcttcctcaagattttgaagttgcaaaatataacaccttggagaaagtgggaatggagggaggccaggaagctgtggttgtggaactgcagtgttcgcaggactccagggactgtcctttcctgatatcctcacacttcctcctggatgatggcatgacagtaagagcccagtggatgtcttgcagatatttagagttggcagagtgaatgaaaccacagagtttttgagcaaacctggcaatgtgaggcccttgttgcatggttctcctgtatgaaacatcgtgggaatcttgtgtcgagggttgcttttacccaaagtagtggaagatcgtggtgtgcaaagaacagacgtcggaaaccttggaagtgggatttatttcagtgatttgctcagtacaagtatcaagtactcacamcygggagagacagatggcaccagactcctgctcatttgtgacgtagccctcrgaaagtgtatggacttacacgagaagaacttttccttgactgaagcaccaccaggctacgacagtgtgcatggagtttcacaaacagcctctgtcaccacagacttagagaatgatgaatttgttgtctataaaaccaatcaggttaaaatgaaatatattattaaatttcccatgcctggagatcaaataaaggactttcatcctagtgatcmtactgaattagaggaatacagacctgagttttcaaatttttcaaaggatgaagattaccagttaccagatgccaaaacttccagcagcaccaaggccagcctccaggatgcctctgggaacttggttcctctggaggatgtccacatcraggagaatcatagacactgtagcccaggtcattgtatttcagacatacacaaataaaagtcatgtgcccattgaggcaaaatatatctttcctttggatgacaaggccgctgtgtgtggcttcgaagccttcatcagtgggaagcacatagttggagagattaaagagaaggaagaagcccagcgagagtaccgaggagccgtgacccagggccatggcgcttacctgatgagtcaggatgctccgggttctacagcaaatcgtcacatcctaaggattttgtcccagtgtggtgccggagtatttgaatattttaatgcaaaatccaagcatagatggagaaaacagatataagaccaaatgagcaggctatgttctccgagttgccactctgtctccgtcaaatggcggcaactcaatccagatgcacccgaggccctgcaggccccagcccaggtgccgtccttgttttgcaatgatcgactccttgtctatggattcattcctcactgcacacaggcaagtttgtgtgcactaatttaagagaaagaatttttgtacaatagtgtcgactattgagcttcagaagacaactgcaaagatgatccacaagctggcaayccgagctctaatcggagattacgaagatggcattcttcacgaaaatgaaaccagtcatgagatgaaraaacaaaccttgaaatctctgattattaaactcagtaaagaaaactctctcataatacaatttacaagctttgtggcagttgagaaaagggatgagaatgaatcgcctttccctgatattccaaaagtttctgaacttattgccaaagaagatgtagacttcctgccctacatgagctggcagggggagccccaagaagccgtcaggaaccagcctcttttagtgtcctctgagtggcaagaattacgttcatccaaaccaaaatttagggctaaaagaaaaatgaaattatctaagccagaagtttctgaagattttgaagaggatgscttaggtgtactactagctttcacatcaactttagaacgtggasgtgtggaaaagctattggatttaaattggacagagtcatgtaaaccaacagcaactgaaccactatttaagaaacgcccggccggaaacatctacttctagccttttttgtgtttctgctccagcctttggttcctctcttccccggctgcccgctctcacaatgctgcttccttgccttttgcctcatattgtcagatagctagttttggttttgctgctccttccagacggtttgatgcatctcaattcagccaaggccctgcgcctggcagttgtgctgactggatcccacagttggcgtcttgtcccacaggacctcyccagaacccstcttctgcaccctactgtggcattactytttcagggagytcattgagctccacacagtctgctccactgcaacctgctggaggccgtktgaccaggccttctgctggcaccttccctgagctggattctccccagcttcatttctctcttcctacagaccctgatcccatcagaggttttgggtcttatcatccctctgcttcctctccttttcattttcaaccttccgcagcctctttgactgccaacctgaggctgccaatagcctctgccttacctgagcctctttacagtcagtcctggactaccccagtagatctctgtcttctggaagaatcagtaagcggtctcgaaggaagtcaatatcctgactatggttttcaaagttgttctgaaacagaaagtcatgagctatgagaagtacttctagacagytgctttttacaaataaaatgtgatacaacagacaacagtatcccgtgcyttctggaggtaatagaggaggatgaratagtgtgcayacagcactggcaggatgctgtgccttggactgaactcttcagtctacagacagaggatggcttctggaaacttacaccagaactgggatttatattaaatcttaatacaaatgctttgcacagctttcttaaacaaaaaggcattcaatctctaggtgtaaaaggaagagaacatctcctggacctaattgccacaatgcgatactacagtttattcgcaccaggttggaaaaaacgggaatagtgttcaaatcactgatggaactggatgacgcttctatttccaggaatattccctgggcttttgaggcaataaagcaagcaagtgaatgggtaagaagaactgaaggacagtacccatctatctgcccacggcttgaactggggaacgactgggactctgccaccaagcagttgctgggactccagcccataagcactgtgtcccctcttcatagagtccttcattacagtcaaggctaaatcaaatgaaactgaattttaaactttttgcatgcttctatgtagaaaataatcaarcgataatagatacttacaatgaaactccattaaggttttattcagtgtagcaattagtgtctttaaaaataaagtggaagcagaattactttaatcaactaacaagcaataatgaaacttaaaatatttcag

SEQ ID NO: 3517 - DNA, 1238 bp, Homo sapiens
tctgctggcctctgcgcgctggggccgcctctccttccgcagggccccggagcctcatggaagcccgggagggcggcggagcggggcccgcagcgcggggcccggaggggcagccggcgcccgaagccagggtgcacttccgagtggcgaggttcatcatgsaggcaagtgtcaagctagggatgcggtccrttcccatygccactgcttgcaccatttaccataagttcttctgcgagaccagcctggacgcctgtgacccttacctgattgccatgtcttccatttacttggccggcaaagtggaagagcagcacctgcagactcgtgacatcatcartgtgtccaacaggtactttaacccaagcggtgagcccctggaattggactcccgcttctgggagctccgggacagcattgtgcagtgtcagcttctcatgctgagagttctgcgcttccaggtctccttccagcatccacacaagtacctgctccactacctgctttccctcragaastggctgaaccgccacagctggcagcggayccccgttgccgtcactgcctgggccctgctgcgggacagctaccacgggggtctgtgcctccgcttccaggaccagcacatcaccgtggcggtgctctacctggccctgcaggtctgcggagttgaggtgcccgctgaggtcgaggctgagaagccgtggtggcaggtgtttggtgacgaccttaccaatcattgataatattgtatctgatctcattcagatttataccacggacacagagatcccctaaggccctggcccaggtctgcccaaagagaagcccaggatggtcggctgcctggggacattgccaccacgtcgccacgatggctggtcctcagaggaccagctgrgaggactggttgtgctgctggagaaggrctggagaaggcgatagcatgctgccgctttgacagtccctagcagtcgcggtccagatgatggtgggagccgcgcctccagcggscaggccgggagtgcactgygtgcagctgatccaaggcagccacatctgcttttgtcctttgagaggactctgactacaatataggcatgacatcaatgaaaggaaaatcatgaaatcgatgagactgaatccctagggatttttttaaagccagatttatagcgagaatgaatgtgcaacgtggctgaaatctattttgtgtaataaaaggtgatgctagtcaa

SEQ ID NO: 3518 - DNA, 3823 bp, Homo sapiens
atggccccgtgctggccctgctggccttgctgcggctggggagaggctgcttctaygatgccaacccaggttgtcatggaaattagccagagcaggtaccccagggcccagcaggtttcctgcatacrgtttggtacacagaatgttgaaattcctcatcttcctcaagattttgaagttgcaaaatataacaccttggagaaagtgggaatggagggaggccaggaagctgtggttgtggaactgcagtgttcgcaggactccagggactgtcctttcctgatatcctcacacttcctcctggatgatggcatgacagtaagagcccagtggatgtcttgcagatatttagagttggcagagtgaatgaaaccacagagtttttgagcaaacctggcaatgtgaggcccttgttgcatggttctcctgtatgaaacatcgtgggaatcttgtgtcgagggttgcttttacccaaagtagtggaagatcgtggtgtgcaaagaacagacgtcggaaaccttggaagtgggatttatttcagtgatttgctcagtacaagtatcaagtactcacamcygggagagacagatggcaccagactcctgctcatttgtgacgtagccctcrgaaagtgtatggacttacacgagaagaacttttccttgactgaagcaccaccaggctacgacagtgtgcatggagtttcacaaacagcctctgtcaccacagacttagagaatgatgaatttgttgtctataaaaccaatcaggttaaaatgaaatatattattaaatttcccatgcctggagatcaaataaaggactttcatcctagtgatcmtactgaattagaggaatacagacctgagttttcaaatttttcaaaggatgaagattaccagttaccagatgccaaaacttccagcagcaccaaggccagcctccaggatgcctctgggaacttggttcctctggaggatgtccacatcraggagaatcatagacactgtagcccaggtcattgtatttcagacatacacaaataaaagtcatgtgcccattgaggcaaaatatatctttcctttggatgacaaggccgctgtgtgtggcttcgaagccttcatcagtgggaagcacatagttggagagattaaagagaaggaagaagcccagcgagagtaccgaggagccgtgacccagggccatggcgcttacctgatgagtcaggatgctccgggttctacagcaaatcgtcacatcctaaggattttgtcccagtgtggtgccggagtatttgaatattttaatgcaaaatccaagcatagatggagaaaacagatataagaccaaatgagcaggctatgttctccgagttgccactctgtctccgtcaaatggcggcaactcaatccagatgcacccgaggccctgcaggccccagcccaggtgccgtccttgttttgcaatgatcgactccttgtctatggattcattcctcactgcacacaggcaagtttgtgtgcactaatttaagagaaagaatttttgtacaatagtgtcgactattgagcttcagaagacaactgcaactatgatccacaagctggcaayccgagctctaatcggagattacgaagatggcattcttcacgaaaatgaaaccagtcatgagatgaaraaacaaaccttgaaatctctgattattaaactcagtaaagaaaactctctcataatacaatttacaagctttgtggcagttgagaaaagggatgagaatgaatcgcctttccctgatattccaaaagtttctgaacttattgccaaagaagatgtagacttcctgccctacatgagctggcagggggagccccaagaagccgtcaggaaccagcctcttttagtgtcctctgagtggcaagaattacgttcatccaaaccaaaatttagggctaaaagaaaaatgaaattatctaagccagaagtttctgaagattttgaagaggatgscttaggtgtactactagctttcacatcaactttagaacgtggasgtgtggaaaagctattggatttaaattggacagagtcatgtaaaccaacagcaactgaaccactatttaagaaacgcccggccggaaacatctacttctagccttttttgtgtttctgctccagcctttggttcctctcttccccggctgcccgctctcacaatgctgcttccttgccttttgcctcatattgtcagatagctagttttggttttgctgctccttccagacggtttgatgcatctcaattcagccaaggccctgcgcctggcagttgtgctgactggatcccacagttggcgtcttgtcccacaggacctcyccagaacccstcttctgcaccctactgtggcattactytttcagggagytcattgagctccacacagtctgctccactgcaacctgctggaggccgtatgaccaggccttctgctggcaccttccctgagctggattctccccagcttcatttctctcttcctacagaccctgatcccatcagaggttttgggtcttatcatccctctgcttcctctccttttcattttcaaccttccgcagcctctttgactgccaacctgaggctgccaatagcctctgccttacctgagcctctttacagtcagtcctggactaccccagtagatctctgtcttctggaagaatcagtaagcggtctcgaaggaagtcaatatcctgactatggttttcaaagttgttctgaaacagaaagtcatgagctatgagaagtacttctagacagytgctttttacaaataaaatgtgatacaacagacaacagtatcccgtgcyttctggaggtaatagaggaggatgaratagtgtgcayacagcactggcaggatgctgtgccttggactgaactcttcagtctacagacagaggatggcttctggaaacttacaccagaactgggatttatattaaatcttaatacaaatgctttgcacagctttcttaaacaaaaaggcattcaatctctaggtgtaaaaggaagagaacatctcctggacctaattgccacaktgcgatactacagtttattcgcaccagtgttcaaatcactgatggaactggatgacgcttctatttccaggaatattccctgggcttttgaggcaataaagcaagcaagtgaatgggtaagaagaactgaaggacagtacccatctatctgcccacggcttgaactggggaacgactgggactctgccaccaagcagttgctgggactccagcccataagcactgtgtcccctcttcatagaggatatgtggtgcctgtcataagctccagagagctgccttccatgagaccagcagaagagtgggcaaacatgaagtccaatccccctatccaggctgccattgacctcatggcaggggctgcaaaagtgatgggctttacctttgggatgaatccatttgatggaagtgttgttcagagtgtggcagaagtggggaggccagaaggagtgttgcccaatgctgtcctcatccagtccaccccccacccaccaccaacagatgagyatggtcatgagtgtrgtyacctcatcagtcatttgctcagctgtgaaaaagaaattgttcagagaagagcaaagtgtttttccatgagccagaggaataatggccttatattctggactgaaacctacatgattcgagcattccctgacaatggagcactctttttggcctatgaatatagcaggaatttgatgatgagccagttggaagcatac

SEQ ID NO: 3519 - DNA, 844 bp, Homo sapiens
gcaagtgtcaagctagggatgcggtccrttcccatygccactgcttgcaccatttaccataagttcttctgcgagaccagcctggacgcctgtgacccttacctgattgccatgtcttccatttacttggccggcaaagtggaagagcagcacctgcagactcgtgacatcatcartgtgtccaacaggtactttaacccaagcggtgagcccctggaattggactcccgcttctgggagctccgggacagcattgtgcagtgtcagcttctcatgctgagagttctgcgcttccaggtctccttccagcatccacacaagtgtttggtgacgaccttaccaatcattgataatattgtatctgatctcattcagatttataccacggacacagagatcccctaaggccctggcccaggtctgcccaaagagaagcccaggatggtcggctgcctggggacattgccaccacgtcgccacgatggctggtcctcagaggaccagctgrgaggactggttgtgctgctggagaaggrctggagaaggcgatagcatgctgccgctttgacagtccctagcagtcgcggtccagatgatggtgggagccgcgcctccagcggscaggccgggagtgcactgygtgcagctgatccaaggcagccacatctgcttttgtcctttgagaggactctgactacaatataggcatgacatcaatgaaaggaaaatcatgaaatcgatgagactgaatccctagggatttttttaaagccagatttatagcgagaatgaatgtgcaacgtggctgaaatctattttgtgtaataaaaggtgatgctagtca

SEQ ID NO: 3520 - DNA, 397 bp, Homo sapiens
atggccccgtgctggccctgctggccttgctgcggctggggagaggctgcttctaygatgccaacccagrttgtcatggaaattagccagagcaggtaccccagggcccagcaggtttcctgcatacrgtttggtacacagaatgttgaaattcctcatcttcctcaagattttgaagttgcaaaatataacaccttggagaaagtgggaatggagggaggccaggaagctgtggttgtggaactgcagtgttcgcaggactccagggactgtcctttcctgatatcctcacacttcctcctggatgatggcatgcagagcgagcccgagtctgtgtagagatgatagaatgtgtcgttgttttcttcattgagaaagaaaaccgtagcatcgtgtr

SEQ ID NO: 3521 - DNA, 1108 bp, Homo sapiens
gccccggagcctcatggaagcccgggagggcggcggagcggggcccgcagcgcggggcccggaggggcagccggcgcccgaagccagggtgcacttccgagtggcgaggttcatcatgsaggcaagtgtcaagctagggatgcggtccrttcccatygccactgcttgcaccatttaccataagttcttctgcgagaccagcctggacgcctgtgacccttacctgattgccatgtcttccatttacttggccggcaaagtggaagagcagcacctgcagactcgtgacatcatcartgtgtccaacaggtactttaacccaagcggtgagcccctggaattggactcccgcttctgggagctccgggacagcattgtgcagtgtcagcttctcatgctgagagttctgcgcttccaggtctccttccagcatccacacaaaastggctgaaccgccacagctggcagcggayccccgttgccgtcactgcctgggccctgctgcgggacagctaccacgggggtctgtgcctccgcttccaggaccagcacatcaccgtggcggtgctctacctggccctgcaggtctgcggagttgaggtgcccgctgaggtcgaggctgagaagccgtggtggcagatttataccacggacacagagatcccctaaggccctggcccaggtctgcccaaagagaagcccaggatggtcggctgcctggggacattgccaccacgtcgccacgatggctggtcctcagaggaccagctgrgaggactggttgtgctgctggagaaggrctggagaaggcgatagcatgctgccgctttgacagtccctagcagtcgcggtccagatgatggtgggagccgcgcctccagcggscaggccgggagtgcactgygtgcagctgatccaaggcagccacatctgcttttgtcctttgagaggactctgactacaatataggcatgacatcaatgaaaggaaaatcatgaaatcgatgagactgaatccctagggatttttttaaagccagatttatagcgagaatgaatgtgcaacgtggctgaaatctattttgtgtaataaaaggtgatgctagtca

SEQ ID NO: 3522 - DNA, 885 bp, Homo sapiens
gcgcgccgtgtggggcgcgcacgcagggctgggcgtgagggggcgtgcgcgtgcgcaggcgacgcgccgaggtactaggcagagccgtggaaccgccgccaggtcgctgttggtccacgccgcccgtcgcgccgcccgcccgctcagcgtccgccgccgccatgggagtgcaggtggaaaccatctccccaggagacgggcgcaccttccccaagcgcggccagacctgcgtggtgcactacaccgggatgcttgaagatggaaagaaatttgattcctcccgggacagaaacaagccctttaagtttatgctaggcaagcaggaggtgatccgaggctgggaagaaggggttgcccagatgagtgtgggtcagagagccaaactgactatatctccagattatgcctatggtgccactgggcacccaggcatcatcccaccacatgccactctcgtcttcgatgtggagcttctaaaactggaatgacaggaatggcctcctcccttagctccctgttcttggatctgccatggagggatctggtgcctccagacatgtgcacatgartccatatggagcttttcctgatgttccactccactttgtatagacatctgccctgactgaatgtgttctgtcactcagctttgcttccgacacctctgtttcctcttcccctttctcctcgtatgtgtgtttacctaaactatatgccataaacctcaagttaytcattttattttgttttcattttggggtgaagattcagtttcagtcttttggatataggtttccaattaagtacatggtcaagtattaacacmccatttatgagtctcaagttttattattgcaataaaagtgctttatgccggcttttctc

SEQ ID NO: 3523 - DNA, 1618 bp, Homo sapiens
gcgcgccgtgtggggcgcgcacgcagggctgggcgtgagggggcgtgcgcgtgcgcaggcgacgcgccgaggtactaggcagagccgtggaaccgccgccaggtcgctgttggtccacgccgcccgtcgcgccgcccgcccgctcagcgtccgccgccgccatgggagtgcaggtggaaaccatctccccaggagacgggcgcaccttccccaagcgcggccagacctgcgtggtgcactacaccgggatgcttgaagatggaaagaaatttgattcctcccgggacagaaacaagccctttaagtttatgctaggcaagcaggaggtgatccgaggctgggaagaaggggttgcccagatgagtgtgggtcagagagccaaactgactatatctccagattatgcctatggtgccactgggcacccaggcatcatcccaccacatgccactctcgtcttcgatgtggagcttctaaaactggaatgacaggaatggcctcctcccttagctccctgttcttggatctgccatggagggatctggtgcctccagacatgtgcacatgartccatatggagcttttcctgatgttccactccactttgtatagacatctgccctgactgaatgtgttctgtcactcagctttgcttccgacacctctgtttcctcttcccctttctcctcgtatgtgtgtttacctaaactatatgccataaacctcaagttaytcattttattttgttttcattttggggtgaagattcagtttcagtcttttggatataggtttccaattaagtacatggtcaagtattaacagcacaagtggtaggttaacattagaataggaattggtgttggggggggggtttgcaagaatattttattttaattttttggatgaaatttttatctattatatattaaacattcttgctgctgcgctgcaaagccatagcagatttgaggcgctgttgaggactgaattactctccaagttgagagatgtctttgggttaaattaaaagccctacctaaaactgaggtggggatggggagagcctttgcctccaccattcccacccaccctccccttaaaccctctgcctttgmaagtagatcatgttcactgcaatgctggacactacaggtatctgtccctgggccagcagggacctctgaagccttctttgtggccttttttttttttcatcctgtggtttttctaatggactttcaggaattttgtaatctcataactttccaagctccaccacttcctaaatcttaagaactttaattgacagtttcaattgaaggtgctgtttgtagacttaacacccagtgaaagcccagccatcatgacaaatccttgaatgttctcttaagaaaatgatgctggtcatcgcagcttcagcatctcctgttttttgatgcttggctccctctgctgatctcagtttcctggcttttcctccctcagccccttctcacccctttgctgtcctgtgtagtgatttggtgagaaatcgttgctgcayccttcccccagcmccatttatgagtctcaagttttattattgcaataaaagtgctttatgccggcttttctc

SEQ ID NO: 3524 - DNA, 1086 bp, Homo sapiens
gcgcgccgtgtggggcgcgcacgcagggctgggcgtgagggggcgtgcgcgtgcgcaggcgacgcgccgaggtactaggcagagccgtggaaccgccgccaggtcgctgttggtccacgccgcccgtcgcgccgcccgcccgctcagcgtccgccgccgccatgggagtgcaggtggaaaccatctccccaggagacgggcgcaccttccccaagcgcggccagacctgcgtggtgcactacaccgggatgcttgaagatggaaagaaatttgattcctcccgggacagaaacaagccctttaagtttatgctaggcaagcaggaggtgatccgaggctgggaagaaggggttgcccagatgagtgtgggtcagagagccaaactgactatatctccagattatgcctatggtgccactgggcacccaggcatcatcccaccacatgccactctcgtcttcgatgtggagcttctaaaactggaatgacaggaatggcctcctcccttagctccctgttcttgggtaaggaaatggaatactgaagggcccttcactgcctttgctcctcccatgttatgcccagcgtttgatgggtagcagagagaacaaaaaacaccacaaggctatttttccccctgcattctttctgtattgagtatcctttcagtgttattagtgtatgctttgaatgtaaaaattggtcaccctaaggaaaggaattggcatgtgtatgttcccagttcaactcatggagatggcagctgtttaaatgtttttctatgyagtttataaattaaaactgaattgaggactatggaaatgtaggccaaatttgtagtgccaacattttagttctttggaaataagactcttaatgaatgactttgttctaccctgtgtttctagargctagagggggaaaaaaaaagccctttggatatgaatatcatgtcctagcttctgcggctctctcttcactgtggtttgtggttactgcctattagatggtatgagggaggcattcctgcatcggtccacctgctcagggtccacacccaggacacttgaggcccccaggccagct

SEQ ID NO: 3525 - DNA, 2755 bp, Homo sapiens
ctgctactgaagctaaatacaatttatttcatgctgggggacagaaaggagcaagggagagcagtcacctgctccttatctgggctattttcttagcagacctcaaaatgagaccatggtgggaagctgggctggggccaagggaagaagcttgccagcactgtcagccgatgagcccaggagaaaaagctgggcctagtctctgccccattcctgttccacacctgtctgtacccctgtctctcctttccctggctctgccagactctctatctccctgggcgccagcctccccacccacccctggagggcggggcttggctgcacccacgtgtggtggagttaaatgctcctagccggcagaggagctagggagtgtggcactgagccggctcaggcagagacgcggcaccatggctagcaagaaagtctgcattgtaggctccgggaactggggctcagccatcgccaagatcgtgggtggcaatgcagcccagctsgcacagtttgacccacgggtgaccatgtgggtatttgaggaagacattggaggcaaaaagctgactgagatcrtcaacacgcagcatgagaatgtcaaatacctgccagggcacaagytgcccccaaatgtggtggctgtcccagatgtggtccaggctgcagaggatgctgacatcctgatctttgtggtgccccatcagttcatcggcaagatctgtgaccagctcaagggccatctgaaggcaaacgccactggcatatctcttattaagrgggtagacragggccccaatgggctgaagctcatctcggaagtgattggggagcgcctcggcatccccatgagtgtgctgatgggggccaacattgccagcgaggtggctgatgagaagttctgtgagacaaccattggctgcaaggacccggcccagggacaactcctgaaagagctgatgcagacaccaaacttccgtatcacagtggtgcaagaggtggacacagyagagatctgtggagccttaaaraatgtagtggccgtgggggctggcttctgtgatggcctgggctttggcgacaacaccaaggcggcagtgatcyggctgggactcatggagatgatagccttcgccaagctcttctgcagtggccctgtgtcctctgccaccttcttggagagctgtggtgttgctgacctgatcactacctgctatggagggcggaaccggaaagtggctgaggcctttgcgcgtacaggaaagtccattgagcagctggagaaagagttgctgaatgggcagaaactgcaggggcccgagacagcccgggagctatacagcatcctccagcacaagggcctggtagacaagtttcccttgttcatggctgtgtacaaggtgtgctacgagggccagccagtgggtgaattcatycactgcctrcagaatcatccagaacatatgtgagtggggccagggcccaggccaggccgcttttttaccccagtggagaccagcagaagcctggggtacctagtcaccaggatctccaggactcccagggagcagagtcttctcatcttttcactggaggacaggaggctatggggcccagctacgcacctggagatcctgaactgtcaagccactggcagcctcatgccaccacatttgccagaaatgcagttgccctgtccctctccagatgtggggctttctccatatcctctgggaggggtggaatcaagccccagtgctgcctgcttggtggcgggggtgatgtatgtggagaagggttgggggagaggccggtagggcaggggctgctagtggctgtctcacatacaccagtaatcctgttaaagggctgaagaagtatcttagccacaggagcgatgaggcaaggattgtcagggaggggtctgggcttctgagctgatgcaggccccaaggacccctttgctgacctctgccaggacccacacagcttcgatggatctcagtgtttgttaacaaaatacaaagatctcaaacaaaccccttttagcttctcctagcaacatctgtgtcctcagaaacctctggttctcccccttccccctcccccaggctgccctggcacccaaattgctgccatgctggcatctgtagctcggtggcttgacattctccccagggacttcccggttcctagttctttgccagctcctccccactctgtgcgacctttccaagccttccctcaccctccccgccagcaccctctttggggagcaggaacttaatctgctgacagagctacacctttcataacaggctcagatcactcagctccctgtgacctttgtattcacccaggcttccttctcagtagctctagctgggggaggtgtcagctgggcccctcctgtgctatctccccagaggacatccctgactccacccctttcttcctcccaaactctgcacctcttcctcagctgctccagaccggccagggtaaccagctaaccatgcctggcatctggaagccagcaggccagagggtggcccaaaggctgatgaacggtagggaaggaaacaagaagagttgggagagggagcttcagtgcatgtggcagtgcgtgtgctggcgcgtatcattgcaccgccccctcccgccctcgccgcaagctggccccggccttgccggcccttcttaggggctttatcatgcctcctgcaagaatagagatcacacacgggacggaaacgttaga

SEQ ID NO: 3526 - DNA, 3265 bp, Homo sapiens
ctgctactgaagctaaatacaatttatttcatgctgggggacagaaaggagcaagggagagcagtcacctgctccttatctgggctattttcttagcagacctcaaaatgagaccatggtgggaagctgggctggggccaagggaagaagcttgccagcactgtcagccgatgagcccaggagaaaaagctgggcctagtctctgccccattcctgttccacacctgtctgtacccctgtctctcctttccctggctctgccagactctctatctccctgggcgccagcctccccacccacccctggagggcggggcttggctgcacccacgtgtggtggagttaaatgctcctagccggcagaggagctagggagtgtggcactgagccggctcaggcagagacgcggcaccatggctagcaagaaagtctgcattgtaggctccgggaactggggctcagccatcgccaagatcgtgggtggcaatgcagcccagctsgcacagtttgacccacgggtgaccatgtgggtatttgaggaagacattggaggcaaaaagctgactgagatcrtcaacacgcagcatgagaatgtcaaatacctgccagggcacaagytgcccccaaatgtggtggctgtcccagatgtggtccaggctgcagaggatgctgacatcctgatctttgtggtgccccatcagttcatcggcaagatctgtgaccagctcaagggccatctgaaggcaaacgccactggcatatctcttattaagrgggtagacragggccccaatgggctgaagctcatctcggaagtgattggggagcgcctcggcatccccatgagtgtgctgatgggggccaacattgccagcgaggtggctgatgagaagttctgtgagacaaccattggctgcaaggacccggcccagggacaactcctgaaagagctgatgcagacaccaaacttccgtatcacagtggtgcaagaggtggacacagyagagatctgtggagccttaaaraatgtagtggccgtgggggctggcttctgtgatggcctgggctttggcgacaacaccaaggcggcagtgatcyggctgggactcatggagatgatagccttcgccaagctcttctgcagtggccctgtgtcctctgccaccttcttggagagctgtggtgttgctgacctgatcactacctgctatggagggcggaaccggaaagtggctgaggcctttgcgcgtacaggaaagtccattgagcagctggagaaagagttgctgaatgggcagaaactgcaggggcccgagacagcccgggagctatacagcatcctccagcacaagggcctggtagacaagtttcccttgttcatggctgtgtacaaggtgtgctacgagggccagccagtgggtgaattcatycactgcctrcagaatcatccagaacatatgtgagtggggccagggcccaggccaggccgcttttttaccccagtggagaccagcagaagcctggggtacctagtcaccaggatctccaggactcccagggagcagagtcttctcatcttttcactggaggacaggaggctatggggcccagctacgcacctggagatcctgaactgtcaagccactggcagcctcatgccaccacatttgccagaaatgcagttgccctgtccctctccagatgtggggctttctccatatcctctgggaggggtggaatcaagccccagtgctgcctgcttggtggcgggggtgatgtatgtggagaagggttgggggagaggccggtagggcaggggctgctagtggctgtctcacatacaccagtaatcctgttaaagggctgaagaagtatcttagccacaggagcgatgaggcaaggattgtcagggaggggtctgggcttctgagctgatgcaggccccaaggacccctttgctgacctctgccaggacccacacagcttcgatggatctcagtgtttgttaacaaaatacaaagatctcaaacaaaccccttttagcttctcctagcaacatctgtgtcctcagaaacctctggttctcccccttccccctcccccaggctgccctggcacccaaattgctgccatgctggcatctgtagctcggtggcttgacattctccccagggacttcccggttcctagttctttgccagctcctccccactctgtgcgacctttccaagccttccctcaccctccccgccagcaccctctttggggagcaggaacttaatctgctgacagagctacacctttcataacaggctcagatcactcagctccctgtgacctttgtattcacccaggcttccttctcagtagctctagctgggggaggtgtcagctgggcccctcctgtgctatctccccagaggacatccctgactccacccctttcttcctcccaaactctgcacctcttcctcagctgctccagaccggccagggtaaccagctaaccatgcctggcatctggaagccagcaggccagagggtggcccaaaggctgatgaacggtagggaagggtgagcagattcctatgttggtgggcaccaatattccaagggcagctctctttgctgaatgagggccttctcgtgaggtactgacaacaccagcaactcgagagctgggaaactcaaggaggaggaagaaaatcaaaaccaccctactccctggggtgaggaaagaacaggaggggaggaggaggagtgtgctctgcacttgccttgctccaggatggggtggcagcagaggaatgtcacaggtcagcagcctaggcctccagctataaatagtccggagggcccgagaggctcccgcccgtccagcagggctgtcagcttcctgtgtggcagcacctggcacactggctctggccagcattatgctaaaaccctgttactctccaatgaaccagggaggcgggctcctctctgcgcctatcccttgagaattctgtcttaccagtgaagggtggggctgcccagatcaggcagcaggagtgaggggcacagtcaccccaggccttgctgagcccaggtctgggtactgagtgtccagagctgcctccccaggaggttaaggtgggggcaaaggggaagcttcaagcactttgcctacttttgttcactccccagtgcactgtgactcaggccttcccatcaggcctatttgtctacccaataaagcgtgttttttccagaaacaagaaga

SEQ ID NO: 3527 - DNA, 1683 bp, Homo sapiens
cgccgcccgcctcccccactcgccccgggctgtccccgccgcccgcctgattcccctgcggaagccccgctggctaggtgtctgcgcgcacccccggccgccgccaagagtggcacagctggggaaggagtgaacatccagaggaatcgcggggcggggkggggggaggccaggagaacaggtggcgcagggaagcagaaacgtagttgcgctggacagctggagtcgggcagggtcgrggccagcggcgaggggacaagaagggccgattcgagaggaagcgcacctgagggagcacagcgaaggccgggacgcagggagctggatggagagcgagcctgggcggcgaaaggttgccgaggcggggrctgggcgcctgggaacaaagttgaaaatgcaactgcaagctycccggtgaaacaaataycgccttcaaccttygtattctgtggtgactcatctcgcacgtgacccccctccctcttcaaggtgtgttgaccgactacagtttaagcctgtcgtcccacaaaaggcccgggagggccggggtcccaggaagggccatcctgggtcaacaccgccccagttgggaagtcgggccgctttcggacttgccactgggaagggaagtgattkgggggcggcaggtaaggccgcgccccttcgccatcacctggggaaaggtaccagagttgagccggggcgcccgcaggcctgtctgggcctcggggtaaggcggygctggcyccgccccctgcccctcccgccgcgagtggcctcgcgtggtcgcccaggtgagccgcrgggccgcgagccaccgctcaccccgcgtcggggcgggggctgggggtggagcctcatgccccgccccgcggctgggccctgcygcgccgctgcggctcctcctccctccttccgtcctccgmgcyttccgtcggtcggtccttscttcctgcttcgcctccgcgcctcgcgctatgggacagagcccccgatccgccagcaccacctgagratccagaaaccgccccagcgatggaagaggatcaggagctggagagaaaaatatctggattgaagacctcaatggctgaaggcgagaggaagacagccctggaaatggtccaggcagctggaacagatagacactgtgtgacatttgtattgcacgaggaagaccataccctaggaaattctctacgttacatgatcatgaagaacccggaagtggaattttgtggttacactacgacccatccttcagagagcaaaattaatttacgcattcagactcgaggtacccttccagctgttgagccatttcagagaggcctgaatgagctcatgaatgtctgccaacatgtgcttgacaagtttgaggccagcataaaggactataaggatcaaaaagcaagcagaaatgaatccacattctagtcctttatgcagtatacaaggagaactgtmctgtaggatattctcttcytgatggtgcagaacccagaattagaagtttgtggttacagcatactctgtccttcagaaaggcgtgattctagctgttgaccccttgcagctgttggaatctctgcaagaacctctgtattcttctaataaattccctcttttatttaaactagtttgactggtttctgttccatgcaaccaaatggtccttgagga

SEQ ID NO: 3528 - DNA, 624 bp, Homo sapiens
agaaaaatatctggattgaagacctcaatggctgaaggcgagaggaagacagccctggaaatggtccaggcagctggaacagatagacactgtgtgacatttgtattgcacgaggaagaccataccctaggaaattctctacgttacatgatcatgaagaacccggaagtggaattttgtggttacactacgacccatccttcagagagcaaaattaatttacgcattcagactcgaggtacccttccagctgttgagccatttcagagaggcctgaatgagctcatgaatgtctgccaacatgtgcttgacaagtttgaggccagcataaaggactataaggatcaaaaagcaagcagaaatgaatccacattctagtcctttatgcagtatacaaggagaactgtmctgtaggatattctcttcytgatggtgcagaacccagaattagaagtttgtggttacagcatactctgtccttcagaaaggcgtgattctagctgttgaccccttgcagctgttggaatctctgcaagaacctctgtattcttctaataaattccctcttttatttaaactagtttgactggtttctgttccatgcaaccaaatggtccttgagga

SEQ ID NO: 3529 - DNA, 1855 bp, Homo sapiens
cccgtgggcagagctggtgtgagacgagacaatcctgccccgccgccaggataatcaagagttttggccggacctttgagcatacactgagagagtgaggagccagacgacaagcacacactatggcgctgaaacggattaataaggaacttagtgatttggcccgtgaccctccagcacaatgttctgcaggtccagttggggatgatatgtttcaytggcaagccacaattatgggacctcatgacagaccatatcaaggygstgtattcttttggacaattyrttttcctacagactaccccttcaaaccatctaaggttgcatttacaacaagaatttatcayccaaatattaacagtaatggcagcatttttcttgacattctaagatcacagtggtcgcctgctttaacactttctaaagttcttttatccatttgttcactgctatgtgatccaaacccagatgatcccctagtgccagagattgcayggatctataaaacagacagagataagtacaacagaatatctcgggaatggactcagaagtatgccatgtgatgttaccttaaagtcagaataacctgcattatagctggaataaactttaaattactgtttcttttttgattttcttatccggctgctcccctatcagacctcaccttttttaattttatttttttttacctccctccattcattcacatgcttatctgagaagacttaagttcttccagctttggacaataactgcttttagaaactgtaaagtagttacaagagaacagttgctgcccaagactcagaatttaaaaaaaaaaaaatggagcatgtgtattatgtagccaatgtcttcactctaacttggttatgagactaaaaccattcctcattgctctaacatgctgaagaaatcatctgagggggagggagaaggatgctcagttgtcacatcaaaggatacagcattattccagcagcatccattcttgtttaagccttccactgttacagatttgaggttacatgatatactttatgctcataactgatgtggctagagaactggtattgaatttatagcatcagcagaacagaaaatgtgatgtattttatgcatgtcaataaaggaatgacctgttcttgttctacagagaatggaaattggaagtcaaacaccctttgtattccaaaatagggtctcaaacattttgtaattttcatttaaattgttaggaggctcggagctattagttaatctatcttccaatacactgtttgatatagcactgaataaatgatgcaagttgtcaatggatgagtgatcaactaayagctctgctagtaattgatttatttttcttcaataaagttaaataaaccaatgagttagctgcctggattartcagtatgggaaaygatcttttataaatgcaaagctgttttttgtatatactgttgggatttgcttcattgtttgacatcaaatgatgatgtaaagttcaaaagagtgaatattttgccatgttcagttaaagcgcacagtctgttacaggttgacacattgcttgacctgatttatgcagaattaataagctatttagatagcgtagctttaaagtgctgcacatgatactggcagccctagagttcatagayggacttttgggacccagcagttttgaaacgtgtttatggagtttaagaaatttattttccaggtgcagcccctgtctaactgaaatttctcttcaycttgtacatttgacagctgaaaaaaaataacatgggagtaataatcggtcaaaatttgcaaaataaagtactgttttggtgtggggaaaaa

SEQ ID NO: 3530 - DNA, 798 bp, Homo sapiens
ggttttacaacccgtgacttctttccaactcaaagctgtagtttacttacaacacaaattctaaacacatagactgtatatacagattttttgaacccacaaataaaaaataccctccaaaaaaaaaaaaaaaagacagtgagttgaagcctcgtcattgtctaagtcacaccagctgggcttgccttggagacctgcccctgctcagttctgttcctgttctcctggccctggctgataaaactggcgatgtatacattgacaaaggtggccatcagatactggcagtcaaagcgatccatgatgcctccatggccaggaatggtattggcaaagtctttgattttaaaggctcgtttgaatccacttgcraagaatcctccaaaggggccaatgagcgaggcaaaggtggagagagcgatgctgtgaatctggaaggggtacatccggaccgttttccagccaatgactgactggatcaccccaggaatgttgtactcctgcaggcgaaacaggtccgagggctcacagtccacagtgaagctgttggtgtcattgttgtactccacagggcagacaaagcatctgtacccggacatcacataggacagcagaaggccaaacaccacagtagcaaagaagcccccaatgaagccttcccaggtyttcttcggggacagcttgatgagtggggtccgaccaaagaaaaagccaaacatataggccatgatgtcattacagatcacacaagatatggggacaatgaaccagatcattccttcaaataggttgtggata

SEQ ID NO: 3531 - DNA, 3040 bp, Homo sapiens
cgccattggtggatattccggaccgtgatggtggcgctgcgcgtgcgcactcgctccgagccctgctcccgggagagggagctctcgggtcggggctagggaaggctgaccccgctcggcccgggtgaaagggcggtgacggcactgggtggggccgagctccagggctggctgctgggctgctaagggaactgtgagccgctcagagccgcgcgcctcccgggcggggcgggsccggccgtgggagtccgcgcgtgcccgcgccgagctgcctgctccggcggcttcgctgctagctcgcggcgacgtcgggccgattttcccaggatgacagagctgaggcagagggtggcccatgagccggttgcgccacccgaggacaaggagtcagagtcagaagcmaaggtagatggagagactgcatcggacagtgagagccgggcagaatccgcacccctgccagtctctgcagatgataccccggaggtcctcaatagggccctttccaacttgtcttcaagatggaagaactggtgggtgagaggcatcctgactttggccatgattgcatttttcttcatcatcatttacctgggaccaatggttttgatgataatcgtgatgtgcgttcagattaagtgtttccatgagataatcactattggctacaacgtctaccactcatatgatctgccctggttcaggacgctcagctggtactttctcctgtgtgtaaactatttcttctatggtgagacagtgacggattacttcttcaccctggtccagagagaagagcctttgcggattctcagtaaataccaccggttcatttcctttactctctatctaataggattctgcatgtttgtrctgagtctggtcaagaagcattatcgactgcagttctacatgtttggctggacccatgtgacattgctgattgttgtaacacagtcacatcttgttatccacaacctatttgaaggaatgatctggttcattgtccccatatcttgtgtgatctgtaatgacatcatggcctatatgtttggctttttctttggtcggaccccactcatcaagctgtccccgaagaaracctgggaaggcttcattgggggcttctttgctactgtggtgtttggccttctgctgtcctatgtgatgtccgggtacagatgctttgtctgccctgtggagtacaacaatgacaccaacagcttcactgtggactgtgagccctcggacctgtttcgcctgcaggagtacaacattcctggggtgatccagtcagtcattggctggaaaacggtccggatgtaccccttccagattcacagcatcgctctctccacctttgcctcgctcattggcccctttggaggattcttygcaagtggattcaaacgagcctttaaaatcaaagactttgccaataccattcctggccatggaggcatcatggatcgctttgactgccagtatctgatggccacctttgtcaatgtatacatcgccagttttatcagaggccctaacccaagcaaactgattcagcagttcctgactttacggccagatcagcagctccacatcttcaacacgctgcggtctcatctgatcgacaaagggatgctgacatccaccacagaggacgagtaggggccacccagggccaggagaacaggaacagaactgagcaggggcaggtctccaaggcaagcccagctggtgtgacttagacaatgacgaggcttcaactcactgtcttttttttttttttttggagggtattttttatttgtgggttcaaaaaatctgtatatacagtctatgtgtttagaatttgtgttgtaagtaaactacagctttgagttggaaagaagtcacgggttgtaaaaccatttggatttttttaaaacaaaagtattaataatctggaagacagtgttgcccaggtcaggagtgttttcttggtggttccagcccccatcaattgaactgtttctgggctcagtcagacacagacattcatctgtgtctgaccaaatcaggggacttccccacctgtggtgggaggcacagcttagatgttttgtacacctggtcttttctagaaatccctgcttggagctgcagaagggttgccttctgtaggtcggaggaatggaggcttactaaccaggtaagccttctatgcatccacaccaaaatcctgcagaatgtaagtaagctctgctttataagatgggttcaccttcatcgcagactgaaagtttcagtttttatttttttcagaaagcacgaaaaattatttataatagtctggagaaaaaacacactgtaatatttcaagtgtatgcagtagaatgtactgtaactgagccctttcccacatgtctaggctccaatgtctcctgtaggtccacctaactgtgtgttttcagggacaatgccatccatgtttgtgctgtagacttgctgctgctgaatcctttctggggactttctcatcgggcagggagcagagggcttctcgttcatgcaccctttgcctgaacacccatgtagctgctgtgttgtgtatatattactcttaagaggagtgtgtgtgtctgtgtttgttttaaaagtcacttatttcttacagtgatttcaattgcaccatgacttcttcactaaaaccacaaagtcctgcttaaaactatggaaaacctaacctgattagagccttgactattttgaagattaaatgcacactttttatataatgtgaccagtttaaatgtagtttgtattgtactgggggacctttygttgttgttgtttgcttaaactgtgattttttttcccctccctaatttcaggggtgagattgactttgggaagacagattagttctttgtcaggccaacaagtgatggagtgcgggagagagaacttggcacccaaatatatcaaactattccgtgccgtggatgttttcattgccaacgagggtgtaatgatttgcttctgcaccttggtctagtgctgg

SEQ ID NO: 3532 - DNA, 3064 bp, Homo sapiens
atggccgcggcggcggcctcgccacgtgacccggacgggcggaagcggaagtgccggcctggagcccgctctaggtgggtgtcccctcggtgcttccyagctgccgtctgcaccagccatggactgctacacggcgaactggaacccactcggggactctgccttttaccggaaatatgagctgtacagcatggactgggacctgaaggaggaactcagggattgcctggtggctgctgcaccctatgggggccccattgcactgctgaggaacccctggcggaaggagaaagctgctagtgtgaggccagtgctcgatatatactctgcttcyggcatgcctctggccagcctgctgtggaagagtggacccgtggtgtccctgggctggtcagctgaggargagctgctctgtgtgcaggaagatggtgctgtactggtttatgggcttcatggtgacttccggagacacttcagcatgggcaatgaagtgctccagaaccgggttctggatgcccggatctttcacactgagtttggttccggagtggccatcctcacaggggcccaccgcttcaccctcagtgccaatgtgggtgacctcaaactccgccggatgccagaggtgccaggtctgcaaagtgcaccctcctgctggactgtgctgtgccaggaccgagtggcacacattcttctggctgtggggcctgacctttacctcttggaccatgcagcctgctccgcartgacgccccctggcctggccccaggagtaagcagcttcctacagatggctgtctccttcacctaccgacacctggcactcttcacagacacaggctacatctggatggggacagcatcactcaaggagaagctatgtgagttcaactgcaacatccgggcacctccaaagcagatggtctggtgcagccgtcctcgtagcaaggagagggccgtggtggtggcctgggaaaggcggctgatggtggtgggcgatgcacccgagagcatccagtttgtgctggatgaggactcctacctggtgcctgagctcgatggggtccgcatcttctcccgcagcacccacgagttcctgcatgaggttccagcggccagcgaggaaatcttcaaaattgcctcaatggcccccggggcgctgctcctggaggctcagaaggagtatgagaaagagagccagaaggcggacgagtacctgcgggagatccaggagctgggccagctgacccaggccgtgcagcagtgcattgaggctgcaggacatgagcaccagccagacatgcagaagagtctgctcagggccgcctccttcggaaagtgtttcctggacagatttccacccgacagcttcgtgcacatgtgtcaggacctgcgtgtgctcaatgctgttcgggactatcacatcgggatcccgctcacctatagccaatataagcagctcaccatccaggtgctgctggacaggctcgtgttgcggagactttaccccctggccatccagatatgcgagtacttgcgccttcctgaagtacagggcgtcagcaggatcctggcccactgggcctgctacaaggtgcaacagaaggatgtctcagatgaggatgtggctcgagccattaaccagaagctgggggacacgcctggtgtctcttactccracattgctgcacgagcctatggttgtggccgcacggagctggccatcaagctgctggagtatgagccacgctcaggggagcaggtaccccttctcctaaagatgaagaggagcaaactggcactaagcaaggccatygagagcggggacactgacctggtgttcacggtgttgctgcacctgaagaaygagctgaaccgaggagattttttcatgacccttcggaatcagcccatggccctcagtttgtaccgacagttctgtaagcatcaggagctaragacgctgaaggacctttacaatcaggatgacaatcaccaggaattgggcagcttccacatccgagccakctatgctgcagaagagcgtattgaggggcgagtagcagctctgcagacagccgccgatgccttctacaaggccaagaatgagtttgcagccaaggctacagaggatcaaatgcggctcctacggctgcagcggcgcctagaagacgagctggggggccagttcctagacctgtctctacatgacacagttaccaccctcattcttggcggtcacaacaagcgtgcagagcagctggcacgtgacttccgcatccctgacaagaggctctggyggctgaagctgactgccctggcagatttggaagattgggaagagctagagaagttttccaagagcaagaaatcacccattggctacctgccttttgtggagatctgcatgaaacaacataacaaatacgaagccaagaagtatgcttcccgcgtgggtcccgagcagaaggtcaaggctttgcttcttgttggcgatgtggctcaggctgcagatgtggccatcgaacaccggaatgaggctgagctgagcctcgtattgtcccactgcacgggagccacagatggggccacagctgacaagattcaacgggccagggcacaagcccagaaraagtgaggagtccatcctgtacatctcaagcaaggggttcctcccctagcacctgggcttggcagaagggccatagttcatccagctcctcccctagagcaatgctgaggagcgggggcatggtagcagggctgtctggttttaaataaagttggaacacttyacagtgyttgtcttacacagtccagcctaagcaaaggcaagctcaagacaggatcctccagacaccacagcaaaactccatgtgttccgttgtgttgggaccggaggtgggggcttctccagccatactcgcaagaaacgtgtcctctccacagttaccaaggaaagctttctctatctcacagctcctaggaagattatagggagagatggcacaaaacttaagcaccagctcaccaagaacatactgtaaagcattctgtgtgtgtg

SEQ ID NO: 3533 - DNA, 5768 bp, Homo sapiens
atggccgcggcggcggcctcgccacgtgacccggacgggcggaagcggaagtgccggcctggagcccgctctaggtgggtgtcccctcggtgcttccyagctgccgtctgcaccagccatggactgctacacggcgaactggaacccactcggggactctgccttttaccggaaatatgagctgtacagcatggactgggacctgaaggaggaactcagggattgcctggtggctgctgcaccctatgggggccccattgcactgctgaggaacccctggcggaaggagaaagctgctagtgtgaggccagtgctcgatatatactctgcttcyggcatgcctctggccagcctgctgtggaagagtggacccgtggtgtccctgggctggtcagctgaggargagctgctctgtgtgcaggaagatggtgctgtactggtttatgggcttcatggtgacttccggagacacttcagcatgggcaatgaagtgctccagaaccgggttctggatgcccggatctttcacactgagtttggttccggagtggccatcctcacaggggcccaccgcttcaccctcagtgccaatgtgggtgacctcaaactccgccggatgccagaggtgccaggtctgcaaagtgcaccctcctgctggactgtgctgtgccaggaccgagtggcacacattcttctggctgtggggcctgacctttacctcttggaccatgcagcctgctccgcartgacgccccctggcctggccccaggagtaagcagcttcctacagatggctgtctccttcacctaccgacacctggcactcttcacagacacaggctacatctggatggggacagcatcactcaaggagaagctatgtgagttcaactgcaacatccgggcacctccaaagcagatggtctggtgcagccgtcctcgtagcaaggagagggccgtggtggtggcctgggaaaggcggctgatggtggtgggcgatgcacccgagagcatccagtttgtgctggatgaggactcctacctggtgcctgagctcgatggggtccgcatcttctcccgcagcacccacgagttcctgcatgaggttccagcggccagcgaggaaatcttcaaaattgcctcaatggcccccggggcgctgctcctggaggctcagaaggagtatgagaaagagagccagaaggcggacgagtacctgcgggagatccaggagctgggccagctgacccaggccgtgcagcagtgcattgaggctgcaggacatgagcaccagccagacatgcagaagagtctgctcagggccgcctccttcggaaagtgtttcctggacagatttccacccgacagcttcgtgcacatgtgtcaggacctgcgtgtgctcaatgctgttcgggactatcacatcgggatcccgctcacctatagccaatataagcagctcaccatccaggtgctgctggacaggctcgtgttgcggagactttaccccctggccatccagatatgcgagtacttgcgccttcctgaagtacagggcgtcagcaggatcctggcccactgggcctgctacaaggtgcaacagaaggatgtctcagatgaggatgtggctcgagccattaaccagaagctgggggacacgcctggtgtctcttactccracattgctgcacgagcctatggttgtggccgcacggagctggccatcaagctgctggagtatgagccacgctcaggggagcaggtaccccttctcctaaagatgaagaggagcaaactggcactaagcaaggccatygagagcggggacactgacctggtgttcacggtgttgctgcacctgaagaaygagctgaaccgaggagattttttcatgacccttcggaatcagcccatggccctcagtttgtaccgacagttctgtaagcatcaggagctaragacgctgaaggacctttacaatcaggatgacaatcaccaggaattgggcagcttccacatccgagccakctatgctgcagaagagcgtattgaggggcgagtagcagctctgcagacagccgccgatgccttctacaaggccaagaatgagtttgcagccaaggctacagaggatcaaatgcggctcctacggctgcagcggcgcctagaagacgagctggggggccagttcctagacctgtctctacatgacacagttaccaccctcattcttggcggtcacaacaagcgtgcagagcagctggcacgtgacttccgcatccctgacaagaggtgacacaactaaaaaaaaacaaaggtatttatggaattccactgagtggtaatggatgatgcagttcaaataactaaggacacatgttcaaagagcataattaactttttaaaagaagctaataagcatggattcctggttcattcttgttctgctcggcagtggtctgatatgtgtcagtgccaacaatgctaccacagttgcaccttctgtaggaattacaagattaattaactcatcaacggcagaaccagttaaagaagaggccaaaacttcaaatccaacttcttcactaacttctctttctgtggcaccaacattcagcccaaatataactctgggacccacctatttaaccactgtcaattcttcagactctgacaatgggaccacaagaacagcaagcaccaattctataggcattacaatttcaccaaatggaacgtggcttcyagataaccagttcacggatgccagaacagaaccctgggaggggaattccagcaccgcagcaaccactccagaaactttccctccttcaggtaattctgactcgaaggacagaagagatgagacaccaattattgcggtgatggtggccctgtcctctctgctagtgatcgtgtttattatcatagttttgtacatgttaaggtttaagaaatacaagcaagctgggagccattccaattctttccgcttatccaacggccgcactgaggatgtggagccccagagtgtgccacttctggccagatcsccaagcaccaacaggaaatacccacccctgcccgtggacaagctggaagaggaaattaaccggagratggcagacgacaataagctcttcagggaggaattcaacgctctccctgcatgtcctatccaggccacctgtgaggctgcttccaaggaggaaaacaaggaaaaaaatcgatatgtaaacatcttgccttatgaccactctagagtccacctgacaccggttgaaggggttccagattctgattacatcaatgcttcattcatcaacggytaccaagaaaagaacaaattcattgctgcacaaggaccaaaagaagaaacggtgaatgatttctggcggatgatctgggaacaaaacacagccaccatcgtcatggttaccaacctgaaggagagaaaggagtgcaagtgcgcccagtactggccagaccaaggctgctggacctatgggaatattcgggygtctgtagaggatgtgactgtcctggtggactacacagtacggaagttctgcatccagcaggtgggcgacatgaccaacagaaagccacagcgcctcatcactcagttccactttaccagctggccagactttggggtgccttttaccccgatcggcatgctcaagttcctcaagaaggtgaaggcctgtaaccctcagtatgcaggggccatcgtggtccactgcagtgcaggtgtagggcgtacaggtacctttgtcgtcattgatgccatgctggacatgatgcatacagaacggaaggtggacgtgtatggctttgtgagccggatccgggcacagcgctgccagatggtgcaaaccgatatgcagtatgtcttcatataccaagcccttctggagcattatctctatggagatacagaactggaagtgacctctctagaaacccacctgcagaaaatttacaacaaaatcccagggaccagcaacaatggattagaggaggagtttaagaagttaacatcaatcaaaatccagaatgacaagatgcggactggaaaccttccagccaacatgaagaagaaccgtgttttacagatcattccatatgaattcaacagagtgatcattccagttaagcggggcgaagagaatacagactatgtgaacgcatcctttattgatggctaccggcagaaggactcctatatcgccagccagggccctcttctccacacaattgaggacttctggcgaatgatctgggagtggaaatcctgytctatcgtgatgctaacagaactggaggagagaggccaggagaagtgtgcccagtactggccatctgatggactggtgtcctatggagatattacagtggaactgaagaaggaggaggaatgtgagagctacaccstccgagacctcctggtcaccaacaccagggagaataagagccggcagatccggcagttccacttccatggctggcctgaagtgggcatccccagtgacggaaagggcatgatcagcatcatcgccgccgtgcagaagcagcagcagcagtcagggaaccaccccatcaccgtgcactgcagcgccggggcaggaaggacggggaccttctgtgccctgagcaccgtcctggagcgtgtgaaagcagaggggattttggatgtcttccagactgtcaagagcctgcggctacagaggccacacatggtccagacactggaacagtatgagttctgctacaaggtggtgcaggagtatattgatgcattctcagattatgccaacttcaagtaagcrgcaacaagggtccgtggaccaggaggattgcctttaatattttgtaatattctgttttgttaatataccccaaattgtgtatatatcttataactgttttagaaattggtacataggcttctattacctattaggtggaaattttatatgtaaatgtgttagcactgatagtcctttttccaatgttttattggggaattaaatagtgtgatgtttggattgatatcgtgaaatcctcagccgagaaattgggctggattgygctttggttaatacatctttccctaaagaagataaacacaaaatccattccaggtagctcggcaccaactaagaaaaaaagcacaaagttctcagagctctcgaggaaagtggttgtccccgtaccaccatgcactgtaaatatccctcccctctctccctggtcccctcccccatccccaccactgatatcatggggagtaataggaccagagcggtatctctggcaccmcactagggactatcaggtaataaaagctttgactccctgaggaaatgtctctccctttgtctgggggtggggcagccatacaggctggggctctcctcggctgttcatggccctcctgttgctgttctctctgagttatctgagagaggccacagtcccccagctcctcctgtccaccaaacacagcccttccagttcttaggtgatctccaggaccctcctttcattcccagcacatctttggtttagtggtcctggccagcctccctcyctaggaaggtggccaggtcctcactgagtctccttaaggacaggggcacaggggagactagagctggctcagctttgggctgaggccagtctgacctctccagtctgtggtgctttgctacaaaactgtctggattgtgtcaccctatctaggataaatctttatgtccaca

SEQ ID NO: 3534 - DNA, 1565 bp, Homo sapiens
gtgcaacagaaggatgtctcagatgaggatgtggctcgagccattaaccagaagctgggggacacgcctggtgtctcttactccracattgctgcacgagcctatggttgtggccgcacggagctggccatcaaggtgtgggtgcccagccctccacagacactctgatgtggttgttcagggcccccatgccagctccttctctctgtgccttccttctcacctcacagctgctggagtatgagccacgctcaggggagcaggtaccccttctcctaaagatgaagaggagcaaactggcactaagcaaggccatygagagcggggacactgacctggtgttcacggtgttgctgcacctgaagaaygagctgaaccgaggagattttttcatgacccttcggaatcagcccatggccctcagtttgtaccgacagttctgtaagcatcaggagctaragacgctgaaggacctttacaatcaggatgacaatcaccaggaattgggcagcttccacatccgagccakctatgctgcagaagagcgtattgaggggcgagtagcagctctgcagacagccgccgatgccttctacaaggccaagaatgagtttgcagccaaggctacagaggatcaaatgcggctcctacggctgcagcggcgcctagaagacgagctggggggccagttcctagacctgtctctacatgacacagttaccaccctcattcttggcggtcacaacaagcgtgcagagcagctggcacgtgacttccgcatccctgacaagaggctctggyggctgaagctgactgccctggcagatttggaagattgggaagagctagagaagttttccaagagcaagaaatcacccattggctacctgccttttgtggagatctgcatgaaacaacataacaaatacgaagccaagaagtatgcttcccgcgtgggtcccgagcagaaggtcaaggctttgcttcttgttggcgatgtggctcaggctgcagatgtggccatcgaacaccggaatgaggctgagctgagcctcgtattgtcccactgcacgggagccacagatggggccacagctgacaagattcaacgggccagggcacaagcccagaaraagtgaggagtccatcctgtacatctcaagcaaggggttcctcccctagcacctgggcttggcagaagggccatagttcatccagctcctcccctagagcaatgctgaggagcgggggcatggtagcagggctgtctggttttaaataaagttggaacacttyacagtgyttgtcttacacagtccagcctaagcaaaggcaagctcaagacaggatcctccagacaccacagcaaaactccatgtgttccgttgtgttgggaccggaggtgggggcttctccagccatactcgcaagaaacgtgtcctctccacagttaccaaggaaagctttctctatctcacagctcctaggaagattatagggagagatggcacaaaacttaagcaccagctcaccaagaacatactgtaaagcattctgtgtgtgtg

SEQ ID NO: 3535 - DNA, 2932 bp, Homo sapiens
atggccgcggcggcggcctcgccacgtgacccggacgggcggaagcggaagtgccggcctggagcccgctctaggtgggtgtcccctcggtgcttccyagctgccgtctgcaccagccatggactgctacacggcgaactggaacccactcggggactctgccttttaccggaaatatgagctgtacagcatggactgggacctgaaggaggaactcagggattgcctggtggctgctgcaccctatgggggccccattggaagtgctccagaaccgggttctggatgcccggatctttcacactgagtttggttccggagtggccatcctcacaggggcccaccgcttcaccctcagtgccaatgtgggtgacctcaaactccgccggatgccagaggtgccaggtctgcaaagtgcaccctcctgctggactgtgctgtgccaggaccgagtggcacacattcttctggctgtggggcctgacctttacctcttggaccatgcagcctgctccgcartgacgccccctggcctggccccaggagtaagcagcttcctacagatggctgtctccttcacctaccgacacctggcactcttcacagacacaggctacatctggatggggacagcatcactcaaggagaagctatgtgagttcaactgcaacatccgggcacctccaaagcagatggtctggtgcagccgtcctcgtagcaaggagagggccgtggtggtggcctgggaaaggcggctgatggtggtgggcgatgcacccgagagcatccagtttgtgctggatgaggactcctacctggtgcctgagctcgatggggtccgcatcttctcccgcagcacccacgagttcctgcatgaggttccagcggccagcgaggaaatcttcaaaattgcctcaatggcccccggggcgctgctcctggaggctcagaaggagtatgagaaagagagccagaaggcggacgagtacctgcgggagatccaggagctgggccagctgacccaggccgtgcagcagtgcattgaggctgcaggacatgagcaccagccagacatgcagaagagtctgctcagggccgcctccttcggaaagtgtttcctggacagatttccacccgacagcttcgtgcacatgtgtcaggacctgcgtgtgctcaatgctgttcgggactatcacatcgggatcccgctcacctatagccaatataagcagctcaccatccaggtgctgctggacaggctcgtgttgcggagactttaccccctggccatccagatatgcgagtacttgcgccttcctgaagtacagggcgtcagcaggatcctggcccactgggcctgctacaaggtgcaacagaaggatgtctcagatgaggatgtggctcgagccattaaccagaagctgggggacacgcctggtgtctcttactccracattgctgcacgagcctatggttgtggccgcacggagctggccatcaaggtgtgggtgcccagccctccacagacactctgatgtggttgttcagggcccccatgccagctccttctctctgtgccttccttctcacctcacagctgctggagtatgagccacgctcaggggagcaggtaccccttctcctaaagatgaagaggagcaaactggcactaagcaaggccatygagagcggggacactgacctggtgttcacggtgttgctgcacctgaagaaygagctgaaccgaggagattttttcatgacccttcggaatcagcccatggccctcagtttgtaccgacagttctgtaagcatcaggagctaragacgctgaaggacctttacaatcaggatgacaatcaccaggaattgggcagcttccacatccgagccakctatgctgcagaagagcgtattgaggggcgagtagcagctctgcagacagccgccgatgccttctacaaggccaagaatgagtttgcagccaaggctacagaggatcaaatgcggctcctacggctgcagcggcgcctagaagacgagctggggggccagttcctagacctgtctctacatgacacagttaccaccctcattcttggcggtcacaacaagcgtgcagagcagctggcacgtgacttccgcatccctgacaagaggctctggyggctgaagctgactgccctggcagatttggaagattgggaagagctagagaagttttccaagagcaagaaatcacccattggctacctgccttttgtggagatctgcatgaaacaacataacaaatacgaagccaagaagtatgcttcccgcgtgggtcccgagcagaaggtcaaggctttgcttcttgttggcgatgtggctcaggctgcagatgtggccatcgaacaccggaatgaggctgagctgagcctcgtattgtcccactgcacgggagccacagatggggccacagctgacaagattcaacgggccagggcacaagcccagaaraagtgaggagtccatcctgtacatctcaagcaaggggttcctcccctagcacctgggcttggcagaagggccatagttcatccagctcctcccctagagcaatgctgaggagcgggggcatggtagcagggctgtctggttttaaataaagttggaacacttyacagtgyttgtcttacacagtccagcctaagcaaaggcaagctcaagacaggatcctccagacaccacagcaaaactccatgtgttccgttgtgttgggaccggaggtgggggcttctccagccatactcgcaagaaacgtgtcctctccacagttaccaaggaaagctttctctatctcacagctcctaggaagattatagggagagatggcacaaaacttaagcaccagctcaccaagaacatactgtaaagcattctgtgtgtgtg

SEQ ID NO: 3536 - DNA, 2955 bp, Homo sapiens
atggccgcggcggcggcctcgccacgtgacccggacgggcggaagcggaagtgccggcctggagcccgctctaggtgggtgtcccctcggtgcttccyagctgccgtctgcaccagccatggactgctacacggcgaactggaacccactcggggactctgccttttaccggaaatatgagctgtacagcatggactgggacctgaaggaggaactcagggattgcctggtggctgctgcaccctatgggggccccattgcactgctgaggaacccctggcggaaggagaaagctgctagtgtgaggccagtgctcgatatatactctgcttcyggcatgcctctggccagcctgctgtggaagagtggacccgtggtgtccctgggctggtcagctgaggargagctgctctgtgtgcaggaagatggtgctgtactggtttatgggcttcatggtgacttccggagacacttcagcatgggcaatgaagtgctccagaaccgggttctggatgcccggatctttcacactgagtttggttccggagtggccatcctcacaggggcccaccgcttcaccctcagtgccaatgtgggtgacctcaaactccgccggatgccagaggtgccaggtctgcaaagtgcaccctcctgctggactgtgctgtgccaggaccgagtggcacacattcttctggctgtggggcctgacctttacctcttggaccatgcagcctgctccgcartgacgccccctggcctggccccaggagtaagcagcttcctacagatggctgtctccttcacctaccgacacctggcactcttcacagacacaggctacatctggatggggacagcatcactcaaggagaagctatgtgagttcaactgcaacatccgggcacctccaaagcagatggtctggtgcagccgtcctcgtagcaaggagagggccgtggtggtggcctgggaaaggcggctgatggtggtgggcgatgcacccgagagcatccagtttgtgctggatgaggactcctacctggtgcctgagctcgatggggtccgcatcttctcccgcagcacccacgagttcctgcatgaggttccagcggccagcgaggaaatcttcaaaattgcctcaatggcccccggggcgctgctcctggaggctcagaaggagtatgagaaagagagccagaaggcggacgagtacctgcgggagatccaggagctgggccagctgacccaggccgtgcagcagtgcattgaggctgcaggacatgagcaccagccagacatgcagaagagtctgctcagggccgcctccttcggaaagtgtttcctggacagatttccacccgacagcttcgtgcacatgtgtcaggacctgcgtgtgctcaatgctgttcgggactatcacatcgggatcccgctcacctatagccaatataagcagctcaccatccaggtgctgctggacaggtgcaacagaaggatgtctcagatgaggatgtggctcgagccattaaccagaagctgggggacacgcctggtgtctcttactccracattgctgcacgagcctatggttgtggccgcacggagctggccatcaagctgctggagtatgagccacgctcaggggagcaggtaccccttctcctaaagatgaagaggagcaaactggcactaagcaaggccatygagagcggggacactgacctggtgttcacggtgttgctgcacctgaagaaygagctgaaccgaggagattttttcatgacccttcggaatcagcccatggccctcagtttgtaccgacagttctgtaagcatcaggagctaragacgctgaaggacctttacaatcaggatgacaatcaccaggaattgggcagcttccacatccgagccakctatgctgcagaagagcgtattgaggggcgagtagcagctctgcagacagccgccgatgccttctacaaggccaagaatgagtttgcagccaaggctacagaggatcaaatgcggctcctacggctgcagcggcgcctagaagacgagctggggggccagttcctagacctgtctctacatgacacagttaccaccctcattcttggcggtcacaacaagcgtgcagagcagctggcacgtgacttccgcatccctgacaagaggctctggyggctgaagctgactgccctggcagatttggaagattgggaagagctagagaagttttccaagagcaagaaatcacccattggctacctgccttttgtggagatctgcatgaaacaacataacaaatacgaagccaagaagtatgcttcccgcgtgggtcccgagcagaaggtcaaggctttgcttcttgttggcgatgtggctcaggctgcagatgtggccatcgaacaccggaatgaggctgagctgagcctcgtattgtcccactgcacgggagccacagatggggccacagctgacaagattcaacgggccagggcacaagcccagaaraagtgaggagtccatcctgtacatctcaagcaaggggttcctcccctagcacctgggcttggcagaagggccatagttcatccagctcctcccctagagcaatgctgaggagcgggggcatggtagcagggctgtctggttttaaataaagttggaacacttyacagtgyttgtcttacacagtccagcctaagcaaaggcaagctcaagacaggatcctccagacaccacagcaaaactccatgtgttccgttgtgttgggaccggaggtgggggcttctccagccatactcgcaagaaacgtgtcctctccacagttaccaaggaaagctttctctatctcacagctcctaggaagattatagggagagatggcacaaaacttaagcaccagctcaccaagaacatactgtaaagcattctgtgtgtgtg

SEQ ID NO: 3537 - DNA, 4269 bp, Homo sapiens
gtgcaacagaaggatgtctcagatgaggatgtggctcgagccattaaccagaagctgggggacacgcctggtgtctcttactccracattgctgcacgagcctatggttgtggccgcacggagctggccatcaaggtgtgggtgcccagccctccacagacactctgatgtggttgttcagggcccccatgccagctccttctctctgtgccttccttctcacctcacagctgctggagtatgagccacgctcaggggagcaggtaccccttctcctaaagatgaagaggagcaaactggcactaagcaaggccatygagagcggggacactgacctggtgttcacggtgttgctgcacctgaagaaygagctgaaccgaggagattttttcatgacccttcggaatcagcccatggccctcagtttgtaccgacagttctgtaagcatcaggagctaragacgctgaaggacctttacaatcaggatgacaatcaccaggaattgggcagcttccacatccgagccakctatgctgcagaagagcgtattgaggggcgagtagcagctctgcagacagccgccgatgccttctacaaggccaagaatgagtttgcagccaaggctacagaggatcaaatgcggctcctacggctgcagcggcgcctagaagacgagctggggggccagttcctagacctgtctctacatgacacagttaccaccctcattcttggcggtcacaacaagcgtgcagagcagctggcacgtgacttccgcatccctgacaagaggtgacacaactaaaaaaaaacaaaggtatttatggaattccactgagtggtaatggatgatgcagttcaaataactaaggacacatgttcaaagagcataattaactttttaaaagaagctaataagcatggattcctggttcattcttgttctgctcggcagtggtctgatatgtgtcagtgccaacaatgctaccacagttgcaccttctgtaggaattacaagattaattaactcatcaacggcagaaccagttaaagaagaggccaaaacttcaaatccaacttcttcactaacttctctttctgtggcaccaacattcagcccaaatataactctgggacccacctatttaaccactgtcaattcttcagactctgacaatgggaccacaagaacagcaagcaccaattctataggcattacaatttcaccaaatggaacgtggcttcyagataaccagttcacggatgccagaacagaaccctgggaggggaattccagcaccgcagcaaccactccagaaactttccctccttcaggtaattctgactcgaaggacagaagagatgagacaccaattattgcggtgatggtggccctgtcctctctgctagtgatcgtgtttattatcatagttttgtacatgttaaggtttaagaaatacaagcaagctgggagccattccaattctttccgcttatccaacggccgcactgaggatgtggagccccagagtgtgccacttctggccagatcsccaagcaccaacaggaaatacccacccctgcccgtggacaagctggaagaggaaattaaccggagratggcagacgacaataagctcttcagggaggaattcaacgctctccctgcatgtcctatccaggccacctgtgaggctgcttccaaggaggaaaacaaggaaaaaaatcgatatgtaaacatcttgccttatgaccactctagagtccacctgacaccggttgaaggggttccagattctgattacatcaatgcttcattcatcaacggytaccaagaaaagaacaaattcattgctgcacaaggaccaaaagaagaaacggtgaatgatttctggcggatgatctgggaacaaaacacagccaccatcgtcatggttaccaacctgaaggagagaaaggagtgcaagtgcgcccagtactggccagaccaaggctgctggacctatgggaatattcgggygtctgtagaggatgtgactgtcctggtggactacacagtacggaagttctgcatccagcaggtgggcgacatgaccaacagaaagccacagcgcctcatcactcagttccactttaccagctggccagactttggggtgccttttaccccgatcggcatgctcaagttcctcaagaaggtgaaggcctgtaaccctcagtatgcaggggccatcgtggtccactgcagtgcaggtgtagggcgtacaggtacctttgtcgtcattgatgccatgctggacatgatgcatacagaacggaaggtggacgtgtatggctttgtgagccggatccgggcacagcgctgccagatggtgcaaaccgatatgcagtatgtcttcatataccaagcccttctggagcattatctctatggagatacagaactggaagtgacctctctagaaacccacctgcagaaaatttacaacaaaatcccagggaccagcaacaatggattagaggaggagtttaagaagttaacatcaatcaaaatccagaatgacaagatgcggactggaaaccttccagccaacatgaagaagaaccgtgttttacagatcattccatatgaattcaacagagtgatcattccagttaagcggggcgaagagaatacagactatgtgaacgcatcctttattgatggctaccggcagaaggactcctatatcgccagccagggccctcttctccacacaattgaggacttctggcgaatgatctgggagtggaaatcctgytctatcgtgatgctaacagaactggaggagagaggccaggagaagtgtgcccagtactggccatctgatggactggtgtcctatggagatattacagtggaactgaagaaggaggaggaatgtgagagctacaccstccgagacctcctggtcaccaacaccagggagaataagagccggcagatccggcagttccacttccatggctggcctgaagtgggcatccccagtgacggaaagggcatgatcagcatcatcgccgccgtgcagaagcagcagcagcagtcagggaaccaccccatcaccgtgcactgcagcgccggggcaggaaggacggggaccttctgtgccctgagcaccgtcctggagcgtgtgaaagcagaggggattttggatgtcttccagactgtcaagagcctgcggctacagaggccacacatggtccagacactggaacagtatgagttctgctacaaggtggtgcaggagtatattgatgcattctcagattatgccaacttcaagtaagcrgcaacaagggtccgtggaccaggaggattgcctttaatattttgtaatattctgttttgttaatataccccaaattgtgtatatatcttataactgttttagaaattggtacataggcttctattacctattaggtggaaattttatatgtaaatgtgttagcactgatagtcctttttccaatgttttattggggaattaaatagtgtgatgtttggattgatatcgtgaaatcctcagccgagaaattgggctggattgygctttggttaatacatctttccctaaagaagataaacacaaaatccattccaggtagctcggcaccaactaagaaaaaaagcacaaagttctcagagctctcgaggaaagtggttgtccccgtaccaccatgcactgtaaatatccctcccctctctccctggtcccctcccccatccccaccactgatatcatggggagtaataggaccagagcggtatctctggcaccmcactagggactatcaggtaataaaagctttgactccctgaggaaatgtctctccctttgtctgggggtggggcagccatacaggctggggctctcctcggctgttcatggccctcctgttgctgttctctctgagttatctgagagaggccacagtcccccagctcctcctgtccaccaaacacagcccttccagttcttaggtgatctccaggaccctcctttcattcccagcacatctttggtttagtggtcctggccagcctccctcyctaggaaggtggccaggtcctcactgagtctccttaaggacaggggcacaggggagactagagctggctcagctttgggctgaggccagtctgacctctccagtctgtggtgctttgctacaaaactgtctggattgtgtcaccctatctaggataaatctttatgtccaca

SEQ ID NO: 3538 - DNA, 2632 bp, Homo sapiens
atggccgcggcggcggcctcgccacgtgacccggacgggcggaagcggaagtgccggcctggagcccgctctaggtgggtgtcccctcggtgcttccyagctgccgtctgcaccagccatggactgctacacggcgaactggaacccactcggggactctgccttttaccggaaatatgagctgtacagcatggactgggacctgaaggaggaactcagggattgcctggtggctgctgcaccctatgggggccccattgcactgctgaggaacccctggcggaaggagaaagctgctagtgtgaggccagtgctcgatatatactctgcttcyggcatgcctctggccagcctgctgtggaagagtggacccgtggtgtccctgggctggtcagctgaggargagctgctctgtgtgcaggaagatggtgctgtactggtttatgggcttcatggtgacttccggagacacttcagcatgggcaatgaagtgctccagaaccgggttctggatgcccggatctttcacactgagtttggttccggagtggccatcctcacaggggcccaccgcttcaccctcagtgccaatgtgggtgacctcaaactccgccggatgccagaggtgccaggtctgcaaagtgcaccctcctgctggactgtgctgtgccaggaccgagtggcacacattcttctggctgtggggcctgacctttacctcttggaccatgcagcctgctccgcartgacgccccctggcctggccccaggagtaagcagcttcctacagatggctgtctccttcacctaccgacacctggcactcttcacagacacaggctacatctggatggggacagcatcactcaaggagaagctatgtgagttcaactgcaacatccgggcacctccaaagcagatggtctggtgcagccgtcctcgtagcaaggagagggccgtggtggtggcctgggaaaggcggctgatggtggtgggcgatgcacccgagagcatccaatataagcagctcaccatccaggtgctgctggacaggctcgtgttgcggagactttaccccctggccatccagatatgcgagtacttgcgccttcctgaagtacagggcgtcagcaggatcctggcccactgggcctgctacaaggtgcaacagaaggatgtctcagatgaggatgtggctcgagccattaaccagaagctgggggacacgcctggtgtctcttactccracattgctgcacgagcctatggttgtggccgcacggagctggccatcaagctgctggagtatgagccacgctcaggggagcaggtaccccttctcctaaagatgaagaggagcaaactggcactaagcaaggccatygagagcggggacactgacctggtgttcacggtgttgctgcacctgaagaaygagctgaaccgaggagattttttcatgacccttcggaatcagcccatggccctcagtttgtaccgacagttctgtaagcatcaggagctaragacgctgaaggacctttacaatcaggatgacaatcaccaggaattgggcagcttccacatccgagccakctatgctgcagaagagcgtattgaggggcgagtagcagctctgcagacagccgccgatgccttctacaaggccaagaatgagtttgcagccaaggctacagaggatcaaatgcggctcctacggctgcagcggcgcctagaagacgagctggggggccagttcctagacctgtctctacatgacacagttaccaccctcattcttggcggtcacaacaagcgtgcagagcagctggcacgtgacttccgcatccctgacaagaggctctggyggctgaagctgactgccctggcagatttggaagattgggaagagctagagaagttttccaagagcaagaaatcacccattggctacctgccttttgtggagatctgcatgaaacaacataacaaatacgaagccaagaagtatgcttcccgcgtgggtcccgagcagaaggtcaaggctttgcttcttgttggcgatgtggctcaggctgcagatgtggccatcgaacaccggaatgaggctgagctgagcctcgtattgtcccactgcacgggagccacagatggggccacagctgacaagattcaacgggccagggcacaagcccagaaraagtgaggagtccatcctgtacatctcaagcaaggggttcctcccctagcacctgggcttggcagaagggccatagttcatccagctcctcccctagagcaatgctgaggagcgggggcatggtagcagggctgtctggttttaaataaagttggaacacttyacagtgyttgtcttacacagtccagcctaagcaaaggcaagctcaagacaggatcctccagacaccacagcaaaactccatgtgttccgttgtgttgggaccggaggtgggggcttctccagccatactcgcaagaaacgtgtcctctccacagttaccaaggaaagctttctctatctcacagctcctaggaagattatagggagagatggcacaaaacttaagcaccagctcaccaagaacatactgtaaagcattctgtgtgtgtg

SEQ ID NO: 3539 - DNA, 5771 bp, Homo sapiens
atggccgcggcggcggcctcgccacgtgacccggacgggcggaagcggaagtgccggcctggagcccgctctaggtgggtgtcccctcggtgcttccyagctgccgtctgcaccagccatggactgctacacggcgaactggaacccactcggggactctgccttttaccggaaatatgagctgtacagcatggactgggacctgaaggaggaactcagggattgcctggtggctgctgcaccctatgggggccccattgcactgctgaggaacccctggcggaaggagaaagctgctagtgtgaggccagtgctcgatatatactctgcttcyggcatgcctctggccagcctgctgtggaagagtggacccgtggtgtccctgggctggtcagctgaggargagctgctctgtgtgcaggaagatggtgctgtactggtttatgggcttcatggtgacttccggagacacttcagcatgggcaatgaagtgctccagaaccgggttctggatgcccggatctttcacactgagtttggttccggagtggccatcctcacaggggcccaccgcttcaccctcagtgccaatgtgggtgacctcaaactccgccggatgccagaggtgccaggtctgcaaagtgcaccctcctgctggactgtgctgtgccaggaccgagtggcacacattcttctggctgtggggcctgacctttacctcttggaccatgcagcctgctccgcartgacgccccctggcctggccccaggagtaagcagcttcctacagatggctgtctccttcacctaccgacacctggcactcttcacagacacaggctacatctggatggggacagcatcactcaaggagaagctatgtgagttcaactgcaacatccgggcacctccaaagcagatggtctggtgcagccgtcctcgtagcaaggagagggccgtggtggtggcctgggaaaggcggctgatggtggtgggcgatgcacccgagagcatccagtttgtgctggatgaggactcctacctggtgcctgagctcgatggggtccgcatcttctcccgcagcacccacgagttcctgcatgaggttccaggcggacgagtacctgcgggagatccaggagctgggccagctgacccaggccgtgcagcagtgcattgaggctgcaggacatgagcaccagccagacatgcagaagagtctgctcagggccgcctccttcggaaagtgtttcctggacagatttccacccgacagcttcgtgcacatgtgtcaggacctgcgtgtgctcaatgctgttcgggactatcacatcgggatcccgctcacctatagccaatataagcagctcaccatccaggtgctgctggacaggctcgtgttgcggagactttaccccctggccatccagatatgcgagtacttgcgccttcctgaagtacagggcgtcagcaggatcctggcccactgggcctgctacaaggtgcaacagaaggatgtctcagatgaggatgtggctcgagccattaaccagaagctgggggacacgcctggtgtctcttactccracattgctgcacgagcctatggttgtggccgcacggagctggccatcaaggtgtgggtgcccagccctccacagacactctgatgtggttgttcagggcccccatgccagctccttctctctgtgccttccttctcacctcacagctgctggagtatgagccacgctcaggggagcaggtaccccttctcctaaagatgaagaggagcaaactggcactaagcaaggccatygagagcggggacactgacctggtgttcacggtgttgctgcacctgaagaaygagctgaaccgaggagattttttcatgacccttcggaatcagcccatggccctcagtttgtaccgacagttctgtaagcatcaggagctaragacgctgaaggacctttacaatcaggatgacaatcaccaggaattgggcagcttccacatccgagccakctatgctgcagaagagcgtattgaggggcgagtagcagctctgcagacagccgccgatgccttctacaaggccaagaatgagtttgcagccaaggctacagaggatcaaatgcggctcctacggctgcagcggcgcctagaagacgagctggggggccagttcctagacctgtctctacatgacacagttaccaccctcattcttggcggtcacaacaagcgtgcagagcagctggcacgtgacttccgcatccctgacaagaggtgacacaactaaaaaaaaacaaaggtatttatggaattccactgagtggtaatggatgatgcagttcaaataactaaggacacatgttcaaagagcataattaactttttaaaagaagctaataagcatggattcctggttcattcttgttctgctcggcagtggtctgatatgtgtcagtgccaacaatgctaccacagttgcaccttctgtaggaattacaagattaattaactcatcaacggcagaaccagttaaagaagaggccaaaacttcaaatccaacttcttcactaacttctctttctgtggcaccaacattcagcccaaatataactctgggacccacctatttaaccactgtcaattcttcagactctgacaatgggaccacaagaacagcaagcaccaattctataggcattacaatttcaccaaatggaacgtggcttcyagataaccagttcacggatgccagaacagaaccctgggaggggaattccagcaccgcagcaaccactccagaaactttccctccttcaggtaattctgactcgaaggacagaagagatgagacaccaattattgcggtgatggtggccctgtcctctctgctagtgatcgtgtttattatcatagttttgtacatgttaaggtttaagaaatacaagcaagctgggagccattccaattctttccgcttatccaacggccgcactgaggatgtggagccccagagtgtgccacttctggccagatcsccaagcaccaacaggaaatacccacccctgcccgtggacaagctggaagaggaaattaaccggagratggcagacgacaataagctcttcagggaggaattcaacgctctccctgcatgtcctatccaggccacctgtgaggctgcttccaaggaggaaaacaaggaaaaaaatcgatatgtaaacatcttgccttatgaccactctagagtccacctgacaccggttgaaggggttccagattctgattacatcaatgcttcattcatcaacggytaccaagaaaagaacaaattcattgctgcacaaggaccaaaagaagaaacggtgaatgatttctggcggatgatctgggaacaaaacacagccaccatcgtcatggttaccaacctgaaggagagaaaggagtgcaagtgcgcccagtactggccagaccaaggctgctggacctatgggaatattcgggygtctgtagaggatgtgactgtcctggtggactacacagtacggaagttctgcatccagcaggtgggcgacatgaccaacagaaagccacagcgcctcatcactcagttccactttaccagctggccagactttggggtgccttttaccccgatcggcatgctcaagttcctcaagaaggtgaaggcctgtaaccctcagtatgcaggggccatcgtggtccactgcagtgcaggtgtagggcgtacaggtacctttgtcgtcattgatgccatgctggacatgatgcatacagaacggaaggtggacgtgtatggctttgtgagccggatccgggcacagcgctgccagatggtgcaaaccgatatgcagtatgtcttcatataccaagcccttctggagcattatctctatggagatacagaactggaagtgacctctctagaaacccacctgcagaaaatttacaacaaaatcccagggaccagcaacaatggattagaggaggagtttaagaagttaacatcaatcaaaatccagaatgacaagatgcggactggaaaccttccagccaacatgaagaagaaccgtgttttacagatcattccatatgaattcaacagagtgatcattccagttaagcggggcgaagagaatacagactatgtgaacgcatcctttattgatggctaccggcagaaggactcctatatcgccagccagggccctcttctccacacaattgaggacttctggcgaatgatctgggagtggaaatcctgytctatcgtgatgctaacagaactggaggagagaggccaggagaagtgtgcccagtactggccatctgatggactggtgtcctatggagatattacagtggaactgaagaaggaggaggaatgtgagagctacaccstccgagacctcctggtcaccaacaccagggagaataagagccggcagatccggcagttccacttccatggctggcctgaagtgggcatccccagtgacggaaagggcatgatcagcatcatcgccgccgtgcagaagcagcagcagcagtcagggaaccaccccatcaccgtgcactgcagcgccggggcaggaaggacggggaccttctgtgccctgagcaccgtcctggagcgtgtgaaagcagaggggattttggatgtcttccagactgtcaagagcctgcggctacagaggccacacatggtccagacactggaacagtatgagttctgctacaaggtggtgcaggagtatattgatgcattctcagattatgccaacttcaagtaagcrgcaacaagggtccgtggaccaggaggattgcctttaatattttgtaatattctgttttgttaatataccccaaattgtgtatatatcttataactgttttagaaattggtacataggcttctattacctattaggtggaaattttatatgtaaatgtgttagcactgatagtcctttttccaatgttttattggggaattaaatagtgtgatgtttggattgatatcgtgaaatcctcagccgagaaattgggctggattgygctttggttaatacatctttccctaaagaagataaacacaaaatccattccaggtagctcggcaccaactaagaaaaaaagcacaaagttctcagagctctcgaggaaagtggttgtccccgtaccaccatgcactgtaaatatccctcccctctctccctggtcccctcccccatccccaccactgatatcatggggagtaataggaccagagcggtatctctggcaccmcactagggactatcaggtaataaaagctttgactccctgaggaaatgtctctccctttgtctgggggtggggcagccatacaggctggggctctcctcggctgttcatggccctcctgttgctgttctctctgagttatctgagagaggccacagtcccccagctcctcctgtccaccaaacacagcccttccagttcttaggtgatctccaggaccctcctttcattcccagcacatctttggtttagtggtcctggccagcctccctcyctaggaaggtggccaggtcctcactgagtctccttaaggacaggggcacaggggagactagagctggctcagctttgggctgaggccagtctgacctctccagtctgtggtgctttgctacaaaactgtctggattgtgtcaccctatctaggataaatctttatgtccaca

SEQ ID NO: 3540 - DNA, 5267 bp, Homo sapiens
atggccgcggcggcggcctcgccacgtgacccggacgggcggaagcggaagtgccggcctggagcccgctctaggtgggtgtcccctcggtgcttccyagctgccgtctgcaccagccatggactgctacacggcgaactggaacccactcggggactctgccttttaccggaaatatgagctgtacagcatggactgggacctgaaggaggaactcagggattgcctggtggctgctgcaccctatgggggccccattggaagtgctccagaaccgggttctggatgcccggatctttcacactgagtttggttccggagtggccatcctcacaggggcccaccgcttcaccctcagtgccaatgtgggtgacctcaaactccgccggatgccagaggtgccaggtctgcaaagtgcaccctcctgctggactgtgctgtgccaggaccgagtggcacacattcttctggctgtggggcctgacctttacctcttggaccatgcagcctgctccgcartgacgccccctggcctggccccaggagtaagcagcttcctacagatggctgtctccttcacctaccgacacctggcactcttcacagacacaggctacatctggatggggacagcatcactcaaggagaagctatgtgagttcaactgcaacatccgggcacctccaaagcagatggtctggtgcagccgtcctcgtagcaaggagagggccgtggtggtggcctgggaaaggcggctgatggtggtgggcgatgcacccgagagcatccaatataagcagctcaccatccaggtgctgctggacaggctcgtgttgcggagactttaccccctggccatccagatatgcgagtacttgcgccttcctgaagtacagggcgtcagcaggatcctggcccactgggcctgctacaaggtgcaacagaaggatgtctcagatgaggatgtggctcgagccattaaccagaagctgggggacacgcctggtgtctcttactccracattgctgcacgagcctatggttgtggccgcacggagctggccatcaaggtgtgggtgcccagccctccacagacactctgatgtggttgttcagggcccccatgccagctccttctctctgtgccttccttctcacctcacagctgctggagtatgagccacgctcaggggagcaggtaccccttctcctaaagatgaagaggagcaaactggcactaagcaaggccatygagagcggggacactgacctggtgttcacggtgttgctgcacctgaagaaygagctgaaccgaggagattttttcatgacccttcggaatcagcccatggccctcagtttgtaccgacagttctgtaagcatcaggagctaragacgctgaaggacctttacaatcaggatgacaatcaccaggaattgggcagcttccacatccgagccakctatgctgcagaagagcgtattgaggggcgagtagcagctctgcagacagccgccgatgccttctacaaggccaagaatgagtttgcagccaaggctacagaggatcaaatgcggctcctacggctgcagcggcgcctagaagacgagctggggggccagttcctagacctgtctctacatgacacagttaccaccctcattcttggcggtcacaacaagcgtgcagagcagctggcacgtgacttccgcatccctgacaagaggtgacacaactaaaaaaaaacaaaggtatttatggaattccactgagtggtaatggatgatgcagttcaaataactaaggacacatgttcaaagagcataattaactttttaaaagaagctagacttcttcagaagcttgccagtttttcaagctgatttctctcactggcaactcttcagagtgctgttcctactccaccctcccctggtgataagcatggattcctggttcattcttgttctgctcggcagtggtctgatatgtgtcagtgccaacaatgctaccacagttgcaccttctgtaggaattacaagattaattaactcatcaacggcagaaccagttaaagaagaggccaaaacttcaaatccaacttcttcactaacttctctttctgtggcaccaacattcagcccaaatataactctgggacccacctatttaaccactgtcaattcttcagactctgacaatgggaccacaagaacagcaagcaccaattctataggcattacaatttcaccaaatggaacgtggcttcyagataaccagttcacggatgccagaacagaaccctgggaggggaattccagcaccgcagcaaccactccagaaactttccctccttcagatgagacaccaattattgcggtgatggtggccctgtcctctctgctagtgatcgtgtttattatcatagttttgtacatgttaaggtttaagaaatacaagcaagctgggagccattccaattctttccgcttatccaacggccgcactgaggatgtggagccccagagtgtgccacttctggccagatcsccaagcaccaacaggaaatacccacccctgcccgtggacaagctggaagaggaaattaaccggagratggcagacgacaataagctcttcagggaggaattcaacgctctccctgcatgtcctatccaggccacctgtgaggctgcttccaaggaggaaaacaaggaaaaaaatcgatatgtaaacatcttgccttatgaccactctagagtccacctgacaccggttgaaggggttccagattctgattacatcaatgcttcattcatcaacggytaccaagaaaagaacaaattcattgctgcacaaggaccaaaagaagaaacggtgaatgatttctggcggatgatctgggaacaaaacacagccaccatcgtcatggttaccaacctgaaggagagaaaggagtgcaagtgcgcccagtactggccagaccaaggctgctggacctatgggaatattcgggygtctgtagaggatgtgactgtcctggtggactacacagtacggaagttctgcatccagcaggtgggcgacatgaccaacagaaagccacagcgcctcatcactcagttccactttaccagctggccagactttggggtgccttttaccccgatcggcatgctcaagttcctcaagaaggtgaaggcctgtaaccctcagtatgcaggggccatcgtggtccactgcagtgcaggtgtagggcgtacaggtacctttgtcgtcattgatgccatgctggacatgatgcatacagaacggaaggtggacgtgtatggctttgtgagccggatccgggcacagcgctgccagatggtgcaaaccgatatgcagtatgtcttcatataccaagcccttctggagcattatctctatggagatacagaactggaagtgacctctctagaaacccacctgcagaaaatttacaacaaaatcccagggaccagcaacaatggattagaggaggagtttaagaagttaacatcaatcaaaatccagaatgacaagatgcggactggaaaccttccagccaacatgaagaagaaccgtgttttacagatcattccatatgaattcaacagagtgatcattccagttaagcggggcgaagagaatacagactatgtgaacgcatcctttattgatggctaccggcagaaggactcctatatcgccagccagggccctcttctccacacaattgaggacttctggcgaatgatctgggagtggaaatcctgytctatcgtgatgctaacagaactggaggagagaggccaggagaagtgtgcccagtactggccatctgatggactggtgtcctatggagatattacagtggaactgaagaaggaggaggaatgtgagagctacaccstccgagacctcctggtcaccaacaccagggagaataagagccggcagatccggcagttccacttccatggctggcctgaagtgggcatccccagtgacggaaagggcatgatcagcatcatcgccgccgtgcagaagcagcagcagcagtcagggaaccaccccatcaccgtgcactgcagcgccggggcaggaaggacggggaccttctgtgccctgagcaccgtcctggagcgtgtgaaagcagaggggattttggatgtcttccagactgtcaagagcctgcggctacagaggccacacatggtccagacactggaacagtatgagttctgctacaaggtggtgcaggagtatattgatgcattctcagattatgccaacttcaagtaagcrgcaacaagggtccgtggaccaggaggattgcctttaatattttgtaatattctgttttgttaatataccccaaattgtgtatatatcttataactgttttagaaattggtacataggcttctattacctattaggtggaaattttatatgtaaatgtgttagcactgatagtcctttttccaatgttttattggggaattaaatagtgtgatgtttggattgatatcgtgaaatcctcagccgagaaattgggctggattgygctttggttaatacatctttccctaaagaagataaacacaaaatccattccaggtagctcggcaccaactaagaaaaaaagcacaaagttctcagagctctcgaggaaagtggttgtccccgtaccaccatgcactgtaaatatccctcccctctctccctggtcccctcccccatccccaccactgatatcatggggagtaataggaccagagcggtatctctggcaccmcactagggactatcaggtaataaaagctttgactccctgaggaaatgtctctccctttgtctgggggtggggcagccatacaggctggggctctcctcggctgttcatggccctcctgttgctgttctctctgagttatctgagagaggccacagtcccccagctcctcctgtccaccaaacacagcccttccagttcttaggtgatctccaggaccctcctttcattcccagcacatctttggtttagtggtcctggccagcctccctcyctaggaaggtggccaggtcctcactgagtctccttaaggacaggggcacaggggagactagagctggctcagctttgggctgaggccagtctgacctctccagtctgtggtgctttgctacaaaactgtctggattgtgtcaccctatctaggataaatctttatgtccaca

SEQ ID NO: 3541 - DNA, 5834 bp, Homo sapiens
atggccgcggcggcggcctcgccacgtgacccggacgggcggaagcggaagtgccggcctggagcccgctctaggtgggtgtcccctcggtgcttccyagctgccgtctgcaccagccatggactgctacacggcgaactggaacccactcggggactctgccttttaccggaaatatgagctgtacagcatggactgggacctgaaggaggaactcagggattgcctggtggctgctgcaccctatgggggccccattgcactgctgaggaacccctggcggaaggagaaagctgctagtgtgaggccagtgctcgatatatactctgcttcyggcatgcctctggccagcctgctgtggaagagtggacccgtggtgtccctgggctggtcagctgaggargagctgctctgtgtgcaggaagatggtgctgtactggtttatgggcttcatggtgacttccggagacacttcagcatgggcaatgaagtgctccagaaccgggttctggatgcccggatctttcacactgagtttggttccggagtggccatcctcacaggggcccaccgcttcaccctcagtgccaatgtgggtgacctcaaactccgccggatgccagaggtgccaggtctgcaaagtgcaccctcctgctggactgtgctgtgccaggaccgagtggcacacattcttctggctgtggggcctgacctttacctcttggaccatgcagcctgctccgcartgacgccccctggcctggccccaggagtaagcagcttcctacagatggctgtctccttcacctaccgacacctggcactcttcacagacacaggctacatctggatggggacagcatcactcaaggagaagctatgtgagttcaactgcaacatccgggcacctccaaagcagatggtctggtgcagccgtcctcgtagcaaggagagggccgtggtggtggcctgggaaaggcggctgatggtggtgggcgatgcacccgagagcatccagtttgtgctggatgaggactcctacctggtgcctgagctcgatggggtccgcatcttctcccgcagcacccacgagttcctgcatgaggttccaggcggacgagtacctgcgggagatccaggagctgggccagctgacccaggccgtgcagcagtgcattgaggctgcaggacatgagcaccagccagacatgcagaagagtctgctcagggccgcctccttcggaaagtgtttcctggacagatttccacccgacagcttcgtgcacatgtgtcaggacctgcgtgtgctcaatgctgttcgggactatcacatcgggatcccgctcacctatagccaatataagcagctcaccatccaggtgctgctggacaggctcgtgttgcggagactttaccccctggccatccagatatgcgagtacttgcgccttcctgaagtacagggcgtcagcaggatcctggcccactgggcctgctacaaggtgcaacagaaggatgtctcagatgaggatgtggctcgagccattaaccagaagctgggggacacgcctggtgtctcttactccracattgctgcacgagcctatggttgtggccgcacggagctggccatcaaggtgtgggtgcccagccctccacagacactctgatgtggttgttcagggcccccatgccagctccttctctctgtgccttccttctcacctcacagctgctggagtatgagccacgctcaggggagcaggtaccccttctcctaaagatgaagaggagcaaactggcactaagcaaggccatygagagcggggacactgacctggtgttcacggtgttgctgcacctgaagaaygagctgaaccgaggagattttttcatgacccttcggaatcagcccatggccctcagtttgtaccgacagttctgtaagcatcaggagctaragacgctgaaggacctttacaatcaggatgacaatcaccaggaattgggcagcttccacatccgagccakctatgctgcagaagagcgtattgaggggcgagtagcagctctgcagacagccgccgatgccttctacaaggccaagaatgagtttgcagccaaggctacagaggatcaaatgcggctcctacggctgcagcggcgcctagaagacgagctggggggccagttcctagacctgtctctacatgacacagttaccaccctcattcttggcggtcacaacaagcgtgcagagcagctggcacgtgacttccgcatccctgacaagaggtgacacaactaaaaaaaaacaaaggtatttatggaattccactgagtggtaatggatgatgcagttcaaataactaaggacacatgttcaaagagcataattaactttttaaaagaagctagacttcttcagaagcttgccagtttttcaagctgatttctctcactggcaactcttcagagtgctgttcctactccaccctcccctggtgataagcatggattcctggttcattcttgttctgctcggcagtggtctgatatgtgtcagtgccaacaatgctaccacagttgcaccttctgtaggaattacaagattaattaactcatcaacggcagaaccagttaaagaagaggccaaaacttcaaatccaacttcttcactaacttctctttctgtggcaccaacattcagcccaaatataactctgggacccacctatttaaccactgtcaattcttcagactctgacaatgggaccacaagaacagcaagcaccaattctataggcattacaatttcaccaaatggaacgtggcttcyagataaccagttcacggatgccagaacagaaccctgggaggggaattccagcaccgcagcaaccactccagaaactttccctccttcagatgagacaccaattattgcggtgatggtggccctgtcctctctgctagtgatcgtgtttattatcatagttttgtacatgttaaggtttaagaaatacaagcaagctgggagccattccaattctttccgcttatccaacggccgcactgaggatgtggagccccagagtgtgccacttctggccagatcsccaagcaccaacaggaaatacccacccctgcccgtggacaagctggaagaggaaattaaccggagratggcagacgacaataagctcttcagggaggaattcaacgctctccctgcatgtcctatccaggccacctgtgaggctgcttccaaggaggaaaacaaggaaaaaaatcgatatgtaaacatcttgccttatgaccactctagagtccacctgacaccggttgaaggggttccagattctgattacatcaatgcttcattcatcaacggytaccaagaaaagaacaaattcattgctgcacaaggaccaaaagaagaaacggtgaatgatttctggcggatgatctgggaacaaaacacagccaccatcgtcatggttaccaacctgaaggagagaaaggagtgcaagtgcgcccagtactggccagaccaaggctgctggacctatgggaatattcgggygtctgtagaggatgtgactgtcctggtggactacacagtacggaagttctgcatccagcaggtgggcgacatgaccaacagaaagccacagcgcctcatcactcagttccactttaccagctggccagactttggggtgccttttaccccgatcggcatgctcaagttcctcaagaaggtgaaggcctgtaaccctcagtatgcaggggccatcgtggtccactgcagtgcaggtgtagggcgtacaggtacctttgtcgtcattgatgccatgctggacatgatgcatacagaacggaaggtggacgtgtatggctttgtgagccggatccgggcacagcgctgccagatggtgcaaaccgatatgcagtatgtcttcatataccaagcccttctggagcattatctctatggagatacagaactggaagtgacctctctagaaacccacctgcagaaaatttacaacaaaatcccagggaccagcaacaatggattagaggaggagtttaagaagttaacatcaatcaaaatccagaatgacaagatgcggactggaaaccttccagccaacatgaagaagaaccgtgttttacagatcattccatatgaattcaacagagtgatcattccagttaagcggggcgaagagaatacagactatgtgaacgcatcctttattgatggctaccggcagaaggactcctatatcgccagccagggccctcttctccacacaattgaggacttctggcgaatgatctgggagtggaaatcctgytctatcgtgatgctaacagaactggaggagagaggccaggagaagtgtgcccagtactggccatctgatggactggtgtcctatggagatattacagtggaactgaagaaggaggaggaatgtgagagctacaccstccgagacctcctggtcaccaacaccagggagaataagagccggcagatccggcagttccacttccatggctggcctgaagtgggcatccccagtgacggaaagggcatgatcagcatcatcgccgccgtgcagaagcagcagcagcagtcagggaaccaccccatcaccgtgcactgcagcgccggggcaggaaggacggggaccttctgtgccctgagcaccgtcctggagcgtgtgaaagcagaggggattttggatgtcttccagactgtcaagagcctgcggctacagaggccacacatggtccagacactggaacagtatgagttctgctacaaggtggtgcaggagtatattgatgcattctcagattatgccaacttcaagtaagcrgcaacaagggtccgtggaccaggaggattgcctttaatattttgtaatattctgttttgttaatataccccaaattgtgtatatatcttataactgttttagaaattggtacataggcttctattacctattaggtggaaattttatatgtaaatgtgttagcactgatagtcctttttccaatgttttattggggaattaaatagtgtgatgtttggattgatatcgtgaaatcctcagccgagaaattgggctggattgygctttggttaatacatctttccctaaagaagataaacacaaaatccattccaggtagctcggcaccaactaagaaaaaaagcacaaagttctcagagctctcgaggaaagtggttgtccccgtaccaccatgcactgtaaatatccctcccctctctccctggtcccctcccccatccccaccactgatatcatggggagtaataggaccagagcggtatctctggcaccmcactagggactatcaggtaataaaagctttgactccctgaggaaatgtctctccctttgtctgggggtggggcagccatacaggctggggctctcctcggctgttcatggccctcctgttgctgttctctctgagttatctgagagaggccacagtcccccagctcctcctgtccaccaaacacagcccttccagttcttaggtgatctccaggaccctcctttcattcccagcacatctttggtttagtggtcctggccagcctccctcyctaggaaggtggccaggtcctcactgagtctccttaaggacaggggcacaggggagactagagctggctcagctttgggctgaggccagtctgacctctccagtctgtggtgctttgctacaaaactgtctggattgtgtcaccctatctaggataaatctttatgtccaca

SEQ ID NO: 3542 - DNA, 3728 bp, Homo sapiens
ggtcgggagcgaggctgcggcgagtgcggcgctgacagagacgcgcgcgcgcgcgatcgcgctcggaccccggccgctgccgccatcactgtcgcccgcccagtcgcccctcagccgcttcccctcgccatggaggcgaggccgccgccgccgccgcggggctcggagccgcgggccgggcggcggccctgagggctagtggcggcccgaaacgccgccgcggagccgaggcggagccgctgtcctcgtccccagcggtcccgcccaacgcccgactctgtgacacaactaaaaaaaaacaaaggtatttatggaattccactgagtggtaatggatgatgcagttcaaataactaaggacacatgttcaaagagcataattaactttttaaaagaagctaataagcatggattcctggttcattcttgttctgctcggcagtggtctgatatgtgtcagtgccaacaatgctaccacagttgcaccttctgtaggaattacaagattaattaactcatcaacggcagaaccagttaaagaagaggccaaaacttcaaatccaacttcttcactaacttctctttctgtggcaccaacattcagcccaaatataactctgggacccacctatttaaccactgtcaattcttcagactctgacaatgggaccacaagaacagcaagcaccaattctataggcattacaatttcaccaaatggaacgtggcttcyagataaccagttcacggatgccagaacagaaccctgggaggggaattccagcaccgcagcaaccactccagaaactttccctccttcagatgagacaccaattattgcggtgatggtggccctgtcctctctgctagtgatcgtgtttattatcatagttttgtacatgttaaggtttaagaaatacaagcaagctgggagccattccaattctttccgcttatccaacggccgcactgaggatgtggagccccagagtgtgccacttctggccagatcsccaagcaccaacaggaaatacccacccctgcccgtggacaagctggaagaggaaattaaccggagratggcagacgacaataagctcttcagggaggaattcaacgctctccctgcatgtcctatccaggccacctgtgaggctgcttccaaggaggaaaacaaggaaaaaaatcgatatgtaaacatcttgccttatgaccactctagagtccacctgacaccggttgaaggggttccagattctgattacatcaatgcttcattcatcaacggytaccaagaaaagaacaaattcattgctgcacaaggaccaaaagaagaaacggtgaatgatttctggcggatgatctgggaacaaaacacagccaccatcgtcatggttaccaacctgaaggagagaaaggagtgcaagtgcgcccagtactggccagaccaaggctgctggacctatgggaatattcgggygtctgtagaggatgtgactgtcctggtggactacacagtacggaagttctgcatccagcaggtgggcgacatgaccaacagaaagccacagcgcctcatcactcagttccactttaccagctggccagactttggggtgccttttaccccgatcggcatgctcaagttcctcaagaaggtgaaggcctgtaaccctcagtatgcaggggccatcgtggtccactgcagtgcaggtgtagggcgtacaggtacctttgtcgtcattgatgccatgctggacatgatgcatacagaacggaaggtggacgtgtatggctttgtgagccggatccgggcacagcgctgccagatggtgcaaaccgatatgcagtatgtcttcatataccaagcccttctggagcattatctctatggagatacagaactggaagtgacctctctagaaacccacctgcagaaaatttacaacaaaatcccagggaccagcaacaatggattagaggaggagtttaagaagttaacatcaatcaaaatccagaatgacaagatgcggactggaaaccttccagccaacatgaagaagaaccgtgttttacagatcattccatatgaattcaacagagtgatcattccagttaagcggggcgaagagaatacagactatgtgaacgcatcctttattgatggctaccggcagaaggactcctatatcgccagccagggccctcttctccacacaattgaggacttctggcgaatgatctgggagtggaaatcctgytctatcgtgatgctaacagaactggaggagagaggccaggagaagtgtgcccagtactggccatctgatggactggtgtcctatggagatattacagtggaactgaagaaggaggaggaatgtgagagctacaccstccgagacctcctggtcaccaacaccagggagaataagagccggcagatccggcagttccacttccatggctggcctgaagtgggcatccccagtgacggaaagggcatgatcagcatcatcgccgccgtgcagaagcagcagcagcagtcagggaaccaccccatcaccgtgcactgcagcgccggggcaggaaggacggggaccttctgtgccctgagcaccgtcctggagcgtgtgaaagcagaggggattttggatgtcttccagactgtcaagagcctgcggctacagaggccacacatggtccagacactggaacagtatgagttctgctacaaggtggtgcaggagtatattgatgcattctcagattatgccaacttcaagtaagcrgcaacaagggtccgtggaccaggaggattgcctttaatattttgtaatattctgttttgttaatataccccaaattgtgtatatatcttataactgttttagaaattggtacataggcttctattacctattaggtggaaattttatatgtaaatgtgttagcactgatagtcctttttccaatgttttattggggaattaaatagtgtgatgtttggattgatatcgtgaaatcctcagccgagaaattgggctggattgygctttggttaatacatctttccctaaagaagataaacacaaaatccattccaggtagctcggcaccaactaagaaaaaaagcacaaagttctcagagctctcgaggaaagtggttgtccccgtaccaccatgcactgtaaatatccctcccctctctccctggtcccctcccccatccccaccactgatatcatggggagtaataggaccagagcggtatctctggcaccmcactagggactatcaggtaataaaagctttgactccctgaggaaatgtctctccctttgtctgggggtggggcagccatacaggctggggctctcctcggctgttcatggccctcctgttgctgttctctctgagttatctgagagaggccacagtcccccagctcctcctgtccaccaaacacagcccttccagttcttaggtgatctccaggaccctcctttcattcccagcacatctttggtttagtggtcctggccagcctccctcyctaggaaggtggccaggtcctcactgagtctccttaaggacaggggcacaggggagactagagctggctcagctttgggctgaggccagtctgacctctccagtctgtggtgctttgctacaaaactgtctggattgtgtcaccctatctaggataaatctttatgtccaca

SEQ ID NO: 3543 - DNA, 3067 bp, Homo sapiens
atggccgcggcggcggcctcgccacgtgacccggacgggcggaagcggaagtgccggcctggagcccgctctaggtgggtgtcccctcggtgcttccyagctgccgtctgcaccagccatggactgctacacggcgaactggaacccactcggggactctgccttttaccggaaatatgagctgtacagcatggactgggacctgaaggaggaactcagggattgcctggtggctgctgcaccctatgggggccccattgcactgctgaggaacccctggcggaaggagaaagctgctagtgtgaggccagtgctcgatatatactctgcttcyggcatgcctctggccagcctgctgtggaagagtggacccgtggtgtccctgggctggtcagctgaggargagctgctctgtgtgcaggaagatggtgctgtactggtttatgggcttcatggtgacttccggagacacttcagcatgggcaatgaagtgctccagaaccgggttctggatgcccggatctttcacactgagtttggttccggagtggccatcctcacaggggcccaccgcttcaccctcagtgccaatgtgggtgacctcaaactccgccggatgccagaggtgccaggtctgcaaagtgcaccctcctgctggactgtgctgtgccaggaccgagtggcacacattcttctggctgtggggcctgacctttacctcttggaccatgcagcctgctccgcartgacgccccctggcctggccccaggagtaagcagcttcctacagatggctgtctccttcacctaccgacacctggcactcttcacagacacaggctacatctggatggggacagcatcactcaaggagaagctatgtgagttcaactgcaacatccgggcacctccaaagcagatggtctggtgcagccgtcctcgtagcaaggagagggccgtggtggtggcctgggaaaggcggctgatggtggtgggcgatgcacccgagagcatccagtttgtgctggatgaggactcctacctggtgcctgagctcgatggggtccgcatcttctcccgcagcacccacgagttcctgcatgaggttccaggcggacgagtacctgcgggagatccaggagctgggccagctgacccaggccgtgcagcagtgcattgaggctgcaggacatgagcaccagccagacatgcagaagagtctgctcagggccgcctccttcggaaagtgtttcctggacagatttccacccgacagcttcgtgcacatgtgtcaggacctgcgtgtgctcaatgctgttcgggactatcacatcgggatcccgctcacctatagccaatataagcagctcaccatccaggtgctgctggacaggctcgtgttgcggagactttaccccctggccatccagatatgcgagtacttgcgccttcctgaagtacagggcgtcagcaggatcctggcccactgggcctgctacaaggtgcaacagaaggatgtctcagatgaggatgtggctcgagccattaaccagaagctgggggacacgcctggtgtctcttactccracattgctgcacgagcctatggttgtggccgcacggagctggccatcaaggtgtgggtgcccagccctccacagacactctgatgtggttgttcagggcccccatgccagctccttctctctgtgccttccttctcacctcacagctgctggagtatgagccacgctcaggggagcaggtaccccttctcctaaagatgaagaggagcaaactggcactaagcaaggccatygagagcggggacactgacctggtgttcacggtgttgctgcacctgaagaaygagctgaaccgaggagattttttcatgacccttcggaatcagcccatggccctcagtttgtaccgacagttctgtaagcatcaggagctaragacgctgaaggacctttacaatcaggatgacaatcaccaggaattgggcagcttccacatccgagccakctatgctgcagaagagcgtattgaggggcgagtagcagctctgcagacagccgccgatgccttctacaaggccaagaatgagtttgcagccaaggctacagaggatcaaatgcggctcctacggctgcagcggcgcctagaagacgagctggggggccagttcctagacctgtctctacatgacacagttaccaccctcattcttggcggtcacaacaagcgtgcagagcagctggcacgtgacttccgcatccctgacaagaggctctggyggctgaagctgactgccctggcagatttggaagattgggaagagctagagaagttttccaagagcaagaaatcacccattggctacctgccttttgtggagatctgcatgaaacaacataacaaatacgaagccaagaagtatgcttcccgcgtgggtcccgagcagaaggtcaaggctttgcttcttgttggcgatgtggctcaggctgcagatgtggccatcgaacaccggaatgaggctgagctgagcctcgtattgtcccactgcacgggagccacagatggggccacagctgacaagattcaacgggccagggcacaagcccagaaraagtgaggagtccatcctgtacatctcaagcaaggggttcctcccctagcacctgggcttggcagaagggccatagttcatccagctcctcccctagagcaatgctgaggagcgggggcatggtagcagggctgtctggttttaaataaagttggaacacttyacagtgyttgtcttacacagtccagcctaagcaaaggcaagctcaagacaggatcctccagacaccacagcaaaactccatgtgttccgttgtgttgggaccggaggtgggggcttctccagccatactcgcaagaaacgtgtcctctccacagttaccaaggaaagctttctctatctcacagctcctaggaagattatagggagagatggcacaaaacttaagcaccagctcaccaagaacatactgtaaagcattctgtgtgtgtg

SEQ ID NO: 3544 - DNA, 3539 bp, Homo sapiens
gtgacacaactaaaaaaaaacaaaggtatttatggaattccactgagtggtaatggatgatgcagttcaaataactaaggacacatgttcaaagagcataattaactttttaaaagaagctagacttcttcagaagcttgccagtttttcaagctgatttctctcactggcaactcttcagagtgctgttcctactccaccctcccctggtgataagcatggattcctggttcattcttgttctgctcggcagtggtctgatatgtgtcagtgccaacaatgctaccacagttgcaccttctgtaggaattacaagattaattaactcatcaacggcagaaccagttaaagaagaggccaaaacttcaaatccaacttcttcactaacttctctttctgtggcaccaacattcagcccaaatataactctgggacccacctatttaaccactgtcaattcttcagactctgacaatgggaccacaagaacagcaagcaccaattctataggcattacaatttcaccaaatggaacgtggcttcyagataaccagttcacggatgccagaacagaaccctgggaggggaattccagcaccgcagcaaccactccagaaactttccctccttcagatgagacaccaattattgcggtgatggtggccctgtcctctctgctagtgatcgtgtttattatcatagttttgtacatgttaaggtttaagaaatacaagcaagctgggagccattccaattctttccgcttatccaacggccgcactgaggatgtggagccccagagtgtgccacttctggccagatcsccaagcaccaacaggaaatacccacccctgcccgtggacaagctggaagaggaaattaaccggagratggcagacgacaataagctcttcagggaggaattcaacgctctccctgcatgtcctatccaggccacctgtgaggctgcttccaaggaggaaaacaaggaaaaaaatcgatatgtaaacatcttgccttatgaccactctagagtccacctgacaccggttgaaggggttccagattctgattacatcaatgcttcattcatcaacggytaccaagaaaagaacaaattcattgctgcacaaggaccaaaagaagaaacggtgaatgatttctggcggatgatctgggaacaaaacacagccaccatcgtcatggttaccaacctgaaggagagaaaggagtgcaagtgcgcccagtactggccagaccaaggctgctggacctatgggaatattcgggygtctgtagaggatgtgactgtcctggtggactacacagtacggaagttctgcatccagcaggtgggcgacatgaccaacagaaagccacagcgcctcatcactcagttccactttaccagctggccagactttggggtgccttttaccccgatcggcatgctcaagttcctcaagaaggtgaaggcctgtaaccctcagtatgcaggggccatcgtggtccactgcagtgcaggtgtagggcgtacaggtacctttgtcgtcattgatgccatgctggacatgatgcatacagaacggaaggtggacgtgtatggctttgtgagccggatccgggcacagcgctgccagatggtgcaaaccgatatgcagtatgtcttcatataccaagcccttctggagcattatctctatggagatacagaactggaagtgacctctctagaaacccacctgcagaaaatttacaacaaaatcccagggaccagcaacaatggattagaggaggagtttaagaagttaacatcaatcaaaatccagaatgacaagatgcggactggaaaccttccagccaacatgaagaagaaccgtgttttacagatcattccatatgaattcaacagagtgatcattccagttaagcggggcgaagagaatacagactatgtgaacgcatcctttattgatggctaccggcagaaggactcctatatcgccagccagggccctcttctccacacaattgaggacttctggcgaatgatctgggagtggaaatcctgytctatcgtgatgctaacagaactggaggagagaggccaggagaagtgtgcccagtactggccatctgatggactggtgtcctatggagatattacagtggaactgaagaaggaggaggaatgtgagagctacaccstccgagacctcctggtcaccaacaccagggagaataagagccggcagatccggcagttccacttccatggctggcctgaagtgggcatccccagtgacggaaagggcatgatcagcatcatcgccgccgtgcagaagcagcagcagcagtcagggaaccaccccatcaccgtgcactgcagcgccggggcaggaaggacggggaccttctgtgccctgagcaccgtcctggagcgtgtgaaagcagaggggattttggatgtcttccagactgtcaagagcctgcggctacagaggccacacatggtccagacactggaacagtatgagttctgctacaaggtggtgcaggagtatattgatgcattctcagattatgccaacttcaagtaagcrgcaacaagggtccgtggaccaggaggattgcctttaatattttgtaatattctgttttgttaatataccccaaattgtgtatatatcttataactgttttagaaattggtacataggcttctattacctattaggtggaaattttatatgtaaatgtgttagcactgatagtcctttttccaatgttttattggggaattaaatagtgtgatgtttggattgatatcgtgaaatcctcagccgagaaattgggctggattgygctttggttaatacatctttccctaaagaagataaacacaaaatccattccaggtagctcggcaccaactaagaaaaaaagcacaaagttctcagagctctcgaggaaagtggttgtccccgtaccaccatgcactgtaaatatccctcccctctctccctggtcccctcccccatccccaccactgatatcatggggagtaataggaccagagcggtatctctggcaccmcactagggactatcaggtaataaaagctttgactccctgaggaaatgtctctccctttgtctgggggtggggcagccatacaggctggggctctcctcggctgttcatggccctcctgttgctgttctctctgagttatctgagagaggccacagtcccccagctcctcctgtccaccaaacacagcccttccagttcttaggtgatctccaggaccctcctttcattcccagcacatctttggtttagtggtcctggccagcctccctcyctaggaaggtggccaggtcctcactgagtctccttaaggacaggggcacaggggagactagagctggctcagctttgggctgaggccagtctgacctctccagtctgtggtgctttgctacaaaactgtctggattgtgtcaccctatctaggataaatctttatgtccaca

SEQ ID NO: 3545 - DNA, 3388 bp, Homo sapiens
atggaggtggcgggcggcacggagcgggcgtgctgagccccggcccccggcccggcatgggcgtctcccgcgggccctccgccggccggggctagggccggatggagccgcgggacggtagcccggaggcccggagcagcgactccgagtcggcttccacctcgtccagcggctccgagcgcgacgccggtccsgagccggacaaggcgccgcggcgactcaacaagcggcgcttcccggggctgcggctcttcgggcacaggaaagccatcaccaagtctggyctccagcacctggccccccctccgcccacccctggggcccggtgcagcgagtcagagcggcagatccggagtacagtggactggagcgagtcggcgacatatggggagcacatctggttcgagaccaacgtgtccagggacttctgctacgttggggagcagtactgtgtagccaggatgctgcagaagtcagtgtctcgaagaaagtgcgcagcctgcaagattgtggtgcacacgccctgcatcgagcagctggagaagataaatttcygctgtaagccrtccttccgtgaatcaggctccaggaatgtcctcgagccaacctttgtatggcaccactgggtacacagacgacgccaggacrgcaagtgtcggcactgtgggaagggattccagcagaagttcaccttccacagcaaggagattgtggccatcagctgctcgtggtgcaagcaggcataccacagcaaggtgtcctgcttcgtgctgcagcagatcgaggagccgtgctcgctgggggtccacgcagccgtggtcatcccgcccacctggatcctccgcgcccggaggccccagaatactctgaaagcaagcaagaagaagaagagggcatccttcaagaggaagtccagcaagaaagggcctgaggagggccgctggagacccttcatcatcaggcccaccccctcccccctcatgaagcccctgctggtgtttgtgaaccccaagagtgggggcaaccagggtgcaaagatcatccagtctttcctctggtatctcaatmcccgacaagtcttcgacctgagccagggagggcccaaggaggcgctggagatgtaccgcaaagtgcacaacctgcggatcctggcgtgcgggggcgacggcacggtgggctggatcctctccaccctggaccagctacgcctgaagccgccaccccctgttgccatcctgcccctgggtactggcaacgacttggcccgaaccctcaactggggtgggggctacacagatgagcctgtgtccaagatcctctcccacgtggaggaggggaacgtggtacagctggaccgctgggacctccacgctgagcccaaccccgaggcagggcctgaggaccgagatgaaggcgccaccgaccggttgcccctggatgtcttcaacaactacttcagcctgggctttgacgcccacgtcaccctggagttccacgagtctcgagaggccaacccagagaaattcaacagccgctttcggaataagatgttctaygccgggacagctttctctgacttcctgatgggcagctccaaggacctggccaagcacatccgagtggtgtgtgatggaatggacttgactcccaagatccaggacctgaaaccccagtgtgttgttttcctgaacatccccaggtactgtgcgggcaccatgccctgsggccaccctggggagcaccacgactttgagccccagcggcatgacgacggctacctcgaggtcattggcttcaccatgacgtcattggccgcrctgcaggtgggcggacacggcgagyggctgacgcagtgtcgcgaggtggtgctcaccacatccaaggccatcccggtgcaggtggatggcgagccctgcaagcttgcagcctcacgcatccgcattgccctgcgcaaccaggccaccatggtgcagaaggccaagcggcrgagcgccgcccccctgcacagcgaccagcagccggtgccagagcagttgcgcatccaggtgagacrcgtcagcatgcacgactatgaggccctgcactacgacaaggagcagctcaaggaggcctccgtgccgctgggcacygtggtggtcccaggagacagtgacctagagctctgccgtgcccacattgagagactccagcaggagcccgatggtgcwggagccaagtccccgacatgccagaaactgtcccccaagtggtgcttcctggacgccaccactgccagccgcttctacaggatcaaccgagcccaggagcayctcaactatgtgactgagatcgcacaggatgagatttatatcctggaccctgagctgctgggggcatcggcccggcctgacctcccaacccccacttcccctctccccacctcaccctgctcacccacgccccggtcactgcaaggggatgctgcaccccctcaaggtgaagagctrattgaggctgccaagaggaacgacttctgtaagctccargagctgcaccgagctgggggcgacatcatgcaccgagacaagcagagtcgcacgctcctgcaccacgcagtcagcactggcagcaaggatgtggtccgctacctgctggaccacgctcccccagagatccttgatgcggtggaggaaaacrgggagacctgtttgcaccaagcagcggccctgggccagcgcaccatctgccactacatcgtggaggccrgggccagaccagcagggcgacamtccccggyagcagsctgagaaggctcaggacaccgagctggcggcctacctggagaaccggcagcactaccagatgatccagcgggaggaccaggagacggctgtgtagcgggccgcccacgggcagcaggagggacaatgcggccaggggatgagcgccttccttgcccacctcactgccacattccagtgggacggccacggggggacctaggccccagggaaagagccccatgccgccccctaaggagccgcacagacctagggctggactcaggagctggggggcctcacctgttcccctgaggaccccgccggacccggaggctcacagggaacaagacacggctgggttggatatgcctttgccggggttctggggcagggcgctccctggccgcagcagatgccctcccaggagtggaggggctggagaggggaaggccttcgggaagaggcttcctgggccccctggtcttcggccgggtccccagcccccgctcctgccccaccccacctcccccgggcttcctcccggaaactcagtgcctgctgcacttgcctgccctgccttgcttggcacccgctccggcgaccctccccgctcctctgtcattcca

SEQ ID NO: 3546 - DNA, 1312 bp, Homo sapiens
aatgatcgaagcagtacaaatcaggggagaacgtgcccaagacctggagaactgataataaattgtggtttatccttgcaatggaacactatatggaagtgaaaatgattgaaatagagctatacacatcatcacagacaaatttcagaaacaacgctgagtgaaaaatccacccacaaatgaattatcaggagtgaacccagaggcacgtatgaatgaaagtccacagacaaacgaatttaaaggaacaaccgaggaggcacctgcgaaagaaagcccacacacaagtgaatttaaaggagcagccctggtgtcacctatcagtaaaagaatatttggagttttcctggtcttactggatgtcactctcctccttgccgacctaattttcactgacagcaaactttatattcctttggagtatcgttctatttctctagctattggcttattttttctcatggatgttcttcttcgagtatttgtagaaggatggacacatttagttcracttctacgacttattattctgataagaatttttcrtctgcttcatcaaaaaagacaacttgaaaagctgatgagaaggctggtttcagaaaacaaaaggygatacacaagggatggatttgacctagacctcacttacgttacagaacrtattattgctatgtcrtttccatcttctggaaggcagtctttctatagaaatccaattgaggaagttgtgcggtttctagataagaaacatcgaaaccactatcgagtctacaatctmtgcagtgaaagagcttatgatcctaagcacttccataatagggtcagtagaatcatgattgatgatcataatgtccccactctacatgagatggtggttttcaccaaggaagtaaatgagtggatggctcaagatcttgaaaacatcgtagcgattcactgtaaaggaggcaaaggaagaaccgggactatggtttgtgccctccttattgcctccgaaatatttttaactgccgaggaaagcctatattattttggagaaaggcgaaccaataaaacccacagcaataaatttcagggagtaraaactccttctcagaatagatatgttggatattttgcacaagtgaaacatctctacaactggaatctccctccaagacggatactctttataaaaagattcattatttattcrattcgtggtgatgtatgtgatctaaaagtccaagtagtaatggagaaaaaggttgtcttttccagtacttcattaggaaattgttcggtaagagaaaacatgtgaattgaaaaaatc

SEQ ID NO: 3547 - DNA, 1730 bp, Homo sapiens
aatgatcgaagcagtacaaatcaggggagaacgtgcccaagacctggagaactgataataaattgtggtttatccttgcaatggaacactatatggaagtgaaaatgattgaaatagagctatacacatcatcacagacaaatttcagaaacaacgctgagtgaaaaatccacccacaaatgaattatcaggagtgaacccagaggcacgtatgaatgaaagtccacagacaaacgaatttaaaggaacaaccgaggaggcacctgcgaaagaaagcccacacacaagtgaatttaaaggagcagccctggtgtcacctatcagtaaaagaatatttggagttttcctggtcttactggatgtcactctcctccttgccgacctaattttcactgacagcaaactttatattcctttggagtatcgttctatttctctagctattggcttattttttctcatggatgttcttcttcgagtatttgtagaaggatggacacatttagttcracttctacgacttattattctgataagaatttttcrtctgcttcatcaaaaaagacaacttgaaaagctgatgagaaggctggtttcagaaaacaaaaggygatacacaagggatggatttgacctagacctcacttacgttacagaacrtattattgctatgtcrtttccatcttctggaaggcagtctttctatagaaatccaattgaggaagttgtgcggtttctagataagaaacatcgaaaccactatcgagtctacaatctmtgcagtgaaagagcttatgatcctaagcacttccataatagggtcagtagaatcatgattgatgatcataatgtccccactctacatgagatggtggttttcaccaaggaagtaaatgagtggatggctcaagatcttgaaaacatcgtagcgattcactgtaaaggaggcaaaggaagaaccgggactatggtttgtgccctccttattgcctccgaaatatttttaactgccgaggaaagcctatattattttggagaaaggcgaaccaataaaacccacagcaataaatttcagggagtaraaactccttctcagaatagatatgttggatattttgcacaagtgaaacatctctacaactggaatctccctccaagacggatactctttataaaaagattcattatttattcrattcgtggtgatgtatgtgatctaaaagtccaagtagtaatggagaaaaaggttgtcttttccagtacttcattaggaaattgttcgatattgcatgacattgaaacagacaaartattaattaatgtatatgacggtcyacctctgtatgatgatgtgaaagtgcagtttttctmttcgaatcttcctaaatactatgacaattgtccatttttcttctggttcaacacgtcttttattcaaaataacaggctttgtctaccaagaaatgaattggataatccacataaacaaaaagcatgraaaatttatccaccagaatttgctgtggagatactttttggcgagaaatgacttccaatgatgttgtagctggatccgactaagtatagctcccccttccccttctgggaaagaattatgttctttccaacccctgccacatgttcatgtgtcctaagtcttccttgatgatgcatctatatttatatatgtttatatatgttcttcataaatctattaaatatatatagat

SEQ ID NO: 3548 - DNA, 3482 bp, Homo sapiens
tggcagctgcggcgcagagtccagccgctggtgcgcggagcggttcaccgtcttcggagcggttcggcccagcctttcgcccaggcgcccaggcccgctgcgcgcgtgcgtgagcgcgcctgcgccgccrgggccgctgcaaggggaggagagmggccgcctcaggaggatcccttttcccccagaaattactcaatgctgaaacctctcaaagtggtattagagacgctgaaagcaccatggacgggttttatgatcagcaagtcccttttatggtcccagggaaatctcgatctgaggaatgcagagggcggcctgtgattgacagaaagaggaagtttttggacacagatctggctcacgattctgaagagctatttcaggatctcagtcaacttcaagaggcttggttagctgaagcacaagttcctgatgatgaacagtttgtcccagattttcagtctgataacctggtgcttcatgccccacctccaaccaagatcaaacgggagctgcacagcccctcctctgagctgtcgtcttgtagccatgagcaggctcttggtgctaactrtggagaaaagtgcctctacaactattgtgcctatgataggaagcctccctctgggttcaagccattaacccctcctacaacccccctctcacccacccatcagaatcccctatttcccccacctcaggcaactctgcccacctcagggcatgcccctgcagctggcccagttcaaggtgtgggccccgcccccgccccccattcgcttccagagcctggaccacagcagcaaacatttgcggtcccccgaccaccacatcagcccctgcagatgccaaagatgatgcctgaaaaccagtatccatcagaacagagatttcagagacaactgtctgaaccctgccaccccttccctcctcagccaggagttcctggagataatcgccccagttaccatcggcaaatgtcagaacctattgtccctgcagctcccccgccccctcagggattcaaacaagaataccatgacccactctatgaacatggggtcccgggcatgccagggcccccagcacacgggttccagtcaccaatgggaatcaagcaggagcctcgggattactgcgtcgattcagaagtgcctaactgccagtcatcctacatgagagggggttatttctccagcagccatgaaggtttttcatatgaaaaagatccccgattatactttgacgacacttgtgttgtgcctgagagactggaaggcaragtcaaacaggagcctaccatgtatcgagaggggcccccttaccagaggcgaggttcccttcagctgtggcagttcctggtcacccttcttgatgacccagccaatgcccacttcattgcctggacaggtcgaggcatggagttcaagctgatagaaccggaagaggttgctcggcgctggggcatccagaagaaccggccagccatgaactatgacaagctgagccgctctctccgctattactatgaaaagggcatcatgcagaaggtggctggagagcgatacgtctacaaatttgtctgtgacccagatgccctcttctccatggctttcccggataaccagcgtccgttcctgaaggcagagtccgagtgccacctcagcgaggaggacaccctgccgctgacccactttgaagacagccccgcttacctcctggacatggaccgctgcagcagcctcccctatgccgaaggctttgcttactaagtttctgagtggcggagtggccaaaccctagagctagcagttcccattcaggcaaacaagggcagtggttttgtttgtgtttttggttgttcctaaagcttgccctttgagtattatctggagaacccaagctgtctctggattggcacccttaaagacagatacattggctggggagtgggaacagggaggggcagaaaaccaccaaaaggccagtgcctcaactcttgattctgatgaggtttctgggaagagatcaaaatggagtctccttaccatggacaatacatgcaaagcaatatcttgttcaggttagtacccgcaaaacgggacatagtatgtgacaatctgcatcgatcatggactactaaatgcctttacatagaagggctctgatttgcacaatttgttgaaaaatcacaaacccatagaaaagtaagtaggctaagttggggaggctcaaaccattaagggttaaaaatacatcttaaacattggaaagctcttctagctgaatctgaaatattaccccttgtctagaaaaaggggggcagtcagaacagctgttccccactccgtggttctcaaaatcataaaccatggctactcttgggaaccacccggccatgtggtcgccaagtagagcaagccccctttctcttcccaatcacgtggctgagtgtggatgacttttwttttaggagaagggcgattaacacttttgacagtattttgttttgccctgatttgggggattgttttgttttggtggttgttttggaaaaacagtttataaactgatttttgtagttttggtatttaaagcaaaaaaacgaaaaacaaaaaaacaaaaacaaaccttttggtaactgtgcactgtgtcctttagccagggccgtgccaacttatgaagacactgcagcttgagaggggctttgctgaggcttccccttggccatgtgaaagcccgccttgttgcctgctttgtgctttctgcaccagacaacctgatggaacatttgcacctgagttgtacatttttgaagtgtgcagggcagcctggacacaagcttagattctctatgtatagttccccgtgttcactaacatgccctctctggaaagcatatgtatataacatgtgtcatgtcctttggaaacctggtcacctggtgaaaacccttgggattcttccctgggcatgactgatgccaatttccatttcatcagtttgttttgttttcctttttctttaaatcttggactttaaaccctacctgtgtgattcagtagggtttgagacttacgtgtgatactgacaggtaagcaacagtgctagcattctagattcctgcctttttttaaaaagaaattattctcattgctgtattatattggaaaagttttaaacaaccaagctaaagctatgtgaaagttgagctcaaagtagaggaaaagttactggtggtaccttgctgcctgctctgctggtagaattctgtgctccccgtgacacttagtacattaagaatgactacactgttcctcgtatgtgaaggaggcagtgctgactccgtgagtgtgagacacgtgctttgaactgcttttctattcatggagcactccatagtctcaaactgtcccccttatgaccaacagcacatttgtgaagaggttcgcagggataaggggtgcactttatagctatgg

SEQ ID NO: 3549 - DNA, 6108 bp, Homo sapiens
ccgtgtgtgtacgcgcgcgcgccggtgtgtgtggcgggggcgggctctgcgcccgggggcagggctccgcagtgagagtggcagctggacttgccaggctgcgaggggcagggcacagagccgcagtgccgtagtagcgggccacggagatagacagctttggagctgctgaactccgagcacagggtgaagaccccggcgctaccaaccacagcctggcagcctggtctccgcggcacccactggggctgcatccccctcccccgagagggctgcgcaggcgggaagacgcccagaggccagcttcggtcccccttctgtctctcggttcctctttcctcccaagtaagggaataaaccgcgaagaaggagcgccccgggccaccgcgcaaccaagtgttgcctggtgaggaagagccaggacttctgaatttaccttgaatacagacaggaggatgttgcctaaggaatagcagagatcttgtctcatcttctgagaggtgcctgctgctgctgtatacacttgagtgctcccagaagtctcctgaaaggcttacatcgcaaacctgcaatgagccaggccctgggctgggcctccacttcagcctagtgaacaaaactccatcactgccctttagccactcacataaagtttaaaaatgggtgaagaacggtgggtctccctcactccagaagaatttgaccaactccagaaatattcagaatattcctccaagaagataaaagatgccttgactgaatttaatgagggtgggagcctcaaacaatatgacccacatgagccgattagctatgatgtcttcaagctgttcatgagggcgtacctggaggtggaccttccccagccactgagcactcacctcttcctggccttcagccagaagcccagacacgagacctctgaccacccgacggagggagccagcaacagtgaggccaacarcgcagatactaatatacagaatgcagataatgccaccaaagcagacgaggcctgtgcccctgatactgaatcaaatatggctgagaagcaagcaccagctgaagaccaagtggctgcgasccccctggaaccccccgtccctcggtcttcaagctcggaatccccagtggtrtacctgaaggatgttgtgtgctacctgtccctgctggagacggggaggcctcaggataagctggagttcatgtttcgcctctatgattcagatgagaacggtctcctggaccaagcggagatggattgcattgtcaaccaaatgctgcatattgcccagtacctggagtgggatcccacagagctgaggcctatattgaaggagatgctgcaagggatggactacgaccgggacggctttgtgtctctacaggaatgggtccatggagggatgaccaccatcccattgctggtcctcctggggatggatgactctggctccaagggggatgggcggcacgcctggaccatgaagcacttcaagaaaccaacctactgcaacttctgccatatcatgctcatgggcgtccgcaagcaaggcctgtgctgcacttactgtaaatacactgtccacgaacgctgtgtgtccaraaacattcctggttgtgtcaaaacgtactcaaaagccaaaaggagtggtgaggtgatgcagcacgcatgggtggaagggaactcctccgtcaagtgtgaccggtgccacaaaagtatcaagtgctaccagagtgtcaccgcgcggcactgcgtgtggtgccggatgacgtttcaccgcaaatgtgaattatcaacgttgtgtgacggtggggaactcagagaccacatcttactgcccacctccatatgccccatcacccgggacaggccaggtgagaagtctgatggctgcgtgtccgccaagggcgaacttgtcatgcagtataagatcatccccaccccgggtacccaccccctgctggtcttggtgaaccccaagagtggagggagacaaggagaaagaattcttcggaaattccactatctgctcaaccccaaacaagttttcaacctggacaatggggggcctactccagggttgaactttttccgtgatactccagacttccgtgttttggcctgtggtggagatgggacagttggctggattttggattgcattgataaggccaactttgcaaagcatccaccagtggctgtcctgcctcttggaacaggaaatgaccttgcccgttgtctccgctggggaggaggttatgaagggggcagcttgacaaaaatcctgaaagacattgagcagagccccttggtgatgctggaccgctggcatctggaagtcatccccagagaggaagtggaaaacggggaccaggtcccatacagcatcatgaacaactatttctccattggtgtggacgcttccattgcacacagattccatgtgatgagagagaaacatcctgaaaaattcaacagcaggatgaagaacaagctgtggtactttgaatttggcacctcggagacttttgcagcgacctgcaagaaactccacgaccacattgagttggagacctcagtgaccagctccttgaagtggtsgggctagaaggagccatggagatggggcagatctacaccggcctgaagagtgcaggcaggaggctggcccagtgcgcctctgtcaccatcaggacaaacaagctgctgccaatgcaagtggatggagaaccctggatgcagccatgttgcacggaggatcccttttcccccagaaattactcaatgctgaaacctctcaaagtggtattagagacgctgaaagcaccatggacgggttttatgatcagcaagtcccttttatggtcccagggaaatctcgatctgaggaatgcagagggcggcctgtgattgacagaaagaggaagtttttggacacagatctggctcacgattctgaagcacaagttcctgatgatgaacagtttgtcccagattttcagtctgataacctggtgcttcatgccccacctccaaccaagatcaaacgggagctgcacagcccctcctctgagctgtcgtcttgtagccatgagcaggctcttggtgctaactrtggagaaaagtgcctctacaactattgtgcctatgataggaagcctccctctgggttcaagccattaacccctcctacaacccccctctcacccacccatcagaatcccctatttcccccacctcaggcaactctgcccacctcagggcatgcccctgcagctggcccagttcaaggtgtgggccccgcccccgccccccattcgcttccagagcctggaccacagcagcaaacatttgcggtcccccgaccaccacatcagcccctgcagatgccaaagatgatgcctgaaaaccagtatccatcagaacagagatttcagagacaactgtctgaaccctgccaccccttccctcctcagccaggagttcctggagataatcgccccagttaccatcggcaaatgtcagaacctattgtccctgcagctcccccgccccctcagggattcaaacaagaataccatgacccactctatgaacatggggtcccgggcatgccagggcccccagcacacgggttccagtcaccaatgggaatcaagcaggagcctcgggattactgcgtcgattcagaagtgcctaactgccagtcatcctacatgagagggggttatttctccagcagccatgaaggtttttcatatgaaaaagatccccgattatactttgacgacacttgtgttgtgcctgagagactggaaggcaragtcaaacaggagcctaccatgtatcgagaggggcccccttaccagaggcgaggttcccttcagctgtggcagttcctggtcacccttcttgatgacccagccaatgcccacttcattgcctggacaggtcgaggcatggagttcaagctgatagaaccggaagaggttgctcggcgctggggcatccagaagaaccggccagccatgaactatgacaagctgagccgctctctccgctattactatgaaaagggcatcatgcagaaggtggctggagagcgatacgtctacaaatttgtctgtgacccagatgccctcttctccatggctttcccggataaccagcgtccgttcctgaaggcagagtccgagtgccacctcagcgaggaggacaccctgccgctgacccactttgaagacagccccgcttacctcctggacatggaccgctgcagcagcctcccctatgccgaaggctttgcttactaagtttctgagtggcggagtggccaaaccctagagctagcagttcccattcaggcaaacaagggcagtggttttgtttgtgtttttggttgttcctaaagcttgccctttgagtattatctggagaacccaagctgtctctggattggcacccttaaagacagatacattggctggggagtgggaacagggaggggcagaaaaccaccaaaaggccagtgcctcaactcttgattctgatgaggtttctgggaagagatcaaaatggagtctccttaccatggacaatacatgcaaagcaatatcttgttcaggttagtacccgcaaaacgggacatagtatgtgacaatctgcatcgatcatggactactaaatgcctttacatagaagggctctgatttgcacaatttgttgaaaaatcacaaacccatagaaaagtaagtaggctaagttggggaggctcaaaccattaagggttaaaaatacatcttaaacattggaaagctcttctagctgaatctgaaatattaccccttgtctagaaaaaggggggcagtcagaacagctgttccccactccgtggttctcaaaatcataaaccatggctactcttgggaaccacccggccatgtggtcgccaagtagagcaagccccctttctcttcccaatcacgtggctgagtgtggatgacttttwttttaggagaagggcgattaacacttttgacagtattttgttttgccctgatttgggggattgttttgttttggtggttgttttggaaaaacagtttataaactgatttttgtagttttggtatttaaagcaaaaaaacgaaaaacaaaaaaacaaaaacaaaccttttggtaactgtgcactgtgtcctttagccagggccgtgccaacttatgaagacactgcagcttgagaggggctttgctgaggcttccccttggccatgtgaaagcccgccttgttgcctgctttgtgctttctgcaccagacaacctgatggaacatttgcacctgagttgtacatttttgaagtgtgcagggcagcctggacacaagcttagattctctatgtatagttccccgtgttcactaacatgccctctctggaaagcatatgtatataacatgtgtcatgtcctttggaaacctggtcacctggtgaaaacccttgggattcttccctgggcatgactgatgccaatttccatttcatcagtttgttttgttttcctttttctttaaatcttggactttaaaccctacctgtgtgattcagtagggtttgagacttacgtgtgatactgacaggtaagcaacagtgctagcattctagattcctgcctttttttaaaaagaaattattctcattgctgtattatattggaaaagttttaaacaaccaagctaaagctatgtgaaagttgagctcaaagtagaggaaaagttactggtggtaccttgctgcctgctctgctggtagaattctgtgctccccgtgacacttagtacattaagaatgactacactgttcctcgtatgtgaaggaggcagtgctgactccgtgagtgtgagacacgtgctttgaactgcttttctattcatggagcactccatagtctcaaactgtcccccttatgaccaacagcacatttgtgaagaggttcgcagggataaggggtgcactttatagctatggccctgcgcagggccgtatgcatcctgccaagctgcgttatattctgtactgtgtacaataaagaagtttgcttttcgttta

SEQ ID NO: 3550 - DNA, 4036 bp, Homo sapiens
ccgtgtgtgtacgcgcgcgcgccggtgtgtgtggcgggggcgggctctgcgcccgggggcagggctccgcagtgagagtggcagctggacttgccaggctgcgaggggcagggcacagagccgcagtgccgtagtagcgggccacggagatagacagctttggagctgctgaactccgagcacagggtgaagaccccggcgctaccaaccacagcctggcagcctggtctccgcggcacccactggggctgcatccccctcccccgagagggctgcgcaggcgggaagacgcccagaggccagcttcggtcccccttctgtctctcggttcctctttcctcccaagtaagggaataaaccgcgaagaaggagcgccccgggccaccgcgcaaccaagtgttgcctggtgaggaagagccaggacttctgaatttaccttgaatacagacaggaggatgttgcctaaggaatagcagagatcttgtctcatcttctgagaggtgcctgctgctgctgtatacacttgagtgctcccagaagtctcctgaaaggcttacatcgcaaacctgcaatgagccaggccctgggctgggcctccacttcagcctagtgaacaaaactccatcactgccctttagccactcacataaagtttaaaaatgggtgaagaacggtgggtctccctcactccagaagaatttgaccaactccagaaatattcagaatattcctccaagaagataaaagatgccttgactgaatttaatgagggtgggagcctcaaacaatatgacccacatgagccgattagctatgatgtcttcaagctgttcatgagggcgtacctggaggtggaccttccccagccactgagcactcacctcttcctggccttcagccagaagcccagacacgagacctctgaccacccgacggagggagccagcaacagtgaggccaacarcgcagatactaatatacagaatgcagataatgccaccaaagcagacgaggcctgtgcccctgatactgaatcaaatatggctgagaagcaagcaccagctgaagaccaagtggctgcgasccccctggaaccccccgtccctcggtcttcaagctcggaatccccagtggtrtacctgaaggatgttgtgtgctacctgtccctgctggagacggggaggcctcaggataagctggagttcatgtttcgcctctatgattcagatgagaacggtctcctggaccaagcggagatggattgcattgtcaaccaaatgctgcatattgcccagtacctggagtgggatcccacagagctgaggcctatattgaaggagatgctgcaagggatggactacgaccgggacggctttgtgtctctacaggaatgggtccatggagggatgaccaccatcccattgctggtcctcctggggatggatgactctggctccaagggggatgggcggcacgcctggaccatgaagcacttcaagaaaccaacctactgcaacttctgccatatcatgctcatgggcgtccgcaagcaaggcctgtgctgcacttactgtaaatacactgtccacgaacgctgtgtgtccaraaacattcctggttgtgtcaaaacgtactcaaaagccaaaaggagtggtgaggtgatgcagcacgcatgggtggaagggaactcctccgtcaagtgtgaccggtgccacaaaagtatcaagtgctaccagagtgtcaccgcgcggcactgcgtgtggtgccggatgacgtttcaccgcaaatgtgaattatcaacgttgtgtgacggtggggaactcagagaccacatcttactgcccacctccatatgccccatcacccgggacaggccaggtgagaagtctgatggctgcgtgtccgccaagggcgaacttgtcatgcagtataagatcatccccaccccgggtacccaccccctgctggtcttggtgaaccccaagagtggagggagacaaggagaaagaattcttcggaaattccactatctgctcaaccccaaacaagttttcaacctggacaatggggggcctactccagggttgaactttttccgtgatactccagacttccgtgttttggcctgtggtggagatgggacagttggctggattttggattgcattgataaggccaactttgcaaagcatccaccagtggctgtcctgcctcttggaacaggaaatgaccttgcccgttgtctccgctggggaggaggttatgaagggggcagcttgacaaaaatcctgaaagacattgagcagagccccttggtgatgctggaccgctggcatctggaagtcatccccagagaggaagtggaaaacggggaccaggtcccatacagcatcatgaacaactatttctccattggtgtggacgcttccattgcacacagattccatgtgatgagagagaaacatcctgaaaaattcaacagcaggatgaagaacaagctgtggtactttgaatttggcacctcggagacttttgcagcgacctgcaagaaactccacgaccacattgagttggagtgtgatggggttggggtggacctgagcaacatcttcctggaaggcattgccattctcaacattcccagcatgtacggaggcaccaatctctggggagaaaamaagaagaaccgggctgtgatccgggaaagcaggaagggtgtcactgaccccaaagaactgaaattctgcgttcaagacctcagtgaccagctccttgaagtggtsgggctagaaggagccatggagatggggcagatctacaccggcctgaagagtgcaggcaggaggctggcccagtgcgcctctgtcaccatcaggacaaacaagctgctgccaatgcaagtggatggagaaccctggatgcagccatgttgcacgattaaaattactcacaagaaccaagcgcccatgatgatggggcctccccagaagagcagcttcttctcgttgagaaggaagagccgttcaaaagactaaacagtgtgccaaacaccagctaaaccaagagagaaagcaagaaactataatgcacactcacacacaatttatgtgcacactcacacatgcacacacacacacacatacacactcttctctaaccagtggaagcaaagccacccttcgggaagaaaacgtcaccttgccatacattctgtttcaacagtgggtacacccctaacagagccagtgccaacaaaacattttgaatggacttaggrcccatgaggttgtggctggcttaggcagcaacctccacattcccacaggccttgagcagaattttctgagactgaagggaaatcccsctttctttctaccagccctgcaagtttcctcatggacgctcgcgaggagcaggctgcaggtttcctgcctatggtgagatcagatgtggccaagggaaggagctctggttccagagaatttgcacaaagttccctctgtacagagacaaaamggcctcyggctctcagagcataatccttggcagggctcagcaggcgcacgttggtttcttggtcgtcctttgagtgacaacttctccgtgaacctgctgaagaggcagaaaggccgtggaaagctgtatttccattcttgggtttctgcgccgtcggtgggcacttgttattttccaggaaccttctcctggtgtctacatgtttgcttagaggcggctccaagagcccccagagctgcctgcatagcacaccttagatgtggtatttattttcttagttctgtgaacacctgggagggagagcggagaaactgggatttatttttcaaattggtgtcataatattgtgtaaaaagggaaggaaaaaaaaaaccacccccagcttctttctttttcaagccaaagcgtgtttcctgtttgagttccaagccctggtggcagactattcctgaaggcagaaaagatgggaaggaaggaactttgctggggaaaccaggagacggttccctcctgcttcttt

SEQ ID NO: 3551 - DNA, 3563 bp, Homo sapiens
tggcagctgcggcgcagagtccagccgctggtgcgcggagcggttcaccgtcttcggagcggttcggcccagcctttcgcccaggcgcccaggcccgctgcgcgcgtgcgtgagcgcgcctgcgccgccrgggccgctgcaaggggaggagagmggccgcctcaggaggatcccttttcccccagaaattactcaatgctgaaacctctcaaagtggtattagagacgctgaaagcaccatggacgggttttatgatcagcaagtcccttttatggtcccagggaaatctcgatctgaggaatgcagagggcggcctgtgattgacagaaagaggaagtttttggacacagatctggctcacgattctgaagagctatttcaggatctcagtcaacttcaagaggcttggttagctgaagcacaagttcctgatgatgaacagtttgtcccagattttcagtctgataacctggtgcttcatgccccacctccaaccaagatcaaacgggagctgcacagcccctcctctgagctgtcgtcttgtagccatgagcaggctcttggtgctaactrtggagaaaagtgcctctacaactattgtgcctatgataggaagcctccctctgggttcaagccattaacccctcctacaacccccctctcacccacccatcagaatcccctatttcccccacctcaggcaactctgcccacctcagggcatgcccctgcagctggcccagttcaaggtgtgggccccgcccccgccccccattcgcttccagagcctggaccacagcagcaaacatttgcggtcccccgaccaccacatcagcccctgcagatgccaaagatgatgcctgaaaaccagtatccatcagaacagagatttcagagacaactgtctgaaccctgccaccccttccctcctcagccaggagttcctggagataatcgccccagttaccatcggcaaatgtcagaacctattgtccctgcagctcccccgccccctcagggattcaaacaagaataccatgacccactctatgaacatggggtcccgggcatgccagggcccccagcacacgggttccagtcaccaatgggaatcaagcaggagcctcgggattactgcgtcgattcagaagtgcctaactgccagtcatcctacatgagagggggttatttctccagcagccatgaaggtttttcatatgaaaaagatccccgattatactttgacgacacttgtgttgtgcctgagagactggaaggcaragtcaaacaggagcctaccatgtatcgagaggggcccccttaccagaggcgaggttcccttcagctgtggcagttcctggtcacccttcttgatgacccagccaatgcccacttcattgcctggacaggtcgaggcatggagttcaagctgatagaaccggaagaggttgctcggcgctggggcatccagaagaaccggccagccatgaactatgacaagctgagccgctctctccgctattactatgaaaagggcatcatgcagaaggtggctggagagcgatacgtctacaaatttgtctgtgacccagatgccctcttctccatggctttcccggataaccagcgtccgttcctgaaggcagagtccgagtgccacctcagcgaggaggacaccctgccgctgacccactttgaagacagccccgcttacctcctggacatggaccgctgcagcagcctcccctatgccgaaggctttgcttactaagtttctgagtggcggagtggccaaaccctagagctagcagttcccattcaggcaaacaagggcagtggttttgtttgtgtttttggttgttcctaaagcttgccctttgagtattatctggagaacccaagctgtctctggattggcacccttaaagacagatacattggctggggagtgggaacagggaggggcagaaaaccaccaaaaggccagtgcctcaactcttgattctgatgaggtttctgggaagagatcaaaatggagtctccttaccatggacaatacatgcaaagcaatatcttgttcaggttagtacccgcaaaacgggacatagtatgtgacaatctgcatcgatcatggactactaaatgcctttacatagaagggctctgatttgcacaatttgttgaaaaatcacaaacccatagaaaagtaagtaggctaagttggggaggctcaaaccattaagggttaaaaatacatcttaaacattggaaagctcttctagctgaatctgaaatattaccccttgtctagaaaaaggggggcagtcagaacagctgttccccactccgtggttctcaaaatcataaaccatggctactcttgggaaccacccggccatgtggtcgccaagtagagcaagccccctttctcttcccaatcacgtggctgagtgtggatgacttttwttttaggagaagggcgattaacacttttgacagtattttgttttgccctgatttgggggattgttttgttttggtggttgttttggaaaaacagtttataaactgatttttgtagttttggtatttaaagcaaaaaaacgaaaaacaaaaaaacaaaaacaaaccttttggtaactgtgcactgtgtcctttagccagggccgtgccaacttatgaagacactgcagcttgagaggggctttgctgaggcttccccttggccatgtgaaagcccgccttgttgcctgctttgtgctttctgcaccagacaacctgatggaacatttgcacctgagttgtacatttttgaagtgtgcagggcagcctggacacaagcttagattctctatgtatagttccccgtgttcactaacatgccctctctggaaagcatatgtatataacatgtgtcatgtcctttggaaacctggtcacctggtgaaaacccttgggattcttccctgggcatgactgatgccaatttccatttcatcagtttgttttgttttcctttttctttaaatcttggactttaaaccctacctgtgtgattcagtagggtttgagacttacgtgtgatactgacaggtaagcaacagtgctagcattctagattcctgcctttttttaaaaagaaattattctcattgctgtattatattggaaaagttttaaacaaccaagctaaagctatgtgaaagttgagctcaaagtagaggaaaagttactggtggtaccttgctgcctgctctgctggtagaattctgtgctccccgtgacacttagtacattaagaatgactacactgttcctcgtatgtgaaggaggcagtgctgactccgtgagtgtgagacacgtgctttgaactgcttttctattcatggagcactccatagtctcaaactgtcccccttatgaccaacagcacatttgtgaagaggttcgcagggataaggggtgcactttatagctatggccctgcgcagggccgtatgcatcctgccaagctgcgttatattctgtactgtgtacaataaagaagtttgcttttcgttta

SEQ ID NO: 3552 - DNA, 3438 bp, Homo sapiens
ggctcgcgagaagagacgcttggcggagctccgcagttgggaggagggggcgggaagcagtttgaggggaatgtctgagaggcgctgccccccagagcaccgggagggggtaaatgacacaggcaagatcccttttcccccagaaattactcaatgctgaaacctctcaaagtggtattagagacgctgaaagcaccatggacgggttttatgatcagcaagtcccttttatggtcccagggaaatctcgatctgaggaatgcagagggcggcctgtgattgacagaaagaggaagtttttggacacagatctggctcacgattctgaagagctatttcaggatctcagtcaacttcaagaggcttggttagctgaaggcaattcctgatgatgaacagtttgtcccagattttcagtctgataacctggtgcttcatgccccacctccaaccaagatcaaacgggagctgcacagcccctcctctgagctgtcgtcttgtagccatgagcaggctcttggtgctaactrtggagaaaagtgcctctacaactattgtgcctatgataggaagcctccctctgggttcaagccattaacccctcctacaacccccctctcacccacccatcagaatcccctatttcccccacctcaggcaactctgcccacctcagggcatgcccctgcagctggcccagttcaaggtgtgggccccgcccccgccccccattcgcttccagagcctggaccacagcagcaaacatttgcggtcccccgaccaccacatcagcccctgcagatgccaaagatgatgcctgaaaaccagtatccatcagaacagagatttcagagacaactgtctgaaccctgccaccccttccctcctcagccaggagttcctggagataatcgccccagttaccatcggcaaatgtcagaacctattgtccctgcagctcccccgccccctcagggattcaaacaagaataccatgacccactctatgaacatggggtcccgggcatgccagggcccccagcacacgggttccagtcaccaatgggaatcaagcaggagcctcgggattactgcgtcgattcagaagtgcctaactgccagtcatcctacatgagagggggttatttctccagcagccatgaaggtttttcatatgaaaaagatccccgattatactttgacgacacttgtgttgtgcctgagagactggaaggcaragtcaaacaggagcctaccatgtatcgagaggggcccccttaccagaggcgaggttcccttcagctgtggcagttcctggtcacccttcttgatgacccagccaatgcccacttcattgcctggacaggtcgaggcatggagttcaagctgatagaaccggaagaggttgctcggcgctggggcatccagaagaaccggccagccatgaactatgacaagctgagccgctctctccgctattactatgaaaagggcatcatgcagaaggtggctggagagcgatacgtctacaaatttgtctgtgacccagatgccctcttctccatggctttcccggataaccagcgtccgttcctgaaggcagagtccgagtgccacctcagcgaggaggacaccctgccgctgacccactttgaagacagccccgcttacctcctggacatggaccgctgcagcagcctcccctatgccgaaggctttgcttactaagtttctgagtggcggagtggccaaaccctagagctagcagttcccattcaggcaaacaagggcagtggttttgtttgtgtttttggttgttcctaaagcttgccctttgagtattatctggagaacccaagctgtctctggattggcacccttaaagacagatacattggctggggagtgggaacagggaggggcagaaaaccaccaaaaggccagtgcctcaactcttgattctgatgaggtttctgggaagagatcaaaatggagtctccttaccatggacaatacatgcaaagcaatatcttgttcaggttagtacccgcaaaacgggacatagtatgtgacaatctgcatcgatcatggactactaaatgcctttacatagaagggctctgatttgcacaatttgttgaaaaatcacaaacccatagaaaagtaagtaggctaagttggggaggctcaaaccattaagggttaaaaatacatcttaaacattggaaagctcttctagctgaatctgaaatattaccccttgtctagaaaaaggggggcagtcagaacagctgttccccactccgtggttctcaaaatcataaaccatggctactcttgggaaccacccggccatgtggtcgccaagtagagcaagccccctttctcttcccaatcacgtggctgagtgtggatgacttttwttttaggagaagggcgattaacacttttgacagtattttgttttgccctgatttgggggattgttttgttttggtggttgttttggaaaaacagtttataaactgatttttgtagttttggtatttaaagcaaaaaaacgaaaaacaaaaaaacaaaaacaaaccttttggtaactgtgcactgtgtcctttagccagggccgtgccaacttatgaagacactgcagcttgagaggggctttgctgaggcttccccttggccatgtgaaagcccgccttgttgcctgctttgtgctttctgcaccagacaacctgatggaacatttgcacctgagttgtacatttttgaagtgtgcagggcagcctggacacaagcttagattctctatgtatagttccccgtgttcactaacatgccctctctggaaagcatatgtatataacatgtgtcatgtcctttggaaacctggtcacctggtgaaaacccttgggattcttccctgggcatgactgatgccaatttccatttcatcagtttgttttgttttcctttttctttaaatcttggactttaaaccctacctgtgtgattcagtagggtttgagacttacgtgtgatactgacaggtaagcaacagtgctagcattctagattcctgcctttttttaaaaagaaattattctcattgctgtattatattggaaaagttttaaacaaccaagctaaagctatgtgaaagttgagctcaaagtagaggaaaagttactggtggtaccttgctgcctgctctgctggtagaattctgtgctccccgtgacacttagtacattaagaatgactacactgttcctcgtatgtgaaggaggcagtgctgactccgtgagtgtgagacacgtgctttgaactgcttttctattcatggagcactccatagtctcaaactgtcccccttatgaccaacagcacatttgtgaagaggttcgcagggataaggggtgcactttatagctatgg

SEQ ID NO: 3553 - DNA, 534 bp, Homo sapiens
cttcataaagaatataataaaactttattaaaagacagcaaggaaggactaaatatatgcagaaatatrccattttcttggacaggaagagtcaatattataaagatgtcaatttccttcaaactgatcttgaggtttattgcaattccaaccgaagtgttaaacaggttttggaatccagttcaaaactcggcaaaggatttragtagacattttttccaagaagatatacaaatgtccaaggagtacgtgaaaagcttctcagcatcattaatcattaggaaaatgcaaatcagaatcacaatgagccattacctcatacccattaggatggctatttttttaaagcaaaaaaaaaaaaaaggtgtagctgctatggaaaataatacgctggttcctcaacaaaataaatatagaattaccatatgatccagtaattccacatttaggtatatacacaaaaaagctaaaagcagaacctcaaagaggtcttgtataccaatgttcataaaatcattatttacagtagcaaaa

SEQ ID NO: 3554 - DNA, 3666 bp, Homo sapiens
tcctctccgcctttaacttctcgggaagatgaggcagtttggcatctgtggccgagttgctgttgccgggtgatagttggagcggagactcataatggcagaacctgtttctccactgaagcactttgtgctggctaagaaggcgattactgcaatctttgaccagttactggagtttgttactgaaggatcacattttgttgaagcaacatataagaatccggaacttgatcgaatagccactgaagatgatctggtagaaatgcaaggatataaagacaagctttccatcattggtgaggtgctatctcggagacacatgaaggtggcattttttggcaggacaagcagtgggaagagctctgttatcaatgcaatgttgtgggataaagttctccctagtgggattggccatataaccaattgcttcctaagtgttgaaggaactgatggagataaagcctatcttatgacagaaggatcagatgaaaaaaagagtgtgaagacagttaatcaactggcccatgcccttcacatggacaaagatttgaaagctggctgtcttgtacgtgtgttttggccaaaagcaaaatgtgccctcttgagagatgacctggtgttagtagacagtccaggcacagatgtcactacagagctggatagctggattgataagttttgcctagatgctgatgtctttgttttggtcgcaaactctgaatcaacactaatgaatacggaaaaacacttttttyacaaggtgaatgagcggctttccaagcctaatattttcattctcaataatcgttgggatgcctctgcatcagagccagaatatatggaagacgtacgcagacagcacatggaaagatgcctgcatttcttggtggaggagctcaaagttgtaaatgctttagaagcacagaatcgtatcttctttgtttcagcaaaggaagttcttagygctagaaagcaaaaagcacaggggatgccagaaagtggtgtggcacttgctgaaggatttcatgcaagattacaggaatttcagaattttgaacaaatctttgaggagtgtatctcgcagtcagcagtgaaaacaaagttcgaacagcacactatcagagctaaacagatactagctactgtgaaaaacataatggattcagtaaacctggcagctgaagataaaaggcattattcagtggaagagagggaagaccaaattgatagactggactttattcgaaaccagatgaaccttttaacactggatgttaagaaaaaaatcaaggaggttaccgaggaggtggcaaacaaagtttcatgtgcaatgacagatgaaatttgtcgactgtctgttttggttgatgaattttgttcagagtttcatcctaatccagatgtattaaaaatatataaaagtgaattaaataagcacatagaggatggtatgggaagaaatttggctgatcgatgcaccgatgaagtaaacgccttagtgcttcagacccagcaagaaattattgaaaatttgaagccattacttccagctggtatacaggataaactacatacactgatcccttgcaagaaatttgatctcagttataatctaaattaccacaagttatgttcagattttcaagaggatattgtatttcgtttttccctgggctggtcttcccttgtacatcgatttttgggccctagaaatgctcaaagggtgctcctaggattatcagagcctatctttcagctccctagatctttagcttctactcccactgctcctaccactccagcaacgccagataatgcatcacaggaagaactcatgattacattagtaacaggattggcgtccgttacatctagaacttctatgggcatcattattgttggaggagtgatttggaaaactataggctggaaactcctatctgtttcattaactatgtatggagctttgtatctttatgaaagactgagctggaccacccatgccaaggagcgagcctttaaacagcagtttgtaaactatgcaactgaaaaactgaggatgattgttagctccacgagtgcaaactgcagtcaccaagtaaaacaacaaatagctaccacttttgctcgcctgtgccaacaagttgatattactcaaaaacagctggaagaagaaattgctagattacccaaagaaatagatcagttggagaaaatacaaaacaattcaaagctcttaagaaataaagctgttcaacttgaaaatgagctggagaattttactaagcagtttctaccttcaagcaatgaagaatcctaacaatagagattgctttggtgaccatgataggaggaaacgaaacttgtaagattggaacagttgttatttttatgaaattactttaaatatgaattgtactaactgtacctaaatagcaaagccctgtgtagattctggtaatgatctgtctcagggtatgtgtatttttgaagagtgttatgtccttagttttaattttgagtaaagaaaaggctaaaatcatgaattagttacaagcaacagtaccaacttatgtgacccctgaggggtggggctgtgagctcttaatttgtttttgattctgaaaaactctgcttcctggcatccaggagttagagattgagcctttcatcttctttctcaaaactagtttttgatgctttctttcatgggaatagtcacttttttatttagtaaatcgcattgctggaaccaccaaggagtgtggaatgtccttgagtgtaktatttatgcaagtcacagtcacgttgccatcatggcagctatgtgaaacactaataaatgtgtttttactttttattccygttaaaactgatgtaaaacaggataaaggcttgttatagtcacttataagtatctgggtctaagtaatttccttagatgtttctaaagaaacattttcagctttgctcccattatgattccaataaggaacgctttcctagtgcaattttaggagtaaagtttgaagagataaaaatagccaaagataggagacgtctgaattttgaatgataaacagtgatgttttaaaaargctgttgttcttcaggaggcatttgcctaggatattgctggattataccccattggaggcttttaattttatttgtatgaattttccaggatttcattaaaaattattattgtattttttaccttaatgaaagattttgggttcaaatatctttctatattaaaagctgattgagtctgtacatatgtaaattatgcctagtggaggttctgttgactttcttccccactgtggaagaggccagttttgcctccatttgcacattcatttcagttatttctgatccataaatataacatttacaaaattcttccttgagctggtggaaatgcctcaccagtttcctctttaatgaatcaaataaaatctttaactgatgttaaaaaaaattgattgaaactcagatggaatggaaatgtacaaaaatgacaccattctaggaatttgctagacaaaatgtaggactaccagatcagtatctcctagacacttgttagaaatgcacaatcccggggaacrcagtacatttggccacatgtagtttatgtttccttttcatgggagggat

SEQ ID NO: 3555 - DNA, 3514 bp, Homo sapiens
tcctctccgcctttaacttctcgggaagatgaggcagtttggcatctgtggccgagttgctgttgccgggtgatagttggagcggagactcataatggcagaacctgtttctccactgaagcactttgtgctggctaagaaggcgattactgcaatctttgaccagttactggagtttgttactgaaggatcacattttgttgaagcaacatataagaatccggaacttgatcgaatagccactgaagatgatctggtagaaatgcaaggatataaagacaagctttccatcattggtgaggtgctatctcggagacacatgaaggtggcattttttggcaggacaagcagtgggaagagctctgttatcaatgcaatgttgtgggataaagttctccctagtgggattggccatataaccaattgcttcctaagtgttgaaggaactgatggagataaagcctatcttatgacagaaggatcagatgaaaaaaagagtgtgaagacagttaatcaactggcccatgcccttcacatggacaaagatttgaaagctggctgtcttgtacgtgtgttttggccaaaagcaaaatgtgccctcttgagagatgacctggtgttagtagacagtccaggcacagatgtcactacagagctggatagctggattgataagttttgcctagatgctgatgtctttgttttggtcgcaaactctgaatcaacactaatgaatacggaaaaacacttttttyacaaggtgaatgagcggctttccaagcctaatattttcattctcaataatcgttgggatgcctctgcatcagagccagaatatatggaagacgtgtggcacttgctgaaggatttcatgcaagattacaggaatttcagaattttgaacaaatctttgaggagtgtatctcgcagtcagcagtgaaaacaaagttcgaacagcacactatcagagctaaacagatactagctactgtgaaaaacataatggattcagtaaacctggcagctgaaactgaaataggcattattcagtggaagagagggaagaccaaattgatagactggactttattcgaaaccagatgaaccttttaacactggatgttaagaaaaaaatcaaggaggttaccgaggaggtggcaaacaaagtttcatgtgcaatgacagatgaaatttgtcgactgtctgttttggttgatgaattttgttcagagtttcatcctaatccagatgtattaaaaatatataaaagtgaattaaataagcacatagaggatggtatgggaagaaatttggctgatcgatgcaccgatgaagtaaacgccttagtgcttcagacccagcaagaaattattgaaaatttgaagccattacttccagctggtatacaggataaactacatacactgatcccttgcaagaaatttgatctcagttataatctaaattaccacaagttatgttcagattttcaagaggatattgtatttcgtttttccctgggctggtcttcccttgtacatcgatttttgggccctagaaatgctcaaagggtgctcctaggattatcagagcctatctttcagctccctagatctttagcttctactcccactgctcctaccactccagcaacgccagataatgcatcacaggaagaactcatgattacattagtaacaggattggcgtccgttacatctagaacttctatgggcatcattattgttggaggagtgatttggaaaactataggctggaaactcctatctgtttcattaactatgtatggagctttgtatctttatgaaagactgagctggaccacccatgccaaggagcgagcctttaaacagcagtttgtaaactatgcaactgaaaaactgaggatgattgttagctccacgagtgcaaactgcagtcaccaagtaaaacaacaaatagctaccacttttgctcgcctgtgccaacaagttgatattactcaaaaacagctggaagaagaaattgctagattacccaaagaaatagatcagttggagaaaatacaaaacaattcaaagctcttaagaaataaagctgttcaacttgaaaatgagctggagaattttactaagcagtttctaccttcaagcaatgaagaatcctaacaatagagattgctttggtgaccatgataggaggaaacgaaacttgtaagattggaacagttgttatttttatgaaattactttaaatatgaattgtactaactgtacctaaatagcaaagccctgtgtagattctggtaatgatctgtctcagggtatgtgtatttttgaagagtgttatgtccttagttttaattttgagtaaagaaaaggctaaaatcatgaattagttacaagcaacagtaccaacttatgtgacccctgaggggtggggctgtgagctcttaatttgtttttgattctgaaaaactctgcttcctggcatccaggagttagagattgagcctttcatcttctttctcaaaactagtttttgatgctttctttcatgggaatagtcacttttttatttagtaaatcgcattgctggaaccaccaaggagtgtggaatgtccttgagtgtaktatttatgcaagtcacagtcacgttgccatcatggcagctatgtgaaacactaataaatgtgtttttactttttattccygttaaaactgatgtaaaacaggataaaggcttgttatagtcacttataagtatctgggtctaagtaatttccttagatgtttctaaagaaacattttcagctttgctcccattatgattccaataaggaacgctttcctagtgcaattttaggagtaaagtttgaagagataaaaatagccaaagataggagacgtctgaattttgaatgataaacagtgatgttttaaaaargctgttgttcttcaggaggcatttgcctaggatattgctggattataccccattggaggcttttaattttatttgtatgaattttccaggatttcattaaaaattattattgtattttttaccttaatgaaagattttgggttcaaatatctttctatattaaaagctgattgagtctgtacatatgtaaattatgcctagtggaggttctgttgactttcttccccactgtggaagaggccagttttgcctccatttgcacattcatttcagttatttctgatccataaatataacatttacaaaattcttccttgagctggtggaaatgcctcaccagtttcctctttaatgaatcaaataaaatctttaactgatgttaaaaaaaattgattgaaactcagatggaatggaaatgtacaaaaatgacaccattctaggaatttgctagacaaaatgtaggactaccagatcagtatctcctagacacttgttagaaatgcacaatcccggggaacrcagtacatttggccacatgtagtttatgtttccttttcatgggagggat

SEQ ID NO: 3556 - DNA, 3233 bp, Homo sapiens
tcctctccgcctttaacttctcgggaagatgaggcagtttggcatctgtggccgagttgctgttgccgggtgatagttggagcggagactcataatggcagaacctgtttctccactgaagcactttgtgctggctaagaaggcgattactgcaatctttgaccagttactggagtttgttactgaaggatcacattttgttgaagcaacatataagaatccggaacttgatcgaatagccactgaagatgatctggtagaaatgcaaggatataaagacaagctttccatcattggtgaggtgctatctcggagacacatgaaggtggcattttttggcaggacaagcagtgggaagagctctgttatcaatgcaatgttgtgggataaagttctccctagtgggattggccatataaccaattgcttcctaagtgttgaaggaactgatggagataaagcctatcttatgacagaaggatcagatgaaaaaaagagtgtgaagacagttaatcaactggcccatgcccttcacatggacaaagatttgaaagctggctgtcttgtacgtgtgttttggccaaaagcaaaatgtgccctcttgagagatgacctggtgttagtagacagtccaggcacagatgtcactacagagctggatagctggattgataagttttgcctagatgctgatgtctttgttttggtcgcaaactctgaatcaacactaatgaatacggaaaaacacttttttyacaaggtgaatgagcggctttccaagcctaatattttcattctcaataatcgttgggatgcctctgcatcagagccagaatatatggaagacgtacgcagacagcacatggaaagatgcctgcatttcttggtggaggagctcaaagttgtaaatgctttagaagcacagaatcgtatcttctttgtttcagcaaaggaagttcttagygctagaaagcaaaaagcacaggggatgccagaaagtggtgtggcacttgctgaaggatttcatgcaagattacaggaatttcagaattttgaacaaatctttgaggagtgtatctcgcagtcagcagtgaaaacaaagttcgaacagcacactatcagagctaaacagatactagctactgtgaaaaacataatggattcagtaaacctggcagctgaagataaaaggcattattcagtggaagagagggaagaccaaattgatagactggactttattcgaaaccagatgaaccttttaacactggatgttaagaaaaaaatcaaggaggttaccgaggaggtggcaaacaaagtttcatgtgcaatgacagatgaaatttgtcgactgtctgttttggttgatgaattttgttcagagtttcatcctaatccagatgtattaaaaatatataaaagtgaattaaataagcacatagaggatggtatgggaagaaatttggctgatcgatgcaccgatgaagtaaacgccttagtgcttcagacccagcaagaaattattgaaaatttgaagccattacttccagctggtatacaggataaactacatacactgatcccttgcaagaaatttgatctcagttataatctaaattaccacaagttatgttcagattttcaagaggatattgtatttcgtttttccctgggctggtcttcccttgtacatcgatttttgggccctagaaatgctcaaagggtgctcctaggattatcagagcctatctttcagctccctagatctttagcttctactcccactgctcctaccactccagcaacgccagataatgcatcacaggaagaactcatgattacattagtaacaggattggcgtccgttacatctagaacttctatgggcatcattattgttggaggagtgatttggaaaactataggctggaaactcctatctgtttcattaactatgtatggagctttgtatctttatgaaagactgagctggaccacccatgccaaggagcgagcctttaaacagcagtttgtaaactatgcaactgaaaaactgaggatgattgttagctccacgagtgcaaactgcagtcaccaagtaaaacaacaaatagctaccacttttgctcgcctgtgccaacaagttgatattactcaaaaacagctggaagaagaaattgctagattacccaaagaaatagatcagttggagaaaatacaaaacaattcaaagctcttaagaaataaagctgttcaacttgaaaatgagctggagaattttactaagcagtttctaccttcaagcaatgaagaatcctaacaatagagattgctttggtgaccatgataggaggaaacgaaacttgtaagattggaacagttgttatttttatgaaattactttaaatatgaattgtactaactgtacctaaatagcaaagccctgtgtagattctggtaatgatctgtctcagggtatgtgtatttttgaagagtgttatgtccttagttttaattttgagtaaagaaaaggctaaaatcatgaattagttttgattctgaaaaactctgcttcctggcatccaggagttagagattgagcctttcatcttctttctcaaaactagtttttgatgctttctttcatgggaatagtcacttttttatttagtaaatcgcattgctggaaccaccaaggagtgtggaatgtccttgagtgtaktatttatgcaagtcacagtcacgttgccatcatggcagctatgtgaaacactaataaatgtgtttttactttttattccygttaaaactgatgtaaaacaggataaaggcttgttatagtcacttataagtatctgggtctaagtaatttccttagatgtttctaaagaaacattttcagctttgctcccattatgattccaataaggaacgctttcctagtgcaattttaggagtaaagtttgaagagataaaaatagccaaagataggagacgtctgaattttgaatgataaacagtgatgttttaaaaargctgttgttcttcaggaggcatttgcctaggatattgctggattataccccattggaggcttttaattttatttgtatgaattttccaggatttcattaaaaattattattgtattttttaccttaatgaaagattttgggttcaaatatctttctatattaaaagctgattgagtctgtacatatgtaaattatgcc

SEQ ID NO: 3557 - DNA, 3568 bp, Homo sapiens
gaccgscctttgccactccccctgcctcctctccgcctttaacttctcgggaagatgaggcagtttggcatctgtggccgagttgctgttgccgggtgatagttggagcggagacttagcataatggcagaacctgtttctccactgaagcactttgtgctggctaagaaggcgattactgcaatctttgaccagttactggagtttgttactgaaggatcacattttgttgaagcaacatataagaatccggaacttgatcgaatagccactgaagatgatctggtagaaatgcaaggatataaagacaagctttccatcattggtgaggtgctatctcggagacacatgaaggtggcattttttggcaggacaagcagtgggaagagctctgttatcaatgcaatgttgtgggataaagttctccctagtgggattggccatataaccaattgcttcctaagtgttgaaggaactgatggagataaagcctatcttatgacagaaggatcagatgaaaaaaagagtgtgaagacagttaatcaactggcccatgcccttcacatggacaaagatttgaaagctggctgtcttgtacgtgtgttttggccaaaagcaaaatgtgccctcttgagagatgacctggtgttagtagacagtccaggcacagatgtcactacagagctggatagctggattgataagttttgcctagatgctgatgtctttgttttggtcgcaaactctgaatcaacactaatgaatacggaaaaacacttttttyacaaggtgaatgagcggctttccaagcctaatattttcattctcaataatcgttgggatgcctctgcatcagagccagaatatatggaagacgtacgcagacagcacatggaaagatgcctgcatttcttggtggaggagctcaaagttgtaaatgctttagaagcacagaatcgtatcttctttgtttcagcaaaggaagttcttagygctagaaagcaaaaagcacaggggatgccagaaagtggtgtggcacttgctgaaggatttcatgcaagattacaggaatttcagaattttgaacaaatctttgaggagtgtatctcgcagtcagcagtgaaaacaaagttcgaacagcacactatcagagctaaacagatactagctactgtgaaaaacataatggattcagtaaacctggcagctgaagataaaaggtttcatgtgcaatgacagatgaaatttgtcgactgtctgttttggttgatgaattttgttcagagtttcatcctaatccagatgtattaaaaatatataaaagtgaattaaataagcacatagaggatggtatgggaagaaatttggctgatcgatgcaccgatgaagtaaacgccttagtgcttcagacccagcaagaaattattgaaaatttgaagccattacttccagctggtatacaggataaactacatacactgatcccttgcaagaaatttgatctcagttataatctaaattaccacaagttatgttcagattttcaagaggatattgtatttcgtttttccctgggctggtcttcccttgtacatcgatttttgggccctagaaatgctcaaagggtgctcctaggattatcagagcctatctttcagctccctagatctttagcttctactcccactgctcctaccactccagcaacgccagataatgcatcacaggaagaactcatgattacattagtaacaggattggcgtccgttacatctagaacttctatgggcatcattattgttggaggagtgatttggaaaactataggctggaaactcctatctgtttcattaactatgtatggagctttgtatctttatgaaagactgagctggaccacccatgccaaggagcgagcctttaaacagcagtttgtaaactatgcaactgaaaaactgaggatgattgttagctccacgagtgcaaactgcagtcaccaagtaaaacaacaaatagctaccacttttgctcgcctgtgccaacaagttgatattactcaaaaacagctggaagaagaaattgctagattacccaaagaaatagatcagttggagaaaatacaaaacaattcaaagctcttaagaaataaagctgttcaacttgaaaatgagctggagaattttactaagcagtttctaccttcaagcaatgaagaatcctaacaatagagattgctttggtgaccatgataggaggaaacgaaacttgtaagattggaacagttgttatttttatgaaattactttaaatatgaattgtactaactgtacctaaatagcaaagccctgtgtagattctggtaatgatctgtctcagggtatgtgtatttttgaagagtgttatgtccttagttttaattttgagtaaagaaaaggctaaaatcatgaattagttacaagcaacagtaccaacttatgtgacccctgaggggtggggctgtgagctcttaatttgtttttgattctgaaaaactctgcttcctggcatccaggagttagagattgagcctttcatcttctttctcaaaactagtttttgatgctttctttcatgggaatagtcacttttttatttagtaaatcgcattgctggaaccaccaaggagtgtggaatgtccttgagtgtaktatttatgcaagtcacagtcacgttgccatcatggcagctatgtgaaacactaataaatgtgtttttactttttattccygttaaaactgatgtaaaacaggataaaggcttgttatagtcacttataagtatctgggtctaagtaatttccttagatgtttctaaagaaacattttcagctttgctcccattatgattccaataaggaacgctttcctagtgcaattttaggagtaaagtttgaagagataaaaatagccaaagataggagacgtctgaattttgaatgataaacagtgatgttttaaaaargctgttgttcttcaggaggcatttgcctaggatattgctggattataccccattggaggcttttaattttatttgtatgaattttccaggatttcattaaaaattattattgtattttttaccttaatgaaagattttgggttcaaatatctttctatattaaaagctgattgagtctgtacatatgtaaattatgcctagtggaggttctgttgactttcttccccactgtggaagaggccagttttgcctccatttgcacattcatttcagttatttctgatccataaatataacatttacaaaattcttccttgagctggtggaaatgcctcaccagtttcctctttaatgaatcaaataaaatctttaactgatgttaaaaaaaattgattgaaactcagatggaatggaaatgtacaaaaatgacaccattctaggaatttgctagacaaaatgtaggactaccagatcagtatctcctagacacttgttagaaatgcacaatcccggggaacrcagtacatttggccacatgtagtttatgtttccttttcatgggagggat

SEQ ID NO: 3558 - DNA, 3446 bp, Homo sapiens
gaccgscctttgccactccccctgcctcctctccgcctttaacttctcgggaagatgaggcagtttggcatctgtggccgagttgctgttgccgggtgatagttggagcggagacttagcataatggcagaacctgtttctccactgaagcactttgtgctggctaagaaggcgattactgcaatctttgaccagttactggagtttgttactgaaggatcacattttgttgaagcaacatataagaatccggaacttgatcgaatagccactgaagatgatctggtagaaatgcaaggatataaagacaagctttccatcattggtgaggtgctatctcggagacacatgaaggtggcattttttggcaggacaagcagtgggaagagctctgttatcaatgcaatgttgtgggataaagttctccctagtgggattggccatataaccaattgcttcctaagtgttgaaggaactgatggagataaagcctatcttatgacagaaggatcagatgaaaaaaagagtgtgaagacagttaatcaactggcccatgcccttcacatggacaaagatttgaaagctggctgtcttgtacgtgtgttttggccaaaagcaaaatgtgccctcttgagagatgacctggtgttagtagacagtccaggcacagatgtcactacagagctggatagctggattgataagttttgcctagatgctgatgtctttgttttggtcgcaaactctgaatcaacactaatgaatacggaaaaacacttttttyacaaggtgaatgagcggctttccaagcctaatattttcattctcaataatcgttgggatgcctctgcatcagagccagaatatatggaagacgtacgcagacagcacatggaaagatgcctgcatttcttggtggaggagctcaaagttgtaaatgctttagaagcacagaatcgtatcttctttgtttcagcaaaggaagttcttagygctagaaagcaaaaagcacaggggatgccagaaagtggtgtggcacttgctgaaggatttcatgcaagattacaggaatttcagaattttgaacaaatctttgaggtttcatgtgcaatgacagatgaaatttgtcgactgtctgttttggttgatgaattttgttcagagtttcatcctaatccagatgtattaaaaatatataaaagtgaattaaataagcacatagaggatggtatgggaagaaatttggctgatcgatgcaccgatgaagtaaacgccttagtgcttcagacccagcaagaaattattgaaaatttgaagccattacttccagctggtatacaggataaactacatacactgatcccttgcaagaaatttgatctcagttataatctaaattaccacaagttatgttcagattttcaagaggatattgtatttcgtttttccctgggctggtcttcccttgtacatcgatttttgggccctagaaatgctcaaagggtgctcctaggattatcagagcctatctttcagctccctagatctttagcttctactcccactgctcctaccactccagcaacgccagataatgcatcacaggaagaactcatgattacattagtaacaggattggcgtccgttacatctagaacttctatgggcatcattattgttggaggagtgatttggaaaactataggctggaaactcctatctgtttcattaactatgtatggagctttgtatctttatgaaagactgagctggaccacccatgccaaggagcgagcctttaaacagcagtttgtaaactatgcaactgaaaaactgaggatgattgttagctccacgagtgcaaactgcagtcaccaagtaaaacaacaaatagctaccacttttgctcgcctgtgccaacaagttgatattactcaaaaacagctggaagaagaaattgctagattacccaaagaaatagatcagttggagaaaatacaaaacaattcaaagctcttaagaaataaagctgttcaacttgaaaatgagctggagaattttactaagcagtttctaccttcaagcaatgaagaatcctaacaatagagattgctttggtgaccatgataggaggaaacgaaacttgtaagattggaacagttgttatttttatgaaattactttaaatatgaattgtactaactgtacctaaatagcaaagccctgtgtagattctggtaatgatctgtctcagggtatgtgtatttttgaagagtgttatgtccttagttttaattttgagtaaagaaaaggctaaaatcatgaattagttacaagcaacagtaccaacttatgtgacccctgaggggtggggctgtgagctcttaatttgtttttgattctgaaaaactctgcttcctggcatccaggagttagagattgagcctttcatcttctttctcaaaactagtttttgatgctttctttcatgggaatagtcacttttttatttagtaaatcgcattgctggaaccaccaaggagtgtggaatgtccttgagtgtaktatttatgcaagtcacagtcacgttgccatcatggcagctatgtgaaacactaataaatgtgtttttactttttattccygttaaaactgatgtaaaacaggataaaggcttgttatagtcacttataagtatctgggtctaagtaatttccttagatgtttctaaagaaacattttcagctttgctcccattatgattccaataaggaacgctttcctagtgcaattttaggagtaaagtttgaagagataaaaatagccaaagataggagacgtctgaattttgaatgataaacagtgatgttttaaaaargctgttgttcttcaggaggcatttgcctaggatattgctggattataccccattggaggcttttaattttatttgtatgaattttccaggatttcattaaaaattattattgtattttttaccttaatgaaagattttgggttcaaatatctttctatattaaaagctgattgagtctgtacatatgtaaattatgcctagtggaggttctgttgactttcttccccactgtggaagaggccagttttgcctccatttgcacattcatttcagttatttctgatccataaatataacatttacaaaattcttccttgagctggtggaaatgcctcaccagtttcctctttaatgaatcaaataaaatctttaactgatgttaaaaaaaattgattgaaactcagatggaatggaaatgtacaaaaatgacaccattctaggaatttgctagacaaaatgtaggactaccagatcagtatctcctagacacttgttagaaatgcacaatcccggggaacrcagtacatttggccacatgtagtttatgtttccttttcatgggagggat

SEQ ID NO: 3559 - DNA, 3695 bp, Homo sapiens
gaccgscctttgccactccccctgcctcctctccgcctttaacttctcgggaagatgaggcagtttggcatctgtggccgagttgctgttgccgggtgatagttggagcggagacttagcataatggcagaacctgtttctccactgaagcactttgtgctggctaagaaggcgattactgcaatctttgaccagttactggagtttgttactgaaggatcacattttgttgaagcaacatataagaatccggaacttgatcgaatagccactgaagatgatctggtagaaatgcaaggatataaagacaagctttccatcattggtgaggtgctatctcggagacacatgaaggtggcattttttggcaggacaagcagtgggaagagctctgttatcaatgcaatgttgtgggataaagttctccctagtgggattggccatataaccaattgcttcctaagtgttgaaggaactgatggagataaagcctatcttatgacagaaggatcagatgaaaaaaagagtgtgaagacagttaatcaactggcccatgcccttcacatggacaaagatttgaaagctggctgtcttgtacgtgtgttttggccaaaagcaaaatgtgccctcttgagagatgacctggtgttagtagacagtccaggcacagatgtcactacagagctggatagctggattgataagttttgcctagatgctgatgtctttgttttggtcgcaaactctgaatcaacactaatgaatacggaaaaacacttttttyacaaggtgaatgagcggctttccaagcctaatattttcattctcaataatcgttgggatgcctctgcatcagagccagaatatatggaagacgtacgcagacagcacatggaaagatgcctgcatttcttggtggaggagctcaaagttgtaaatgctttagaagcacagaatcgtatcttctttgtttcagcaaaggaagttcttagygctagaaagcaaaaagcacaggggatgccagaaagtggtgtggcacttgctgaaggatttcatgcaagattacaggaatttcagaattttgaacaaatctttgaggagtgtatctcgcagtcagcagtgaaaacaaagttcgaacagcacactatcagagctaaacagatactagctactgtgaaaaacataatggattcagtaaacctggcagctgaagataaaaggcattattcagtggaagagagggaagaccaaattgatagactggactttattcgaaaccagatgaaccttttaacactggatgttaagaaaaaaatcaaggaggttaccgaggaggtggcaaacaaagtttcatgtgcaatgacagatgaaatttgtcgactgtctgttttggttgatgaattttgttcagagtttcatcctaatccagatgtattaaaaatatataaaagtgaattaaataagcacatagaggatggtatgggaagaaatttggctgatcgatgcaccgatgaagtaaacgccttagtgcttcagacccagcaagaaattattgaaaatttgaagccattacttccagctggtatacaggataaactacatacactgatcccttgcaagaaatttgatctcagttataatctaaattaccacaagttatgttcagattttcaagaggatattgtatttcgtttttccctgggctggtcttcccttgtacatcgatttttgggccctagaaatgctcaaagggtgctcctaggattatcagagcctatctttcagctccctagatctttagcttctactcccactgctcctaccactccagcaacgccagataatgcatcacaggaagaactcatgattacattagtaacaggattggcgtccgttacatctagaacttctatgggcatcattattgttggaggagtgatttggaaaactataggctggaaactcctatctgtttcattaactatgtatggagctttgtatctttatgaaagactgagctggaccacccatgccaaggagcgagcctttaaacagcagtttgtaaactatgcaactgaaaaactgaggatgattgttagctccacgagtgcaaactgcagtcaccaagtaaaacaacaaatagctaccacttttgctcgcctgtgccaacaagttgatattactcaaaaacagctggaagaagaaattgctagattacccaaagaaatagatcagttggagaaaatacaaaacaattcaaagctcttaagaaataaagctgttcaacttgaaaatgagctggagaattttactaagcagtttctaccttcaagcaatgaagaatcctaacaatagagattgctttggtgaccatgataggaggaaacgaaacttgtaagattggaacagttgttatttttatgaaattactttaaatatgaattgtactaactgtacctaaatagcaaagccctgtgtagattctggtaatgatctgtctcagggtatgtgtatttttgaagagtgttatgtccttagttttaattttgagtaaagaaaaggctaaaatcatgaattagttacaagcaacagtaccaacttatgtgacccctgaggggtggggctgtgagctcttaatttgtttttgattctgaaaaactctgcttcctggcatccaggagttagagattgagcctttcatcttctttctcaaaactagtttttgatgctttctttcatgggaatagtcacttttttatttagtaaatcgcattgctggaaccaccaaggagtgtggaatgtccttgagtgtaktatttatgcaagtcacagtcacgttgccatcatggcagctatgtgaaacactaataaatgtgtttttactttttattccygttaaaactgatgtaaaacaggataaaggcttgttatagtcacttataagtatctgggtctaagtaatttccttagatgtttctaaagaaacattttcagctttgctcccattatgattccaataaggaacgctttcctagtgcaattttaggagtaaagtttgaagagataaaaatagccaaagataggagacgtctgaattttgaatgataaacagtgatgttttaaaaargctgttgttcttcaggaggcatttgcctaggatattgctggattataccccattggaggcttttaattttatttgtatgaattttccaggatttcattaaaaattattattgtattttttaccttaatgaaagattttgggttcaaatatctttctatattaaaagctgattgagtctgtacatatgtaaattatgcctagtggaggttctgttgactttcttccccactgtggaagaggccagttttgcctccatttgcacattcatttcagttatttctgatccataaatataacatttacaaaattcttccttgagctggtggaaatgcctcaccagtttcctctttaatgaatcaaataaaatctttaactgatgttaaaaaaaattgattgaaactcagatggaatggaaatgtacaaaaatgacaccattctaggaatttgctagacaaaatgtaggactaccagatcagtatctcctagacacttgttagaaatgcacaatcccggggaacrcagtacatttggccacatgtagtttatgtttccttttcatgggagggat

SEQ ID NO: 3560 - DNA, 2900 bp, Homo sapiens
tcctctccgcctttaacttctcgggaagatgaggcagtttggcatctgtggccgagttgctgttgccgggtgatagttggagcggagactcataatggcagaacctgtttctccactgaagcactttgtgctggctaagaaggcgattactgcaatctttgaccagttactggagtttgttactgaaggatcacattttgttgaagcaacatataagaatccggaacttgatcgaatagccactgaagatgatctggtagaaatgcaaggatataaagacaagctttccatcattggtgaggtgctatctcggagacacatgaaggtggcattttttggcaggacaagcagtgggaagagctctgttatcaatgcaatgttgtgggataaagttctccctagtgggattggccatataaccaattgcttcctaagtgttgaaggaactgatggagataaagcctatcttatgacagaaggatcagatgaaaaaaagagtgtgaagacagttaatcaactggcccatgcccttcacatggacaaagatttgaaagctggctgtcttgtacgtgtgttttggccaaaagcaaaatgtgccctcttgagagatgacctggtgttagtagacagtccaggcacagatgtcactacagagctggatagctggattgataagttttgcctagatgctgatgtctttgttttggtcgcaaactctgaatcaacactaatgaatacggaaaaacacttttttyacaaggtgaatgagcggctttccaagcctaatattttcattctcaataatcgttgggatgcctctgcatcagagccagaatatatggaagacgtacgcagacagcacatggaaagatgcctgcatttcttggtggaggagctcaaagttgtaaatgctttagaagcacagaatcgtatcttctttgtttcagcaaaggaagttcttagygctagaaagcaaaaagcacaggggatgccagaaagtggtgtggcacttgctgaaggatttcatgcaagattacaggaatttcagaattttgaacaaatctttgaggagtgtatctcgcagtcagcagtgaaaacaaagttcgaacagcacactatcagagctaaacagatactagctactgtgaaaaacataatggattcagtaaacctggcagctgaagataaaaggcattattcagtggaagagagggaagaccaaattgatagactggactttattcgaaaccagatgaaccttttaacactggatgttaagaaaaaaatcaaggaggttaccgaggaggtggcaaacaaagtttcatgtgcaatgacagatgaaatttgtcgactgtctgttttggttgatgaattttgttcagagtttcatcctaatccagatgtattaaaaatatataaaagtctccctagatctttagcttctactcccactgctcctaccactccagcaacgccagataatgcatcacaggaagaactcatgattacattagtaacaggattggcgtccgttacatctagaacttctatgggcatcattattgttggaggagtgatttggaaaactataggctggaaactcctatctgtttcattaactatgtatggagctttgtatctttatgaaagactgagctggaccacccatgccaaggagcgagcctttaaacagcagtttgtaaactatgcaactgaaaaactgaggatgattgttagctccacgagtgcaaactgcagtcaccaagtaaaacaacaaatagctaccacttttgctcgcctgtgccaacaagttgatattactcaaaaacagctggaagaagaaattgctagattacccaaagaaatagatcagttggagaaaatacaaaacaattcaaagctcttaagaaataaagctgttcaacttgaaaatgagctggagaattttactaagcagtttctaccttcaagcaatgaagaatcctaacaatagagattgctttggtgaccatgataggaggaaacgaaacttgtaagattggaacagttgttatttttatgaaattactttaaatatgaattgtactaactgtacctaaatagcaaagccctgtgtagattctggtaatgatctgtctcagggtatgtgtatttttgaagagtgttatgtccttagttttaattttgagtaaagaaaaggctaaaatcatgaattagttttgattctgaaaaactctgcttcctggcatccaggagttagagattgagcctttcatcttctttctcaaaactagtttttgatgctttctttcatgggaatagtcacttttttatttagtaaatcgcattgctggaaccaccaaggagtgtggaatgtccttgagtgtaktatttatgcaagtcacagtcacgttgccatcatggcagctatgtgaaacactaataaatgtgtttttactttttattccygttaaaactgatgtaaaacaggataaaggcttgttatagtcacttataagtatctgggtctaagtaatttccttagatgtttctaaagaaacattttcagctttgctcccattatgattccaataaggaacgctttcctagtgcaattttaggagtaaagtttgaagagataaaaatagccaaagataggagacgtctgaattttgaatgataaacagtgatgttttaaaaargctgttgttcttcaggaggcatttgcctaggatattgctggattataccccattggaggcttttaattttatttgtatgaattttccaggatttcattaaaaattattattgtattttttaccttaatgaaagattttgggttcaaatatctttctatattaaaagctgattgagtctgtacatatgtaaattatgcc

SEQ ID NO: 3561 - DNA, 497 bp, Homo sapiens
cggccgccaccgagcgtgctgagcaaccgcagcctccgcggccgagagtgcagmgagggagagccagytgcgcagagccctgcaaccagcagtccagggagaagtggtgaatgtcatggagcccagctgaaatggactggcccccttgagcctgtcccaagccctggtgccaggtgtccatccccgtgctgaggtaagaccccctgaagcccagcctgaggaagagaggacacaatgccttttttgcaggggcaggaggcagagggccttctcaggaaagaaggagcagttagttgtttctggttcagtcaaaccatctgcttcagcctcagcccgttgggaggcaaggtcaattggtggccaaagaggcttctgctttgtcagagcaggtctttggaatyttgatgggagttgtattttctcagttgctggtgaaatttgaattcccaagggaatacatttatcctccaggtaagactgcaccggattcaggtgaa

SEQ ID NO: 3562 - DNA, 4312 bp, Homo sapiens
ccttccactgtgcgtcttctgtcccccgttcttccccmgcggacccctctttcgagactccctagtggggtycccagctcccgggcgatcctgcccttgccgagcgcgttttctggagtcacctgggggaggggagtcctgggcagggccgggctggggaagacgcctggggcactgcccggcgttaacaaagggagccgataccgaccggcgtgggcgcggagcgggcggccgccaccgagcgtgctgagcaaccgcagcctccgcggccgagagtgcagmgagcaaggggagagccagytgcgcagagccctgcaaccagcagtccagggagaagtggtgaatgtcatggagcccagctgaaatggactggcccccttgagcctgtcccaagccctggtgccaggtgtccatccccgtgctgagatgagttttgatcatcctgagaaaaatgggccttggcctgcagacccaataaaccttccctcccatggataatagtgctaattcctgaggacctgaagggcctgccgcccctgggggattagccagaagcaggcttgttttcctgctcagaacaaagtgacttccctgaacacatcttcattatgattcacaccaacctgaagaaaaagttcagctgctgcgtcctggtctttcttctgtttgcagtcatctgtgtgtggaaggaaaagaagaaagggagttactatgattcctttaaattgcaaaccaaggaattccaggtgttaaagagtctggggaaattggccatggggtctgattcccagtctgtatcctcaagcagcacccaggacccccacaggggccgccagaccctcggcagtctcagaggcctagccaaggccaaaccagaggcctccttccaggtgtggaacaaggacagctcttccaaaaaccttatccctaggctgcaaaagatctggaagaattacctaagcatgaacaagtacaaagtgtcctacaaggggccaggaccaggcatcaagttcagtgcagaggccctgcgctgccacctccgggaccatgtgaatgtatccatggtagaggtcacagattttcccttcaatacctctgaatgggagggttatctgcccaaggagagcattaggaccaaggctgggccttggggcaggtgtgctgttgtgtcgtcagcgggatctctgaagtcctcccaactaggcagagaaatcgatgatcatgacgcagtcctgaggtttaatggggcacccacagccaacttccaacaagatgtgggcacaaaaactaccattcgcctgatgaactctcagttggttaccacagagaagcgcttcctcaaagacagtttgtacaatgaaggaatcctaattgtatgggacccatctgtataccactcagatatcccaaagtggtaccagaatccggattataatttctttaayaactacaagacttatcgtaagctgcaccccaatcagcccttttacatcctcaagccccagatgccttgggagctatgggacattcttcaagaaatctccccagaagagattcagccaaaccccccatcctctgggatgcttggtatcatcatcatgatgacgctgtgtgaccaggtggatatttatgagttcctcccatccaagcgcaagactgacgtgtgctactactaccagaagttcttcgatagtgcctgcacgatgggtgcctaccacccgctgctctatgagaagaatttggtgaagcatctcaaccagggcacagatgaggacatctacctgcttggaaaagccacactgcctggcttccggaccattcactgctaagcacaggctcctcactcttctccatcaggcattaaatgaatggtctcttggccaccccagcctgggaagaacattttcctgaacaattccagcctgctccttttactctargggcctctgtcagcaagaccatggggrcttcaagagcctgtggtcaggaaatcaggtccagccttccctgtagccagacagtttatgagcccagagcctcctgccacacacatgcacacatatctagcattctttccagacagcatcctccccgccttccaccttggtagatgcaaggtctatctctcccatcagggctgccaaagctgggctttgtttttcccagcagaatgatgccattctcacaaaccaatgctctatattgcttgaagtctgcatctaaatattgatttcacgttttaaagaaattctcttaaattacaattgtgcccaatgcagggtggctctggggggcaagtaggtggtacaggggattggaaacatgctcygcgcctccagaraaaagttgggctggtccttagactgggtgcttatgattaaagggtcttggttagcccactttccctctccatgtggagatggaaggtagagaaggatacagtgtctatcctcaagttgctacggttcagtgagagaggcagacatctgaacaggcaggtaggattcagtgtgctcagtgcactggggatttggagagagatgggcttgctctctctgtgcacccaggagggccacgcacttaaaactgwgtttgtggatcagagaaggctttatagcacagggggcattcagatgagtcttagaggaagagaagaaacatggcaagcagattacatctgagccgtttgaattgtgtttttctttcttcccatgtttattttctaagatctacctgaacttagagactcaagatatttttttaggaaacctcctacccatgtctgaggtagcaagtgcagcctcacgacagataccaggcaatccagagccacaaaacgtgattcctccaggctctgcctggcctgaccctgtcctgtcagctgggtttacataccagtcccattcttccttttcaatammtacccccaaatcttctcctaaccaccatctgttttttttttttaaagcattttttgctttaaaagcatcctgaccccaatttctttgagctcacgggccttttgctgaaggtctctcagggtgtagtggtgtggctctctggacttaacgtcactctcagaggtcagaaccttggagatcagaactgattctcaccaggtgtgagaggtgtggtagcagattgcaatgctctgcacctcttccttgcaagtgagcaacttcaggctctctgggcagaggctggcccactgtagtttgcagacatgctctccagatggttttactaagtcccctctccctgatagggaatcctgctggaccagcgcagccctggtgtggagagacccagggctctgcactctcaaggctggccccatgtgctcaaggggrtctaatgtttgggctccaaactaaccatctcrgagctgggctcctcatttactgccaaaccctcagcttatgtagctagaaagggccctggagtgagaaagcctggattttcaaattgatgctcccctactgactagctgtgccactctgggcaaatgctcttccttgagcctgtttccacacctgtaaagtggggatgatgatcctatctcactgcttttgtgaggattacaggaaagcacctgtcctggctctgtacctggcacgtagtaggtgctcagttcatgctggtttccttcctgcctttagtagggacctgctctgtgctcacacctcggctgcatgcaccctgctgtgacggaggctagtgtggaagaggtcctgtcctcagggaattaactgtcttattgggagacaacaactrtcctccttggaacacccaagaaaccatgcaaagcagtggacaacacagaacacgccctcctcctcgctgcctgcagctccaatctgattctgcttgggaatgggcggagcacgtgggctgcttaactgctgtataggacaagccccttacccctctctgggcccatgaattcctggcttggtttatgttctgatttgacacactgattttaatcttcgaatcatgacactgagtgcagaggaggtggcattccgacagcaggacatacatgttggtgtgaagactgggacgacactgggtagaatctagtttttaattattattaatataaaggatcaaattaatttaaatatgattctgaagtctacagaacttttagttctgtgctgtctatgtggacactttggtaaaaygcaaattatgatatggacgttatcattggtctggtgagatgtttcatatttgtgacagttaatttccatctattcatctggatcatgggaccctctctaatccttccmccaatcaaataagctat

SEQ ID NO: 3563 - DNA, 4285 bp, Homo sapiens
ggaggaggttcctgtagggcggcacaaccagggagggcgtggaagctctgcatcccttctcccataccttgctctacacatctcttcatctgtatcctctgcagcatccttgatgataaaccagtaaatatgagttttgatcatcctgagaaaaatgggccttggcctgcagacccaataaaccttccctcccatggataatagtgctaattcctgaggacctgaagggcctgccgcccctgggggattagccagaagcaggcttgttttcctgctcagaacaaagtgacttccctgaacacatcttcattatgattcacaccaacctgaagaaaaagttcagctgctgcgtcctggtctttcttctgtttgcagtcatctgtgtgtggaaggaaaagaagaaagggagttactatgattcctttaaattgcaaaccaaggaattccaggtgttaaagagtctggggaaattggccatggggtctgattcccagtctgtatcctcaagcagcacccaggacccccacaggggccgccagaccctcggcagtctcagaggcctagccaaggccaaaccagaggcctccttccaggtgtggaacaaggacagctcttccaaaaaccttatccctaggctgcaaaagatctggaagaattacctaagcatgaacaagtacaaagtgtcctacaaggggccaggaccaggcatcaagttcagtgcagaggccctgcgctgccacctccgggaccatgtgaatgtatccatggtagaggtcacagattttcccttcaatacctctgaatgggagggttatctgcccaaggagagcattaggaccaaggctgggccttggggcaggtgtgctgttgtgtcgtcagcgggatctctgaagtcctcccaactaggcagagaaatcgatgatcatgacgcagtcctgaggtttaatggggcacccacagccaacttccaacaagatgtgggcacaaaaactaccattcgcctgatgaactctcagttggttaccacagagaagcgcttcctcaaagacagtttgtacaatgaaggaatcctaattgtatgggacccatctgtataccactcagatatcccaaagtggtaccagaatccggattataatttctttaayaactacaagacttatcgtaagctgcaccccaatcagcccttttacatcctcaagccccagatgccttgggagctatgggacattcttcaagaaatctccccagaagagattcagccaaaccccccatcctctgggatgcttggtatcatcatcatgatgacgctgtgtgaccaggtggatatttatgagttcctcccatccaagcgcaagactgacgtgtgctactactaccagaagttcttcgatagtgcctgcacgatgggtgcctaccacccgctgctctatgagaagaatttggtgaagcatctcaaccagggcacagatgaggacatctacctgcttggaaaagccacactgcctggcttccggaccattcactgctaagcacaggctcctcactcttctccatcaggcattaaatgaatggtctcttggccaccccagcctgggaagaacattttcctgaacaattccagcctgctccttttactctargggcctctgtcagcaagaccatggggrcttcaagagcctgtggtcaggaaatcaggtccagccttccctgtagccagacagtttatgagcccagagcctcctgccacacacatgcacacatatctagcattctttccagacagcatcctccccgccttccaccttggtagatgcaaggtctatctctcccatcagggctgccaaagctgggctttgtttttcccagcagaatgatgccattctcacaaaccaatgctctatattgcttgaagtctgcatctaaatattgatttcacgttttaaagaaattctcttaaattacaattgtgcccaatgcagggtggctctggggggcaagtaggtggtacaggggattggaaacatgctcygcgcctccagaraaaagttgctcccgaggtccatgcccctggaacgtgttcctatcactctggctggttgggctggtccttagactgggtgcttatgattaaagggtcttggttagcccactttccctctccatgtggagatggaaggtagagaaggatacagtgtctatcctcaagttgctacggttcagtgagagaggcagacatctgaacaggcaggtaggattcagtgtgctcagtgcactggggatttggagagagatgggcttgctctctctgtgcacccaggagggccacgcacttaaaactgwgtttgtggatcagagaaggctttatagcacagggggcattcagatgagtcttagaggaagagaagaaacatggcaagcagattacatctgagccgtttgaattgtgtttttctttcttcccatgtttattttctaagatctacctgaacttagagactcaagatatttttttaggaaacctcctacccatgtctgaggtagcaagtgcagcctcacgacagataccaggcaatccagagccacaaaacgtgattcctccaggctctgcctggcctgaccctgtcctgtcagctgggtttacataccagtcccattcttccttttcaatammtacccccaaatcttctcctaaccaccatctgttttttttttttaaagcattttttgctttaaaagcatcctgaccccaatttctttgagctcacgggccttttgctgaaggtctctcagggtgtagtggtgtggctctctggacttaacgtcactctcagaggtcagaaccttggagatcagaactgattctcaccaggtgtgagaggtgtggtagcagattgcaatgctctgcacctcttccttgcaagtgagcaacttcaggctctctgggcagaggctggcccactgtagtttgcagacatgctctccagatggttttactaagtcccctctccctgatagggaatcctgctggaccagcgcagccctggtgtggagaggttaaaagacttgcacaggatcaccaagtcatgctgtagagccaggattcctagacccagggctctgcactctcaaggctggccccatgtgctcaaggggrtctaatgtttgggctccaaactaaccatctcrgagctgggctcctcatttactgccaaaccctcagcttatgtagctagaaagggccctggagtgagaaagcctggattttcaaattgatgctcccctactgactagctgtgccactctgggcaaatgctcttccttgagcctgtttccacacctgtaaagtggggatgatgatcctatctcactgcttttgtgaggattacaggaaagcacctgtcctggctctgtacctggcacgtagtaggtgctcagttcatgctggtttccttcctgcctttagtagggacctgctctgtgctcacacctcggctgcatgcaccctgctgtgacggaggctagtgtggaagaggtcctgtcctcagggaattaactgtcttattgggagacaacaactrtcctccttggaacacccaagaaaccatgcaaagcagtggacaacacagaacacgccctcctcctcgctgcctgcagctccaatctgattctgcttgggaatgggcggagcacgtgggctgcttaactgctgtataggacaagccccttacccctctctgggcccatgaattcctggcttggtttatgttctgatttgacacactgattttaatcttcgaatcatgacactgagtgcagaggaggtggcattccgacagcaggacatacatgttggtgtgaagactgggacgacactgggtagaatctagtttttaattattattaatataaaggatcaaattaatttaaatatgattctgaagtctacagaacttttagttctgtgctgtctatgtggacactttggtaaaaygcaaattatgatatggacgttatcattggtctggtgagatgtttcatatttgtgacagttaatttaaaaattatgasttaatgctgcctgtgtctatggggttctgtcttctttgatagccatctattcatctggatcatgggaccctctctaatccttccmccaatcaaataagctattgctattggtttggagttgagatatcagtctcggaaacttctgaaaaatgctaataattacccaaggattatgtcaaattttaaaataaatgtgtgtgtgtttctttaagct

SEQ ID NO: 3564 - DNA, 955 bp, Homo sapiens
gcacctttaataggcttttctctctctctttttcctgagccctggaggcttcctggattgagacctagcctaggtctgcataagcacctttccatcttgttaatgtttaacactgcctctgctggaaaacagctctcacctcctctctttctgtctcttaytttttgcctttgcagatgagttttgatcatcctgagaaaaatgggccttggcctgcagacccaataaaccttccctcccatggataatagtgctaattcctgaggacctgaagggcctgccgcccctgggggattagccagaagcaggtaaggaacacacagaggcatgggctagcaaaggggtacattcctgagtaaaagctggtgtggcagatgtcctggcagggaatctcaggatctcagtatctggctccagctttgctgttttctttttgtatgtattttttagtcctctttaactgctgattcaatgtgggtttcattggggggtgtagagaaatggcttgtccatttctattaactayataagatttaagttattctgtatttcagkcaaccattctgagtacctactacctgccacgaatgcaactggtactgagtatgtcatgacgggtgggtcgggacaggatttccttgctttgagcattgatttctgccggttcagtgttggccagttctttgaagttcttcttcagttgtcatatggtcatgtgattacctgtgttgggtgtctgcggaaattgaattccttagtttctggtaatacaacaagcttccacccttcacttcatgatcttctatctgaattmttcttccactgtgtacatttaatcatttccacaacttcagcagcccaagataggagcccatcgttcccagagtcactggttcctgaggtctgggatggtggaagcactgctttggttggtactgccaatggattccaggaa

SEQ ID NO: 3565 - DNA, 4582 bp, Homo sapiens
ccttccactgtgcgtcttctgtcccccgttcttccccmgcggacccctctttcgagactccctagtggggtycccagctcccgggcgatcctgcccttgccgagcgcgttttctggagtcacctgggggaggggagtcctgggcagggccgggctggggaagacgcctggggcactgcccggcgttaacaaagggagccgataccgaccggcgtgggcgcggagcgggcggccgccaccgagcgtgctgagcaaccgcagcctccgcggccgagagtgcagmgagcaaggggagagccagytgcgcagagccctgcaaccagcagtccagggagaagtggtgaatgtcatggagcccagctgaaatggactggcccccttgagcctgtcccaagccctggtgccaggtgtccatccccgtgctgagatgagttttgatcatcctgagaaaaatgggccttggcctgcagacccaataaaccttccctcccatggataatagtgctaattcctgaggacctgaagggcctgccgcccctgggggattagccagaagcaggcttgttttcctgctcagaacaaagtgacttccctgaacacatcttcattatgattcacaccaacctgaagaaaaagttcagctgctgcgtcctggtctttcttctgtttgcagtcatctgtgtgtggaaggaaaagaagaaagggagttactatgattcctttaaattgcaaaccaaggaattccaggtgttaaagagtctggggaaattggccatggggtctgattcccagtctgtatcctcaagcagcacccaggacccccacaggggccgccagaccctcggcagtctcagaggcctagccaaggccaaaccagaggcctccttccaggtgtggaacaaggacagctcttccaaaaaccttatccctaggctgcaaaagatctggaagaattacctaagcatgaacaagtacaaagtgtcctacaaggggccaggaccaggcatcaagttcagtgcagaggccctgcgctgccacctccgggaccatgtgaatgtatccatggtagaggtcacagattttcccttcaatacctctgaatgggagggttatctgcccaaggagagcattaggaccaaggctgggccttggggcaggtgtgctgttgtgtcgtcagcgggatctctgaagtcctcccaactaggcagagaaatcgatgatcatgacgcagtcctgaggtttaatggggcacccacagccaacttccaacaagatgtgggcacaaaaactaccattcgcctgatgaactctcagttggttaccacagagaagcgcttcctcaaagacagtttgtacaatgaaggaatcctaattgtatgggacccatctgtataccactcagatatcccaaagtggtaccagaatccggattataatttctttaayaactacaagacttatcgtaagctgcaccccaatcagcccttttacatcctcaagccccagatgccttgggagctatgggacattcttcaagaaatctccccagaagagattcagccaaaccccccatcctctgggatgcttggtatcatcatcatgatgacgctgtgtgaccaggtggatatttatgagttcctcccatccaagcgcaagactgacgtgtgctactactaccagaagttcttcgatagtgcctgcacgatgggtgcctaccacccgctgctctatgagaagaatttggtgaagcatctcaaccagggcacagatgaggacatctacctgcttggaaaagccacactgcctggcttccggaccattcactgctaagcacaggctcctcactcttctccatcaggcattaaatgaatggtctcttggccaccccagcctgggaagaacattttcctgaacaattccagcctgctccttttactctargggcctctgtcagcaagaccatggggrcttcaagagcctgtggtcaggaaatcaggtccagccttccctgtagccagacagtttatgagcccagagcctcctgccacacacatgcacacatatctagcattctttccagacagcatcctccccgccttccaccttggtagatgcaaggtctatctctcccatcagggctgccaaagctgggctttgtttttcccagcagaatgatgccattctcacaaaccaatgctctatattgcttgaagtctgcatctaaatattgatttcacgttttaaagaaattctcttaaattacaattgtgcccaatgcagggtggctctggggggcaagtaggtggtacaggggattggaaacatgctcygcgcctccagaraaaagttgctcccgaggtccatgcccctggaacgtgttcctatcactctggctggttgggctggtccttagactgggtgcttatgattaaagggtcttggttagcccactttccctctccatgtggagatggaaggtagagaaggatacagtgtctatcctcaagttgctacggttcagtgagagaggcagacatctgaacaggcaggtaggattcagtgtgctcagtgcactggggatttggagagagatgggcttgctctctctgtgcacccaggagggccacgcacttaaaactgwgtttgtggatcagagaaggctttatagcacagggggcattcagatgagtcttagaggaagagaagaaacatggcaagcagattacatctgagccgtttgaattgtgtttttctttcttcccatgtttattttctaagatctacctgaacttagagactcaagatatttttttaggaaacctcctacccatgtctgaggtagcaagtgcagcctcacgacagataccaggcaatccagagccacaaaacgtgattcctccaggctctgcctggcctgaccctgtcctgtcagctgggtttacataccagtcccattcttccttttcaatammtacccccaaatcttctcctaaccaccatctgttttttttttttaaagcattttttgctttaaaagcatcctgaccccaatttctttgagctcacgggccttttgctgaaggtctctcagggtgtagtggtgtggctctctggacttaacgtcactctcagaggtcagaaccttggagatcagaactgattctcaccaggtgtgagaggtgtggtagcagattgcaatgctctgcacctcttccttgcaagtgagcaacttcaggctctctgggcagaggctggcccactgtagtttgcagacatgctctccagatggttttactaagtcccctctccctgatagggaatcctgctggaccagcgcagccctggtgtggagaggttaaaagacttgcacaggatcaccaagtcatgctgtagagccaggattcctagacccagggctctgcactctcaaggctggccccatgtgctcaaggggrtctaatgtttgggctccaaactaaccatctcrgagctgggctcctcatttactgccaaaccctcagcttatgtagctagaaagggccctggagtgagaaagcctggattttcaaattgatgctcccctactgactagctgtgccactctgggcaaatgctcttccttgagcctgtttccacacctgtaaagtggggatgatgatcctatctcactgcttttgtgaggattacaggaaagcacctgtcctggctctgtacctggcacgtagtaggtgctcagttcatgctggtttccttcctgcctttagtagggacctgctctgtgctcacacctcggctgcatgcaccctgctgtgacggaggctagtgtggaagaggtcctgtcctcagggaattaactgtcttattgggagacaacaactrtcctccttggaacacccaagaaaccatgcaaagcagtggacaacacagaacacgccctcctcctcgctgcctgcagctccaatctgattctgcttgggaatgggcggagcacgtgggctgcttaactgctgtataggacaagccccttacccctctctgggcccatgaattcctggcttggtttatgttctgatttgacacactgattttaatcttcgaatcatgacactgagtgcagaggaggtggcattccgacagcaggacatacatgttggtgtgaagactgggacgacactgggtagaatctagtttttaattattattaatataaaggatcaaattaatttaaatatgattctgaagtctacagaacttttagttctgtgctgtctatgtggacactttggtaaaaygcaaattatgatatggacgttatcattggtctggtgagatgtttcatatttgtgacagttaatttaaaaattatgasttaatgctgcctgtgtctatggggttctgtcttctttgatagccatctattcatctggatcatgggaccctctctaatccttccmccaatcaaataagctattgctattggtttggagttgagatatcagtctcggaaacttctgaaaaatgctaataattacccaaggattatgtcaaattttaaaataaatgtgtgtgtgtttctttaagct

SEQ ID NO: 3566 - DNA, 864 bp, Homo sapiens
ccttccactgtgcgtcttctgtcccccgttcttccccmgcggacccctctttcgagactccctagtggggtycccagctcccgggcgatcctgcccttgccgagcgcgttttctggagtcacctgggggaggggagtcctgggcagggccgggctggggaagacgcctggggcactgcccggcgttaacaaagggagccgataccgaccggcgtgggcgcggagcgggcggccgccaccgagcgtgctgagcaaccgcagcctccgcggccgagagtgcagmgagcaaggggagagccagytgcgcagagccctgcaaccagcagtccagggagaagtggtgaatgtcatggagcccagctgaaatggactggcccccttgagcctgtcccaagccctggtgccaggtgtccatccccgtgctgaggtaagaccccctgaagcccagcctgaggaagagaggacacaatgccttttttgcaggggcaggaggcagagggccttctcaggaaagaaggagcagttagttgtttctggttcagtcaaaccatctgcttcagcctcagcccgttgggaggcaaggtcaattggtggccaaagaggcttctgctttgtcagagcaggtctttggaatyttgatgggagttgtattttctcagttgctggtgaaatttgaattcccaagggaatacatttatcctccaggtaagactgcaccggattcaggtgaatgcttaagtatacctcctctgctctgcaagggagctcttgggaaacacacacacacgcacacacacacgcgcgtgccacgctctctctctttcaacccaagggtgacagagtgaaacattatgcagagaggtta

SEQ ID NO: 3567 - DNA, 2573 bp, Homo sapiens
cttctagagtccaggagcttcccctgccactgccacaacccccgatkccaccacagccatcgccactgccacctgcctcccgctgaatcttggctcttgtcttctctttccagcccaggcaacctctgggcttcctgaagcccttctccttgatgaaggcttccagccgcttcaaggcacaccaggatgcactgccacggctgcccgtgccccctctccagcagtccctggaccactacctgaaggcgctgcagcccatcgtgagtgaggaggagtgggcccacaccaagcagctggtggatgagtttcaggcctcaggaggtgtaggggagcgcctgcagaaggggctggagcgtcgggccaggaagacggagaactggctgtctgagtggtggctcaagaccgcctacctccagtaccgccagcctgtggtcatctactcsagcccaggcgtgatgctacccaagcaggacttcgtggacctgcagggtcagctccgatttgctgccaaactcattgagggtgtgttggatttcaaggtcatgattgacaacgagaccctgcccgtggagtacctgggggggaagccactgtgcatgaaccagtactatcagatcttgtcctcctgccgagtgccgggccccaagcaggacacagtcagcaacttcagcaagaccaagaagcctcccacgcacatcaccgtggtacacaactaccagttttttgagctggatgtgtaccacagtgacgggacacccctcactgcggatcagatctttgtgcagctggagaagatctggaactcatccctacagaccaacaaggagcctgtgggcatcctcacctccaaccaccgcaactcctgggccaaggcatacaacaccctcatcaaagacaaggtgaaccgggattccgtgcgctccatccagaagagcatcttcaccgtgtgcctagatgcaaccatgcccagggtctcagaagacgtgtaccgcagccacgtggcaggccagatgctgcatgggggcggcagcaggctcaacagcggcaaccgctggttygacaagacgctgcagttcatcgtggcagaagatggctcctgtgggcttgtgtacgagcatgctgcagcggaggggycccctattgtcacccttctggactatgtcatcgagtacacgaagaaacccgagcttgtgcggtctcccatggtgcccctgcccatgcccaagaagctgcggttcaacatcacccccgagatcaagagcgacatcgagaaggccaagcagaacctcagcatcatgatccaggacctggatatcaccgtgatggtgttccaccattttggaaaagacttccccaagtcggagaagctaagcccagatgccttcatccagatggctttgcagctggcctactacaggatctayggacaggcatgtgccacctatgaaagtgcctccctgcgcatgtttcacctgggccgcaccgacaccatccgctcggcttccatggactcactcacctttgtcaaggccatggatgactccagcgtcacggagcaccagaaggtggagctgctgcggaaggccgtgcaggcccaccgaggctacaccgaccgggccatccgcggggaggcctttgatcgacacctgctgggcctgaagctgcaggccatcgaggacctggtgagcaygcccgacatcttcatggacacctcctacgccatcgccatgcacttccacctctccaccagccaggtccctgccaagacagactgtgtcatgttcttcgggcccgtggtccccgacggctacggtgtctgctataaccccatggaggcccacatcaacttctccctgtcggcctacaacagctgcgcggagaccaaygccgcccgcctggcgcattacctggagaaggcgctcctggacatgcgtgccctgctgcagagccacccccggsccaagctctgagcccctaggactcaggcctgccaatgccacagccaagcccaccctrggatgggccacccaccagggctcagctccttggttccctcttccttggttccctcttccctggtccccccaaatstactgagccacggaccgcatcctccagggggcctgcaggccccagccaagtgccttccgtgggtcatcccagcacctgccagggcccgacctggggctgagtgcagaggctgagcaggacgttaggcccgggcccctggcacgtcctccaccggtgcctcctctggggaagggaaccagccctccagagcaggagactggcaagagctctttgtctcaccagctcagccccggccactccctgccaactccatgaccaggccaccatytgtaccctgcttcccaaactcccaggacctggagacaggattgtctggggccgaggggccagggtgtgaggtttcacctccgttgcggctgtgctcctgtggataacattgctagcgagccgcctctggttccmctcagcttggttcctgcccccgccctgctgtatgatattaatgtgsaaggtcatcaataaaggggaattgtgttggtgaa

SEQ ID NO: 3568 - DNA, 2769 bp, Homo sapiens
atgccccgyccccgccccacagccaacctcccgggcaccgttgcccgcccggggcccgctaccggcccaggccccgcctcgcgagtcctcctccccgggtgcctgcccgcagcccgctcggcccagagggtgggcgcggggctgcctctaccggctggcggctgtaactcagcgaccttggcccgaaggctctagcaaggacccaccgaccccagccgcggcggcrcggactttgcccggtgtgtggggcggagcggactgcgtgtccgcggacgggcagcgaagatgttagccttcgctgccaggaccgtggtgaagcctctgggcttcctgaagcccttctccttgatgaaggcttccagccgcttcaaggcacaccaggatgcactgccacggctgcccgtgccccctctccagcagtccctggaccactacctgaaggcgctgcagcccatcgtgagtgaggaggagtgggcccacaccaagcagctggtggatgagtttcaggcctcaggaggtgtaggggagcgcctgcagaaggggctggagcgtcgggccaggaagacggagaactggctgtctgagtggtggctcaagaccgcctacctccagtaccgccagcctgtggtcatctactcsagcccaggcgtgatgctacccaagcaggacttcgtggacctgcagggtcagctccgatttgctgccaaactcattgagggtgtgttggatttcaaggtcatgattgacaacgagaccctgcccgtggagtacctgggggggaagccactgtgcatgaaccagtactatcagatcttgtcctcctgccgagtgccgggccccaagcaggacacagtcagcaacttcagcaagaccaagaagcctcccacgcacatcaccgtggtacacaactaccagttttttgagctggatgtgtaccacagtgacgggacacccctcactgcggatcagatctttgtgcagctggagaagatctggaactcatccctacagaccaacaaggagcctgtgggcatcctcacctccaaccaccgcaactcctgggccaaggcatacaacaccctcatcaaagacaaggtgaaccgggattccgtgcgctccatccagaagagcatcttcaccgtgtgcctagatgcaaccatgcccagggtctcagaagacgtgtaccgcagccacgtggcaggccagatgctgcatgggggcggcagcaggctcaacagcggcaaccgctggttygacaagacgctgcagttcatcgtggcagaagatggctcctgtgggcttgtgtacgagcatgctgcagcggaggggycccctattgtcacccttctggactatgtcatcgagtacacgaagaaacccgagcttgtgcggtctcccatggtgcccctgcccatgcccaagaagctgcggttcaacatcacccccgagatcaagagcgacatcgagaaggccaagcagaacctcagcatcatgatccaggacctggatatcaccgtgatggtgttccaccattttggaaaagacttccccaagtcggagaagctaagcccagatgccttcatccagatggctttgcagctggcctactacaggatctayggacaggcatgtgccacctatgaaagtgcctccctgcgcatgtttcacctgggccgcaccgacaccatccgctcggcttccatggactcactcacctttgtcaaggccatggatgactccagcgtcacggagcaccagaaggtggagctgctgcggaaggccgtgcaggcccaccgaggctacaccgaccgggccatccgcggggaggcctttgatcgacacctgctgggcctgaagctgcaggccatcgaggacctggtgagcaygcccgacatcttcatggacacctcctacgccatcgccatgcacttccacctctccaccagccaggtccctgccaagacagactgtgtcatgttcttcgggcccgtggtccccgacggctacggtgtctgctataaccccatggaggcccacatcaacttctccctgtcggcctacaacagctgcgcggagaccaaygccgcccgcctggcgcattacctggagaaggcgctcctggacatgcgtgccctgctgcagagccacccccggsccaagctctgagcccctaggactcaggcctgccaatgccacagccaagcccaccctrggatgggccacccaccagggctcagctccttggttccctcttccttggttccctcttccctggtccccccaaatstactgagccacggaccgcatcctccagggggcctgcaggccccagccaagtgccttccgtgggtcatcccagcacctgccagggcccgacctggggctgagtgcagaggctgagcaggacgttaggcccgggcccctggcacgtcctccaccggtgcctcctctggggaagggaaccagccctccagagcaggagactggcaagagctctttgtctcaccagctcagccccggccactccctgccaactccatgaccaggccaccatytgtaccctgcttcccaaactcccaggacctggagacaggattgtctggggccgaggggccagggtgtgaggtttcacctccgttgcggctgtgctcctgtggataacattgctagcgagccgcctctggttccmctcagcttggttcctgcccccgccctgctgtatgatattaatgtgsaaggtcatcaataaaggggaattgtgttggtgaa

SEQ ID NO: 3569 - DNA, 1555 bp, Homo sapiens
cttctagagtccaggagcttcccctgccactgccacaacccccgatkccaccacagccatcgccactgccacctgcctcccgctgaatcttggctcttgtcttctctttccagcccaggtgaagcctctgggcttcctgaagcccttctccttgatgaaggcttccagccgcttcaaggcacaccaggatgcactgccacggctgcccgtgccccctctccagcagtccctggaccactacctgaaggcgctgcagcccatcgtgagtgaggaggagtgggcccacaccaagcagctggtggatgagtttcaggcctcaggaggtgtaggggagcgcctgcagaaggggctggagcgtcgggccaggaagacggagaactggctgtctgagtggtggctcaagaccgcctacctccagtaccgccagcctgtggtcatctactcsagcccaggcgtgatgctacccaagcaggacttcgtggacctgcagggtcagctccgatttgctgccaaactcattgagggtgtgttggatttcaaggtcatgattgacaacgagaccctgcccgtggagtacctgggggggaagccactgtgcatgaaccagtactatcagatcttgtcctcctgccgagtgccgggccccaagcaggacacagtcagcaacttcagcaagaccaagaagcctcccacgcacatcaccgtggtacacaactaccagttttttgagctggatgtgtaccacagtgacgggacacccctcactgcggatcagatctttgtgcagctggagaagatctggaactcatccctacagaccaacaaggagcctgtgggcatcctcacctccaaccaccgcaactcctgggccaaggcatacaacaccctcatcaaagacaaggtgaaccgggattccgtgcgctccatccagaagagcatcttcaccgtgtgcctagatgcaaccatgcccagggtctcagaagacgtgtaccgcagccacgtggcaggccagatgctgcatgggggcggcagcaggctcaacagcggcaaccgctggttygacaagacgctgcagttcatcgtggcagaagatggctcctgtgggcttgtgtacgagcatgctgcagcggaggggycccctattgtcacccttctggactatgtcatcgagtacacgaagaaacccgagcttgtgcggtctcccatggtgcccctgcccatgcccaagaagctgcggttcaacatcacccccgagatcaagagcgacatcgagaaggccaagcagaacctcagcatcatgatccaggacctggatatcaccgtgatggtgttccaccattttggaaaagacttccccaagtcggagaagctaagcccagatgccttcatccagatggctttgcagctggcctactacaggatctayggacaggcatgtgccacctatgaaagtgcctccctgcgcatgtttcacctgggccgcaccgacaccatccgctcggcttccatggactcactcacctttgtcaaggccatggatgactccagcgtcacg

SEQ ID NO: 3570 - DNA, 2853 bp, Homo sapiens
cctactgcgacccgctaccgggcgacgccccgcccctccgtccccgcccctcctgtccctcctcaaggagactccgccccatcgatgccccgyccccgccccacagccaacctcccgggcaccgttgcccgcccggggcccgctaccggcccaggccccgcctcgcgagtcctcctccccgggtgcctgcccgcagcccgctcggcccagagggtgggcgcggggctgcctctaccggctggcggctgtaactcagcgaccttggcccgaaggctctagcaaggacccaccgaccccagccgcggcggcrcggactttgcccggtgtgtggggcggagcggactgcgtgtccgcggacgggcagcgaagatgttagccttcgctgccaggaccgtggtgaagcctctgggcttcctgaagcccttctccttgatgaaggcttccagccgcttcaaggcacaccaggatgcactgccacggctgcccgtgccccctctccagcagtccctggaccactacctgaaggcgctgcagcccatcgtgagtgaggaggagtgggcccacaccaagcagctggtggatgagtttcaggcctcaggaggtgtaggggagcgcctgcagaaggggctggagcgtcgggccaggaagacggagaactggctgtctgagtggtggctcaagaccgcctacctccagtaccgccagcctgtggtcatctactcsagcccaggcgtgatgctacccaagcaggacttcgtggacctgcagggtcagctccgatttgctgccaaactcattgagggtgtgttggatttcaaggtcatgattgacaacgagaccctgcccgtggagtacctgggggggaagccactgtgcatgaaccagtactatcagatcttgtcctcctgccgagtgccgggccccaagcaggacacagtcagcaacttcagcaagaccaagaagcctcccacgcacatcaccgtggtacacaactaccagttttttgagctggatgtgtaccacagtgacgggacacccctcactgcggatcagatctttgtgcagctggagaagatctggaactcatccctacagaccaacaaggagcctgtgggcatcctcacctccaaccaccgcaactcctgggccaaggcatacaacaccctcatcaaagacaaggtgaaccgggattccgtgcgctccatccagaagagcatcttcaccgtgtgcctagatgcaaccatgcccagggtctcagaagacgtgtaccgcagccacgtggcaggccagatgctgcatgggggcggcagcaggctcaacagcggcaaccgctggttygacaagacgctgcagttcatcgtggcagaagatggctcctgtgggcttgtgtacgagcatgctgcagcggaggggycccctattgtcacccttctggactatgtcatcgagtacacgaagaaacccgagcttgtgcggtctcccatggtgcccctgcccatgcccaagaagctgcggttcaacatcacccccgagatcaagagcgacatcgagaaggccaagcagaacctcagcatcatgatccaggacctggatatcaccgtgatggtgttccaccattttggaaaagacttccccaagtcggagaagctaagcccagatgccttcatccagatggctttgcagctggcctactacaggatctayggacaggcatgtgccacctatgaaagtgcctccctgcgcatgtttcacctgggccgcaccgacaccatccgctcggcttccatggactcactcacctttgtcaaggccatggatgactccagcgtcacggagcaccagaaggtggagctgctgcggaaggccgtgcaggcccaccgaggctacaccgaccgggccatccgcggggaggcctttgatcgacacctgctgggcctgaagctgcaggccatcgaggacctggtgagcaygcccgacatcttcatggacacctcctacgccatcgccatgcacttccacctctccaccagccaggtccctgccaagacagactgtgtcatgttcttcgggcccgtggtccccgacggctacggtgtctgctataaccccatggaggcccacatcaacttctccctgtcggcctacaacagctgcgcggagaccaaygccgcccgcctggcgcattacctggagaaggcgctcctggacatgcgtgccctgctgcagagccacccccggsccaagctctgagcccctaggactcaggcctgccaatgccacagccaagcccaccctrggatgggccacccaccagggctcagctccttggttccctcttccttggttccctcttccctggtccccccaaatstactgagccacggaccgcatcctccagggggcctgcaggccccagccaagtgccttccgtgggtcatcccagcacctgccagggcccgacctggggctgagtgcagaggctgagcaggacgttaggcccgggcccctggcacgtcctccaccggtgcctcctctggggaagggaaccagccctccagagcaggagactggcaagagctctttgtctcaccagctcagccccggccactccctgccaactccatgaccaggccaccatytgtaccctgcttcccaaactcccaggacctggagacaggattgtctggggccgaggggccagggtgtgaggtttcacctccgttgcggctgtgctcctgtggataacattgctagcgagccgcctctggttccmctcagcttggttcctgcccccgccctgctgtatgatattaatgtgsaaggtcatcaataaaggggaattgtgttggtgaa

SEQ ID NO: 3571 - DNA, 3638 bp, Homo sapiens
cctccctcccctcctcttctctcccaggctccaccacagccaggcaagagcccgaggcacccaacagagacaaagcccactctggtccctgggggccttgtcttggaccactcgcttcactcagaatcaccccaggctctctcctccaggagggcagccaggcaccccgagcctacaggggcctcacctctggggagctttgtttcaactgccctgctcaaccacactccacccccagcccctcccccacctccccaccctaccccaccccttccccagcccccttatgaccacggcgctgcccacccagcattcgggcagcctggactcccacaaaacccagagttgcgccccaatcaccacccctttgcagcccctggttccctccccagcggcgccccaccacccacctctcccctaaggccattcaactcagtccctcctcggggcccctcagcttttgcccctccagttcctccgtgtcatgactctcgccctcctgagcctcccacacctggcaccgcccccaccctacccgaccccggcccggcctggccccgccggccttacctggcggcggctgccgctcgccctcagccatcttgctccggccaggagccgacccggatgcttgcagtcccctctcgcctttcactcttgcacccacccttcctctccccggctccaccaaaggctccgagcttcctgaagacaagtgagcgccggccggctataaccgaaaaccgagagttaaagtcaccacagcgaagacggccgccatgtcgcctactgcgacccgctaccgggcgacgccccgcccctccgtccccgcccctcctgtccctcctcaaggagactccgccccatcgatgccccgyccccgccccacagccaacctcccgggcaccgttgcccgcccggggcccgctaccggcccaggccccgcctcgcgagtcctcctccccgggtgcctgcccgcagcccgctcggcccagagggtgggcgcggggctgcctctaccggctggcggctgtaactcagcgaccttggcccgaaggctctagcaaggacccaccgaccccagccgcggcggcrcggactttgcccggtgtgtggggcggagcggactgcgtgtccgcggacgggcagcgaagatgttagccttcgctgccaggaccgtggtgaagcctctgggcttcctgaagcccttctccttgatgaaggcttccagccgcttcaaggcacaccaggatgcactgccacggctgcccgtgccccctctccagcagtccctggaccactacctgaaggcgctgcagcccatcgtgagtgaggaggagtgggcccacaccaagcagctggtggatgagtttcaggcctcaggaggtgtaggggagcgcctgcagaaggggctggagcgtcgggccaggaagacggagaactggctgtctgagtggtggctcaagaccgcctacctccagtaccgccagcctgtggtcatctactcsagcccaggcgtgatgctacccaagcaggacttcgtggacctgcagggtcagctccgatttgctgccaaactcattgagggtgtgttggatttcaaggtcatgattgacaacgagaccctgcccgtggagtacctgggggggaagccactgtgcatgaaccagtactatcagatcttgtcctcctgccgagtgccgggccccaagcaggacacagtcagcaacttcagcaagaccaagaagcctcccacgcacatcaccgtggtacacaactaccagttttttgagctggatgtgtaccacagtgacgggacacccctcactgcggatcagatctttgtgcagctggagaagatctggaactcatccctacagaccaacaaggagcctgtgggcatcctcacctccaaccaccgcaactcctgggccaaggcatacaacaccctcatcaaagacaaggtgaaccgggattccgtgcgctccatccagaagagcatcttcaccgtgtgcctagatgcaaccatgcccagggtctcagaagacgtgtaccgcagccacgtggcaggccagatgctgcatgggggcggcagcaggctcaacagcggcaaccgctggttygacaagacgctgcagttcatcgtggcagaagatggctcctgtgggcttgtgtacgagcatgctgcagcggaggggycccctattgtcacccttctggactatgtcatcgagtacacgaagaaacccgagcttgtgcggtctcccatggtgcccctgcccatgcccaagaagctgcggttcaacatcacccccgagatcaagagcgacatcgagaaggccaagcagaacctcagcatcatgatccaggacctggatatcaccgtgatggtgttccaccattttggaaaagacttccccaagtcggagaagctaagcccagatgccttcatccagatggctttgcagctggcctactacaggatctayggacaggcatgtgccacctatgaaagtgcctccctgcgcatgtttcacctgggccgcaccgacaccatccgctcggcttccatggactcactcacctttgtcaaggccatggatgactccagcgtcacggagcaccagaaggtggagctgctgcggaaggccgtgcaggcccaccgaggctacaccgaccgggccatccgcggggaggcctttgatcgacacctgctgggcctgaagctgcaggccatcgaggacctggtgagcaygcccgacatcttcatggacacctcctacgccatcgccatgcacttccacctctccaccagccaggtccctgccaagacagactgtgtcatgttcttcgggcccgtggtccccgacggctacggtgtctgctataaccccatggaggcccacatcaacttctccctgtcggcctacaacagctgcgcggagaccaaygccgcccgcctggcgcattacctggagaaggcgctcctggacatgcgtgccctgctgcagagccacccccggsccaagctctgagcccctaggactcaggcctgccaatgccacagccaagcccaccctrggatgggccacccaccagggctcagctccttggttccctcttccttggttccctcttccctggtccccccaaatstactgagccacggaccgcatcctccagggggcctgcaggccccagccaagtgccttccgtgggtcatcccagcacctgccagggcccgacctggggctgagtgcagaggctgagcaggacgttaggcccgggcccctggcacgtcctccaccggtgcctcctctggggaagggaaccagccctccagagcaggagactggcaagagctctttgtctcaccagctcagccccggccactccctgccaactccatgaccaggccaccatytgtaccctgcttcccaaactcccaggacctggagacaggattgtctggggccgaggggccagggtgtgaggtttcacctccgttgcggctgtgctcctgtggataacattgctagcgagccgcctctggttccmctcagcttggttcctgcccccgccctgctgtatgatattaatgtgsaaggtcatcaataaaggggaattgtgttggtgaa

SEQ ID NO: 3572 - DNA, 3734 bp, Homo sapiens
gaaggggtgaactagaggagaagagggtgactgggcggggagcagctgcgggagaagcaaagggacgactgagggaataatcaggagaccactgaggcgtgaagtactaggcgtgcgataactgaaggagttagtaactgggagcacagagttggaaacagcttaggggaagatggagaaggaagaaacggggaatgatcaagatgtgggcaccatgatgtggcaggaaaccgacttagatgttcagaagaagtcagtgcagatacggrggaaatgggaatgggaagaagtctgcaaagccaggagaaccgaggaaaggcttttgcctccagaggtcacattgcgttataaaactctgggtggtaaaagattataggcttagaccagtgtctttggattctaatgctggctgctctccatagtccatctgattccccagaagtcagttatagctcttcgcaaaccttggtgacttcttattttctttcttgtttatccaagattacctggctggtgtttgcttgttctggagtgatcttctgactggaaaagaactatgtcatggatcaaggaaggagagctgtcactttgggagcggttctgtgccaacatcataaaggcaggcccaatgccgaaacacattgcattcataatggacgggaaccgtcgctatgccaagaagtgccaggtggagcggcaggaaggccactcacagggcttcaacaagctagctgagactctgcggtggtgtttgaacctgggcatcctagaggtgacagtctacgcattcagcattgagaacttcaaacgctccaagagtgaggtagacgggcttatggatctggcccggcagaagttcagccgcttgatggaagaaaagtgtttcctgaatgtctgttttgcatacacatcccgtcatgagatcagcaatgctgtgagagagatggcctggggggtggagcaaggcctgttggatcccagtgatatctctgagtctctgcttgataagtgcctctataccaaccgctctcctcatcctgacatcttgatacggacttctggagaagtgcggctgagtgacttcttgctatggcagacctctcactcctgcctggtgttccaacccgttctgtggccagagtatacattttggaacctcttcgaggccatcctgcagttccagatgaaccatagcrtgcttcagaaggcccgagacatgtatgcagaggagcggaagaggcagcagctggagagggaccaggctacagtgacagagcagctgctgcgagaggggctccaagccagtggggacgcccagctccgaaggacacgcttgcacaaactctcggccagacgggaagagcgagtccaaggcttcctgcaggccttggaactcaagcgagctgactggctggcccgtctgggcactgcatcagcctgaatgaggctggccacctgccactttgccctgccctctgcctccagggctccactccccttccttttcttggtgaaaggcacctcctttcctgataatgaatggtgttccctttgcttggctggggagccccccaggccaggtttgctggccatagatacctttgggctgcctgggacaggctcctgaggaggattgagggtgaaagtctcccacgagtacactaaacctaggtctggtcaccaatagggtttggagagcaaagggccacaactcatcagctgcctgtctcttagatgcactttctttttccaccagcacatccttcaacacacagaatttcagggaagagttctccccaaaaccctagctctttacccttccattttagccttccacccagcttccacaaaagatttggctctaccttggatctgctagtaaataactaataggcaggcagttatttgggtaaggaaaaaaggggtgggagagacagaaaatttgcccatctgctgctcctcccccttggctctccacctgggatttgctattgaatctctaccctctcccaccacacagtactgattgctcactgaaagactcagcacccccaatggtgcgcggaagcyaggcgggcgattacaatccaattacctattgtcgactcagcccacacaagcttttctcctcctcttgcagggcatggggccaggctccactcccaaatgagactggccccctccatggttcagggtaacagaagggcctgtaggccctggtgaactgaatccagcacaggcctcccctgtaacacaacaggactgagcagaaccaaacacttcttccaactgactctgctccctgccctcaccatctcaaactctgattcccactccactcttcgaggtttctctcagctttttgacctggctccctaagtaggccctagatgatttattcttggcatggcaaagcttgttctaggtcctctgcttgtgagggtcaaagctgtgtcctttcccttacctccctctgccaggacttgctgcagagctgctgagaggattagtgcctttgaagagctgtctgcctgagcaactctatttcaggtgccccacaccggcaagtaccagccagcaacaccaaccaaatgctactctctttaaagtccattttccttcttctttttttttttttttttggagacagcatctcaccctgtcctggctggtctcgaactcctgacctcaggtgatccgccggcctcaccctcccaaagtgctgggattacaggcatgasccaccatgccagacttcccattttactttctgcaagctgtttccctagcagctccctctaggggagaggtgaaatcttgcaagttgtagcaagagcacacaggaaacccctaactttcctataccccacccgcctcttcccctttctgtcccgggatacctggcggcaagagacttcttggctattgtccatgctcccagaatcaagcataaatgccagacacggcgattgagaagccaatcagtgaaccctttggcaaagcccccatccacacctggcactcccctctaccaatccctggcacagggttcctggagagcaggtgctgtacattttacagctttacaatggggctgttgacagccataattagggaggcatgaattatgcggctataatgcagagccctacaattaaggcgggaatgaggggctggaggcagcaaacggaatctgccctatgagcgtggctgttgagtcctgtctcctgggtctgactttccgtaatatgattggggtacagtagaggtgattaatggggctggcatctctctttggcctgaggttctgtattctgggaaaggtayacagggtggagtagggagaagctgccccaggaggcgatgtagtggtggaaagaagaggcagagaggtcgtcgtcgtcgcccagcagcaagggctgcaaaatagtagaactcgtggttgctttggacaggtgtgatttgtgcaagcyaggttcaacccttgcctcaagaaatcagatgggaccaatttagtgtccttccacctgtgagccaagcccccatttgaggacatctatcgtattcttgtgtgctgggtctcaaatagaatttttaaagattcttagatgtaaaacttgtttgctaactgcaacggaagaacaccttcttttgctgctgcaattgcctaccctccctcaggtgcacttggctagctccaagaccctggctttggactaggggrcaccggaaga

SEQ ID NO: 3573 - DNA, 3854 bp, Homo sapiens
gaaggggtgaactagaggagaagagggtgactgggcggggagcagctgcgggagaagcaaagggacgactgagggaataatcaggagaccactgaggcgtgaagtactaggcgtgcgataactgaaggagttagtaactgggagcacagagttggaaacagcttaggggaagatggagaaggaagaaacggggaatgatcaagatgtgggcaccatgatgtggcaggaaaccgacttagatgttcagaagaagtcagtgcagatacggrggaaatgggaatgggaagaagtctgcaaagccaggagaaccgaggaaaggcttttgcctccagaggtcacattgcgttataaaactctgggtggtaaaagattataggcttagaccagtgtctttggattctaatgctggctgctctccatagtccatctgattccccagaagtcagttatagctcttcgcaaaccttggtgacttcttattttctttcttgtttatccaagattacctggctggtgtttgcttgttctggagtgatcttctgactggaaaagaactatgtcatggatcaaggaaggagagctgtcactttgggagcggttctgtgccaacatcataaaggcaggcccaatgccgaaacacattgcattcataatggacgggaaccgtcgctatgccaagaagtgccaggtggagcggcaggaaggccactcacagggcttcaacaagctagctgagactctgcggtggtgtttgaacctgggcatcctagaggtgacagtctacgcattcagcattgagaacttcaaacgctccaagagtgaggtagacgggcttatggatctggcccggcagaagttcagccgcttgatggaagaaaaggagaaactgcagaagcatggggtgtgtatccgggtcctgggcgatctgcacttgttgcccttggatctccaggagctgattgcacaagctgtacaggccacgaagaactacaacaagtgtttcctgaatgtctgttttgcatacacatcccgtcatgagatcagcaatgctgtgagagagatggcctggggggtggagcaaggcctgttggatcccagtgatatctctgagtctctgcttgataagtgcctctataccaaccgctctcctcatcctgacatcttgatacggacttctggagaagtgcggctgagtgacttcttgctatggcagacctctcactcctgcctggtgttccaacccgttctgtggccagagtatacattttggaacctcttcgaggccatcctgcagttccagatgaaccatagcrtgcttcagcagaaggcccgagacatgtatgcagaggagcggaagaggcagcagctggagagggaccaggctacagtgacagagcagctgctgcgagaggggctccaagccagtggggacgcccagctccgaaggacacgcttgcacaaactctcggccagacgggaagagcgagtccaaggcttcctgcaggccttggaactcaagcgagctgactggctggcccgtctgggcactgcatcagcctgaatgaggctggccacctgccactttgccctgccctctgcctccagggctccactccccttccttttcttggtgaaaggcacctcctttcctgataatgaatggtgttccctttgcttggctggggagccccccaggccaggtttgctggccatagatacctttgggctgcctgggacaggctcctgaggaggattgagggtgaaagtctcccacgagtacactaaacctaggtctggtcaccaatagggtttggagagcaaagggccacaactcatcagctgcctgtctcttagatgcactttctttttccaccagcacatccttcaacacacagaatttcagggaagagttctccccaaaaccctagctctttacccttccattttagccttccacccagcttccacaaaagatttggctctaccttggatctgctagtaaataactaataggcaggcagttatttgggtaaggaaaaaaggggtgggagagacagaaaatttgcccatctgctgctcctcccccttggctctccacctgggatttgctattgaatctctaccctctcccaccacacagtactgattgctcactgaaagactcagcacccccaatggtgcgcggaagcyaggcgggcgattacaatccaattacctattgtcgactcagcccacacaagcttttctcctcctcttgcagggcatggggccaggctccactcccaaatgagactggccccctccatggttcagggtaacagaagggcctgtaggccctggtgaactgaatccagcacaggcctcccctgtaacacaacaggactgagcagaaccaaacacttcttccaactgactctgctccctgccctcaccatctcaaactctgattcccactccactcttcgaggtttctctcagctttttgacctggctccctaagtaggccctagatgatttattcttggcatggcaaagcttgttctaggtcctctgcttgtgagggtcaaagctgtgtcctttcccttacctccctctgccaggacttgctgcagagctgctgagaggattagtgcctttgaagagctgtctgcctgagcaactctatttcaggtgccccacaccggcaagtaccagccagcaacaccaaccaaatgctactctctttaaagtccattttccttcttctttttttttttttttttggagacagcatctcaccctgtcctggctggtctcgaactcctgacctcaggtgatccgccggcctcaccctcccaaagtgctgggattacaggcatgasccaccatgccagacttcccattttactttctgcaagctgtttccctagcagctccctctaggggagaggtgaaatcttgcaagttgtagcaagagcacacaggaaacccctaactttcctataccccacccgcctcttcccctttctgtcccgggatacctggcggcaagagacttcttggctattgtccatgctcccagaatcaagcataaatgccagacacggcgattgagaagccaatcagtgaaccctttggcaaagcccccatccacacctggcactcccctctaccaatccctggcacagggttcctggagagcaggtgctgtacattttacagctttacaatggggctgttgacagccataattagggaggcatgaattatgcggctataatgcagagccctacaattaaggcgggaatgaggggctggaggcagcaaacggaatctgccctatgagcgtggctgttgagtcctgtctcctgggtctgactttccgtaatatgattggggtacagtagaggtgattaatggggctggcatctctctttggcctgaggttctgtattctgggaaaggtayacagggtggagtagggagaagctgccccaggaggcgatgtagtggtggaaagaagaggcagagaggtcgtcgtcgtcgcccagcagcaagggctgcaaaatagtagaactcgtggttgctttggacaggtgtgatttgtgcaagcyaggttcaacccttgcctcaagaaatcagatgggaccaatttagtgtccttccacctgtgagccaagcccccatttgaggacatctatcgtattcttgtgtgctgggtctcaaatagaatttttaaagattcttagatgtaaaacttgtttgctaactgcaacggaagaacaccttcttttgctgctgcaattgcctaccctccctcaggtgcacttggctagctccaagaccctggctttggactaggggrcaccggaaga

SEQ ID NO: 3574 - DNA, 3851 bp, Homo sapiens
gaaggggtgaactagaggagaagagggtgactgggcggggagcagctgcgggagaagcaaagggacgactgagggaataatcaggagaccactgaggcgtgaagtactaggcgtgcgataactgaaggagttagtaactgggagcacagagttggaaacagcttaggggaagatggagaaggaagaaacggggaatgatcaagatgtgggcaccatgatgtggcaggaaaccgacttagatgttcagaagaagtcagtgcagatacggrggaaatgggaatgggaagaagtctgcaaagccaggagaaccgaggaaaggcttttgcctccagaggtcacattgcgttataaaactctgggtggtaaaagattataggcttagaccagtgtctttggattctaatgctggctgctctccatagtccatctgattccccagaagtcagttatagctcttcgcaaaccttggtgacttcttattttctttcttgtttatccaagattacctggctggtgtttgcttgttctggagtgatcttctgactggaaaagaactatgtcatggatcaaggaaggagagctgtcactttgggagcggttctgtgccaacatcataaaggcaggcccaatgccgaaacacattgcattcataatggacgggaaccgtcgctatgccaagaagtgccaggtggagcggcaggaaggccactcacagggcttcaacaagctagctgagactctgcggtggtgtttgaacctgggcatcctagaggtgacagtctacgcattcagcattgagaacttcaaacgctccaagagtgaggtagacgggcttatggatctggcccggcagaagttcagccgcttgatggaagaaaaggagaaactgcagaagcatggggtgtgtatccgggtcctgggcgatctgcacttgttgcccttggatctccaggagctgattgcacaagctgtacaggccacgaagaactacaacaagtgtttcctgaatgtctgttttgcatacacatcccgtcatgagatcagcaatgctgtgagagagatggcctggggggtggagcaaggcctgttggatcccagtgatatctctgagtctctgcttgataagtgcctctataccaaccgctctcctcatcctgacatcttgatacggacttctggagaagtgcggctgagtgacttcttgctatggcagacctctcactcctgcctggtgttccaacccgttctgtggccagagtatacattttggaacctcttcgaggccatcctgcagttccagatgaaccatagcrtgcttcagaaggcccgagacatgtatgcagaggagcggaagaggcagcagctggagagggaccaggctacagtgacagagcagctgctgcgagaggggctccaagccagtggggacgcccagctccgaaggacacgcttgcacaaactctcggccagacgggaagagcgagtccaaggcttcctgcaggccttggaactcaagcgagctgactggctggcccgtctgggcactgcatcagcctgaatgaggctggccacctgccactttgccctgccctctgcctccagggctccactccccttccttttcttggtgaaaggcacctcctttcctgataatgaatggtgttccctttgcttggctggggagccccccaggccaggtttgctggccatagatacctttgggctgcctgggacaggctcctgaggaggattgagggtgaaagtctcccacgagtacactaaacctaggtctggtcaccaatagggtttggagagcaaagggccacaactcatcagctgcctgtctcttagatgcactttctttttccaccagcacatccttcaacacacagaatttcagggaagagttctccccaaaaccctagctctttacccttccattttagccttccacccagcttccacaaaagatttggctctaccttggatctgctagtaaataactaataggcaggcagttatttgggtaaggaaaaaaggggtgggagagacagaaaatttgcccatctgctgctcctcccccttggctctccacctgggatttgctattgaatctctaccctctcccaccacacagtactgattgctcactgaaagactcagcacccccaatggtgcgcggaagcyaggcgggcgattacaatccaattacctattgtcgactcagcccacacaagcttttctcctcctcttgcagggcatggggccaggctccactcccaaatgagactggccccctccatggttcagggtaacagaagggcctgtaggccctggtgaactgaatccagcacaggcctcccctgtaacacaacaggactgagcagaaccaaacacttcttccaactgactctgctccctgccctcaccatctcaaactctgattcccactccactcttcgaggtttctctcagctttttgacctggctccctaagtaggccctagatgatttattcttggcatggcaaagcttgttctaggtcctctgcttgtgagggtcaaagctgtgtcctttcccttacctccctctgccaggacttgctgcagagctgctgagaggattagtgcctttgaagagctgtctgcctgagcaactctatttcaggtgccccacaccggcaagtaccagccagcaacaccaaccaaatgctactctctttaaagtccattttccttcttctttttttttttttttttggagacagcatctcaccctgtcctggctggtctcgaactcctgacctcaggtgatccgccggcctcaccctcccaaagtgctgggattacaggcatgasccaccatgccagacttcccattttactttctgcaagctgtttccctagcagctccctctaggggagaggtgaaatcttgcaagttgtagcaagagcacacaggaaacccctaactttcctataccccacccgcctcttcccctttctgtcccgggatacctggcggcaagagacttcttggctattgtccatgctcccagaatcaagcataaatgccagacacggcgattgagaagccaatcagtgaaccctttggcaaagcccccatccacacctggcactcccctctaccaatccctggcacagggttcctggagagcaggtgctgtacattttacagctttacaatggggctgttgacagccataattagggaggcatgaattatgcggctataatgcagagccctacaattaaggcgggaatgaggggctggaggcagcaaacggaatctgccctatgagcgtggctgttgagtcctgtctcctgggtctgactttccgtaatatgattggggtacagtagaggtgattaatggggctggcatctctctttggcctgaggttctgtattctgggaaaggtayacagggtggagtagggagaagctgccccaggaggcgatgtagtggtggaaagaagaggcagagaggtcgtcgtcgtcgcccagcagcaagggctgcaaaatagtagaactcgtggttgctttggacaggtgtgatttgtgcaagcyaggttcaacccttgcctcaagaaatcagatgggaccaatttagtgtccttccacctgtgagccaagcccccatttgaggacatctatcgtattcttgtgtgctgggtctcaaatagaatttttaaagattcttagatgtaaaacttgtttgctaactgcaacggaagaacaccttcttttgctgctgcaattgcctaccctccctcaggtgcacttggctagctccaagaccctggctttggactaggggrcaccggaaga

SEQ ID NO: 3575 - DNA, 450 bp, Homo sapiens
ttttgctggtgcccagaagaatgttggctctgctggggtcaccgtggagattgtccrtgatgacctgctgggatttgccctcctagagtgcccctcagtcctggaatacaaggtgcaggctggaaacagctccttgtacaacatgcctccatgtttcagcatctacgtcaggggcttggtcctggagtcgattaaaaacaatggaggtgttgcggccatggagaagcgtagctccatcaaatctcaaatgatttatgagattattgataattctcaaggattctacatattctgtgggaggcatctgggcctctctgtataatgctgtcacrattgaagatgttcagaagctagccgccttcatgaaaaaattttggagatgcatcagctacaaacacatcctaaccaggatatactctgttcttgaacaacatacaaagtttaaagtaa

SEQ ID NO: 3576 - DNA, 668 bp, Homo sapiens
tcctagagtgcccctcagtcctggaatacaaggtgcaggctggaaacagctccttgtacaacatgcctccatgtttcatcgattaaaaacaatggaggtgttgcggccatggagaagcgtagctccatcaaatctcaaatgatttatgagattattgataattctcaaggattctacatatgtccagtggggccccaaaatagaagcaagatgaatattccattctgcattggcaatgccaaaggagatgatgctttaraaaaaagatttcttgataaagctcttgaactcaatatgttgtccttgaaagggcataagtctgtgggaggcatctgggcctctctgtataatgctgtcacrattgaagatgttcagaagctagccgccttcatgaaaaaattttggagatgcatcagctacaaacacatcctaaccaggatatactctgttcttgaacaacatacaaagtttaaagtaaattggggatggctagaaaaagttaacaaacacagtatttttctcaaatgaamatgtttattgtagattcttcttttttgaaggaacaacagcaaaacatctacagctctgtaaagctggtgggacctaatgttcaccttaattctaacttgaactggaagcattttaagaaatcttcctgttgcttttct

SEQ ID NO: 3577 - DNA, 1502 bp, Homo sapiens
agaccccgcctgctggggcgcaggcggcagcggcgtggccatgaagctgaaggtgaagaacgtgtttctcgcctacttcctggtgtcratcgccggcctcctctacgcgctggccagccatgtgactgccttcctcccctgcgggcagcagctgagcagctacggcagaaggatctgaggatttcccagctgcaagcggaactccgacggccaccccctgcccctgcccagccccctgaacccgaggccctgcctactatctatgttgttacccccacctatgccaggctggtacagaaggcagagttggtacggctgtcccagacactgagcctggtgccccggctgcattgactgctggtggaggatgctgagggtcccaccccgctggtctcagggctgctggctgcctctggcctcctcttcacacacctggtggtcctcacgcccaaagcccagcggcttcgggagggcaagcctggctgggttcatccccatggtgtcgagcagcggaacaaggccctggactggctccggggcagagggagtgctgtgggtgggaagaaggacccatcaccaccagggacccaaggagtcgtgtactttgctgacagtggcaacacctacagctgggagctgtytgaggagatgcgctggacccgtggtgtctcagtgtggcctgtggggctggtgggtggcctgcgagtcaagggccctcaggtacaggacagccgggtagtgggcttccacacagcatgggagcccaacgggcccttccctgtggatatggccggatttgctgtggccctgcccttgctgttagctaagcccaatgcccagtttgattccactgctccccggagccacctggagagcagtcttctaagccaccttgtggatcccaaggacctggagccacgggctgccaactgcactcgggtactggtgtgacatacacggacagcgaagcccaagatgaagcagaaggagcagctgcagcggcagggccagggctcagacccagcaattgaggtgtgatggcggccccaccccaactaccacctcttttcaggcacagaccttgtgggactgggccccaggcctgcccagcatgtggttttccaagtcctgaccgcttgaagccagaagtggcccctctgcccctccagacccagggcatggtcctgctgcttcatctctcccccagcctgccatgtggcactgcccacaggctggggacaagcagcccttgtattgagccaggttgsccctgtctagggtggaacagaaggacagayggacccaggagggagggcagctkakyaactgggtaacttattggggctgggcaarcactggggggctggaggagctgggctggaccctccctacctgagcatgctgacccccttcctacctccagaataaagaatctcaacctgaaaaaaaagaaaaaatatttgaaggaagaggccgaatgcttgagagaagcagaaagaatt

SEQ ID NO: 3578 - DNA, 1661 bp, Homo sapiens
tctgtttccctcagactccatctgcccggggccgctaagggagcgcaaggtcaagttcgccttggccctgcctccagctcaggtactagggggtctagacctgaggctgcccgggccggaggcagccttgagtcccgagaccaaacgtcgtttccctctcggacctcgggcgccgggccgcgcgctgaccgacagcccctgctaggcccagcaggtcccctagtcccccgcagtcccccgagactcgccgagcgccgttgctgagccctgcaaatagcagcagggtggccactgcaacaggtgtggatgtgcctgacaagatgaagagccgaatacctgtggtgctcctggcctgtggctcctttaaccccatcaccaacatgcacctgcgcatgtttgaggtggccagagatcacctacaccaaacaggaatgyaccaggtcatccagggtatcatctctcctgtcaacgacacctatgggaagaaagacctygcagcttctcatcaccgagtggccatggcccggctggccctgcagacatccgactggatccgggtggacccttgggagagtgagcaggcacagtggatggagacagtgaaggtgctgaggcatcatcacagcaaactgctcagatctcyaccccagatggaaggcccagaccatggcaaggcactcttctcgacccctgcagctgtgcytgagctgaagcttctctgtggggcagacgtcttgaagaccttccagacccccaacctctggaaggatgcgcacatccaggaaatagtggagaagtttggcttggtgtgcgtgggccgagtaggtcacgacccaaaaggttacatcgcagaatctcccatcctacggatgcaccagcacaacattcacctggccaaggagcctcgtaaagtacctgattcccgatgctgtcatcacrtacatcaaggaccatggcctctacaccaagggcagtacctggaaaggcaaaagcacccagagcactgagggcaagacaagctagggaggggggactcagcacccacacctcctccaacaagctcctgctggggagagggctgttaaggtttctgttttactttggtttttgcttctccatttttcatttgctttatttctacagtgattctacttctgaggagtcttctgtcccaggaagagataccttctttacaggagaggaaaggtctaaatcacaaggatagacatttatcaaagaagttaaaatggtgtggcaggtcattaggattaggcagaatctctcagagctgctggacaaggaggtctacttattttgtgtggatggtaattatggcatgcacgctgaatgcagttctgagcatggcagcggcccctgagggtcagatcagaattgcccacaatgtgttttttaactaggaccaggtgcagcatgctagtcttgattggaaagatttgacaggatgctaattactgaacagtgggttttgtcaacgccctggtttcagaatatgaactgaggagtcaaacagttggaaacagcacattgctgatttacactggatcttgccttagaaaccattgtctgcctgcctaaccagcytttcataaaatttaaacaaaactctttctacgtagtgatcctcaagcaatatttttgat

SEQ ID NO: 3579 - DNA, 1855 bp, Homo sapiens
gggcggggcgcagatctgtttccctcagactccatctgcccggggccgctaagggagcgcaaggtcaagttcgccttggccctgcctccagctcaggtactagggggtctagacctgaggctgcccgggccggaggcagccttgagtcccgagaccaaacgtcgtttccctctcggacctcgggcgccgggccgcgcgctgaccgacagcccctgctaggcccagcaggtcccctagtcccccgcagtcccccgagactcgccgagcgccgttgctgagccctgcaaatagcagctacctgcttcagcctagatcctgccatgaagcggactgctgctccctggctcccactctgatctgcttttcactcttgccttgtctcccaattaataaggaatgyaccaggtcatccagggtatcatctctcctgtcaacgacacctatgggaagaaagacctygcagcttctcatcaccgagtggccatggcccggctggccctgcagacatccgactggatccgggtggacccttgggagagtgagcaggcacagtggatggagacagtgaaggtgctgaggcatcatcacagcaaactgctcagatctcyaccccagatggaaggcccagaccatggcaaggcactcttctcgacccctgcagctgtgcytgagctgaagcttctctgtggggcagacgtcttgaagaccttccagacccccaacctctggaaggatgcgcacatccaggaaatagtggagaagtttggcttggtgtgcgtgggccgagtaggtcacgacccaaaaggttacatcgcagaatctcccatcctacggatgcaccagcacaacattcacctggccaaggagcctgtgcagaatgagatcagtgccacatacatcaggcgagccttgggccaagggcagagcgtaaagtacctgattcccgatgctgtcatcacrtacatcaaggaccatggcctctacaccaagggcagtacctggaaaggcaaaagcacccagagcactgagggcaagacaagctagggaggggggactcagcacccacacctcctccaacaagctcctgctggggagagggctgttaaggtttctgttttactttggtttttgcttctccatttttcatttgctttatttctacagtgattctacttctgaggagtcttctgtcccaggaagagataccttctttacaggagaggaaaggtctaaatcacaaggatagacatttatcaaagaagttaaaatggtgtggcaggtcattaggattaggcagaatctctcagagctgctggacaaggaggtctacttattttgtgtggatggtaattatggcatgcacgctgaatgcagttctgagcatggcagcggcccctgagggtcagatcagaattgcccacaatgtgttttttaactaggaccaggtgcagcatgctagtcttgattggaaagatttgacaggatgctaattactgaacagtgggttttgtcaacgccctggtttcagaatatgaactgaggagtcaaacagttggaaacagcacattgctgatttacactggatcttgccttagaaaccattgtctgcctgcctaaccagcytttcataaaatttaaacaaaactctttctacgtagtgatcctcaagcaatatttttgatacagcaagtgtcaaacttgctatagcataaaagccggggctcctgatttccaggtttctaaaawkgaactgaggtaaaacagatgcctgaccgttttaaaggatcttttttaatgttttatgactgcctgtctgtttgaatactggcaaagggataaataataaattgacatc

SEQ ID NO: 3580 - DNA, 2204 bp, Homo sapiens
tctgtttccctcagactccatctgcccggggccgctaagggagcgcaaggtcaagttcgccttggccctgcctccagctcagctacctgcttcagcctagatcctgccatgaagcggactgctgctccctggctcccactctgatctgcttttcactcttgccttgtctcccaattaataagcagggtggccactgcaacaggtgtggatgtgcctgacaagatgaagagccgaatacctgtggtgctcctggcctgtggctcctttaaccccatcaccaacatgcacctgcgcatgtttgaggtggccagagatcacctacaccaaacaggaatgyaccaggtcatccagggtatcatctctcctgtcaacgacacctatgggaagaaagacctygcagcttctcatcaccgagtggccatggcccggctggccctgcagacatccgactggatccgggtggacccttgggagagtgagcaggcacagtggatggagacagtgaaggtgctgagataaagaaactgaggctcagagaggctacgttaatcacggtcacacacaaataggacgtggagctcccatctgtggagctctgaagccatgcttatggccatcttcaaaacagggatctgcaggctgggaacatgatgtggctggctttacacctcccacagttgccctccaatctttcctgaagaccagtgggactgctgaggacaccaagaacatgcccccagggtcaatccacaggcccaaggtaccactcaggcaggcagcaagaagcagttaatggtcatgccccatagaggcgcagtggaagtccctggcaaatrcatgttgtattggaagtaattatttccacaacaaagttcagagatccagctaatattcaaagtagggtcaacctgaactaggaccttcaaggcatcatcacagcaaactgctcagatctcyaccccagatggaaggcccagaccatggcaaggcactcttctcgacccctgcagctgtgcytgagctgaagcttctctgtggggcagacgtcttgaagaccttccagacccccaacctctggaaggatgcgcacatccaggaaatagtggagaagtttggcttggtgtgcgtgggccgagtaggtcacgacccaaaaggttacatcgcagaatctcccatcctacggatgcaccagcacaacattcacctggccaaggagcctgtgcagaatgagatcagtgccacatacatcaggcgagccttgggccaagggcagagcgtaaagtacctgattcccgatgctgtcatcacrtacatcaaggaccatggcctctacaccaagggcagtacctggaaaggcaaaagcacccagagcactgagggcaagacaagctagggaggggggactcagcacccacacctcctccaacaagctcctgctggggagagggctgttaaggtttctgttttactttggtttttgcttctccatttttcatttgctttatttctacagtgattctacttctgaggagtcttctgtcccaggaagagataccttctttacaggagaggaaaggtctaaatcacaaggatagacatttatcaaagaagttaaaatggtgtggcaggtcattaggattaggcagaatctctcagagctgctggacaaggaggtctacttattttgtgtggatggtaattatggcatgcacgctgaatgcagttctgagcatggcagcggcccctgagggtcagatcagaattgcccacaatgtgttttttaactaggaccaggtgcagcatgctagtcttgattggaaagatttgacaggatgctaattactgaacagtgggttttgtcaacgccctggtttcagaatatgaactgaggagtcaaacagttggaaacagcacattgctgatttacactggatcttgccttagaaaccattgtctgcctgcctaaccagcytttcataaaatttaaacaaaactctttctacgtagtgatcctcaagcaatatttttgatacagcaagtgtcaaacttgctatagcataaaagccggggctcctgatttccaggtttctaaaawkgaactgaggtaaaacagatgcctgaccgttttaaaggatcttttttaatgttttatgactgcctgtctgtttgaatactggcaaagggataaataataaattgacatc

SEQ ID NO: 3581 - DNA, 873 bp, Homo sapiens
cccagcgaaggggcggggcgcagatctgtttccctcagactccatctgcccggggccgctaagggagcgcaaggtcaagttcgccttggccctgcctccagctcaggtactagggggtctagacctgaggctgcccgggccggaggcagccttgagtcccgagaccaaacgtcgtttccctctcggacctcgggcgccgggccgcgcgctgaccgacagcccctgctaggcccagcaggtcccctagtcccccgcagtcccccgagactcgccgagcgccgttgctgagccctgcaaatagcagctacctgcttcagcctagatcctgccatgaagcggactgctgctccctggctcccactctgatctgcttttcactcttgccttgtctcccaattaataagcagggtggccactgcaacaggtgtggatgtgcctgacaagatgaagagccgaatacctgtggtgctcctggcctgtggctcctttaaccccatcaccaacatgcacctgcgcatgtttgaggtggccagagatcacctacaccaaacagatttttgtctttcaaggcctttgtttcccagggtgcacttcagccaacacaaccaagggaagaagaaaawgggcaaaagtgtgcatgaggtggtaggggccagactgtgcttgtgcccacagaaacaccaagcttctcccagcaaaagccccagaactgaagtctgcaaaagggaagaggcaaattagtaatcattctgtgctacagagcagccacgtctgagcattacctaatgcttttctcaattgttttgacacatgtagttttgttttaaatatgtatggtaatttttaataaaatgctgataagtgtgccaagcc

SEQ ID NO: 3582 - DNA, 2155 bp, Homo sapiens
cccagcgaaggggcggggcgcagatctgtttccctcagactccatctgcccggggccgctaagggagcgcaaggtcaagttcgccttggccctgcctccagctcaggtactagggggtctagacctgaggctgcccgggccggaggcagccttgagtcccgagaccaaacgtcgtttccctctcggacctcgggcgccgggccgcgcgctgaccgacagcccctgctaggcccagcaggtcccctagtcccccgcagtcccccgagactcgccgagcgccgttgctgagccctgcaaatagcagctacctgcttcagcctagatcctgccatgaagcggactgctgctccctggctcccactctgatctgcttttcactcttgccttgtctcccaattaataagcagggtggccactgcaacaggtgtggatgtgcctgacaagatgaagagccgaatacctgtggtgctcctggcctgtggctcctttaaccccatcaccaacatgcacctgcgcatgtttgaggtggccagagatcacctacaccaaacaggaatgyaccaggtcatccagggtatcatctctcctgtcaacgacacctatgggaagaaagacctygcagcttctcatcaccgagtggccatggcccggctggccctgcagacatccgactggatccgggtggacccttgggagagtgagcaggcacagtggatggagacagtgaaggtgctgaggcatcatcacagcaaactgctcagatctcyaccccagatggaaggcccagaccatggcaaggcactcttctcgacccctgcaggtattcttaaaaggattctacagacactttttgagcacctcactggaacagactctgggctcaggctgagaacagagacagccagccccagcccccacctcaagctggagacagggtatgaatggagctgtgcytgagctgaagcttctctgtggggcagacgtcttgaagaccttccagacccccaacctctggaaggatgcgcacatccaggaaatagtggagaagtttggcttggtgtgcgtgggccgagtaggtcacgacccaaaaggttacatcgcagaatctcccatcctacggatgcaccagcacaacattcacctggccaaggagcctgtgcagaatgagatcagtgccacatacatcaggcgagccttgggccaagggcagagcgtaaagtacctgattcccgatgctgtcatcacrtacatcaaggaccatggcctctacaccaagggcagtacctggaaaggcaaaagcacccagagcactgagggcaagacaagctagggaggggggactcagcacccacacctcctccaacaagctcctgctggggagagggctgttaaggtttctgttttactttggtttttgcttctccatttttcatttgctttatttctacagtgattctacttctgaggagtcttctgtcccaggaagagataccttctttacaggagaggaaaggtctaaatcacaaggatagacatttatcaaagaagttaaaatggtgtggcaggtcattaggattaggcagaatctctcagagctgctggacaaggaggtctacttattttgtgtggatggtaattatggcatgcacgctgaatgcagttctgagcatggcagcggcccctgagggtcagatcagaattgcccacaatgtgttttttaactaggaccaggtgcagcatgctagtcttgattggaaagatttgacaggatgctaattactgaacagtgggttttgtcaacgccctggtttcagaatatgaactgaggagtcaaacagttggaaacagcacattgctgatttacactggatcttgccttagaaaccattgtctgcctgcctaaccagcytttcataaaatttaaacaaaactctttctacgtagtgatcctcaagcaatatttttgatacagcaagtgtcaaacttgctatagcataaaagccggggctcctgatttccaggtttctaaaawkgaactgaggtaaaacagatgcctgaccgttttaaaggatcttttttaatgttttatgactgcctgtctgtttgaatactggcaaagggataaataataaattgacatcaaaaagtactaatg

SEQ ID NO: 3583 - DNA, 1609 bp, Homo sapiens
cccagcgaaggggcggggcgcagatctgtttccctcagactccatctgcccggggccgctaagggagcgcaaggtcaagttcgccttggccctgcctccagctcaggtactagggggtctagacctgaggctgcccgggccggaggcagccttgagtcccgagaccaaacgtcgtttccctctcggacctcgggcgccgggccgcgcgctgaccgacagcccctgctaggcccagcaggtcccctagtcccccgcagtcccccgagactcgccgagcgccgttgctgagccctgcaaatagcagctacctgcttcagcctagatcctgccatgaagcggactgctgctccctggctcccactctgatctgcttttcactcttgccttgtctcccaattaataaggaatgyaccaggtcatccagggtatcatctctcctgtcaacgacacctatgggaagaaagacctygcagcttctcatcaccgagtggccatggcccggctggccctgcagacatccgactggatccgggtggacccttgggagagtgagcaggcacagtggatggagacagtgaaggtgctgagctgtgcytgagctgaagcttctctgtggggcagacgtcttgaagaccttccagacccccaacctctggaaggatgcgcacatccaggaaatagtggagaagtttggcttggtgtgcgtgggccgagtaggtcacgacccaaaaggttacatcgcagaatctcccatcctacggatgcaccagcacaacattcacctggccaaggagcctgtgcagaatgagatcagtgccacatacatcaggcgagccttgggccaagggcagagcgtaaagtacctgattcccgatgctgtcatcacrtacatcaaggaccatggcctctacaccaagggcagtacctggaaaggcaaaagcacccagagcactgagggcaagacaagctagggaggggggactcagcacccacacctcctccaacaagctcctgctggggagagggctgttaaggtttctgttttactttggtttttgcttctccatttttcatttgctttatttctacagtgattctacttctgaggagtcttctgtcccaggaagagataccttctttacaggagaggaaaggtctaaatcacaaggatagacatttatcaaagaagttaaaatggtgtggcaggtcattaggattaggcagaatctctcagagctgctggacaaggaggtctacttattttgtgtggatggtaattatggcatgcacgctgaatgcagttctgagcatggcagcggcccctgagggtcagatcagaattgcccacaatgtgttttttaactaggaccaggtgcagcatgctagtcttgattggaaagatttgacaggatgctaattactgaacagtgggttttgtcaacgccctggtttcagaatatgaactgaggagtcaaacagttggaaacagcacattgctgatttacactggatcttgccttagaaaccattgtctgcctgcctaaccagcytttcataaaatttaaacaaaactctttctacgtagtgatcctcaagcaatatttttgat

SEQ ID NO: 3584 - DNA, 1732 bp, Homo sapiens
gcccggggccgctaagggagcgcaaggtcaagttcgccttggccctgcctccagctcaggtactagggggtctagacctgaggctgcccgggccggaggcagccttgagtcccgagaccaaacgtcgtttccctctcggacctcgggcgccgggccgcgcgctgaccgacagcccctgctaggcccagcaggtcccctagtcccccgcagtcccccgagactcgccgagcgccgttgctgagccctgcaaatagcaggaatgyaccaggtcatccagggtatcatctctcctgtcaacgacacctatgggaagaaagacctygcagcttctcatcaccgagtggccatggcccggctggccctgcagacatccgactggatccgggtggacccttgggagagtgagcaggcacagtggatggagacagtgaaggtgctgaggcatcatcacagcaaactgctcagatctcyaccccagatggaaggcccagaccatggcaaggcactcttctcgacccctgcagctgtgcytgagctgaagcttctctgtggggcagacgtcttgaagaccttccagacccccaacctctggaaggatgcgcacatccaggaaatagtggagaagtttggcttggtgtgcgtgggccgagtaggtcacgacccaaaaggttacatcgcagaatctcccatcctacggatgcaccagcacaacattcacctggccaaggagcctgtgcagaatgagatcagtgccacatacatcaggcgagccttgggccaagggcagagcgtaaagtacctgattcccgatgctgtcatcacrtacatcaaggaccatggcctctacaccaagggcagtacctggaaaggcaaaagcacccagagcactgagggcaagacaagctagggaggggggactcagcacccacacctcctccaacaagctcctgctggggagagggctgttaaggtttctgttttactttggtttttgcttctccatttttcatttgctttatttctacagtgattctacttctgaggagtcttctgtcccaggaagagataccttctttacaggagaggaaaggtctaaatcacaaggatagacatttatcaaagaagttaaaatggtgtggcaggtcattaggattaggcagaatctctcagagctgctggacaaggaggtctacttattttgtgtggatggtaattatggcatgcacgctgaatgcagttctgagcatggcagcggcccctgagggtcagatcagaattgcccacaatgtgttttttaactaggaccaggtgcagcatgctagtcttgattggaaagatttgacaggatgctaattactgaacagtgggttttgtcaacgccctggtttcagaatatgaactgaggagtcaaacagttggaaacagcacattgctgatttacactggatcttgccttagaaaccattgtctgcctgcctaaccagcytttcataaaatttaaacaaaactctttctacgtagtgatcctcaagcaatatttttgatacagcaagtgtcaaacttgctatagcataaaagccggggctcctgatttccaggtttctaaaawkgaactgaggtaaaacagatgcctgaccgttttaaaggatcttttttaatgttttatgactgcctgtctgtttgaatactggcaaagggataaataataaattgacatcaaaaagtactaatg

SEQ ID NO: 3585 - DNA, 1992 bp, Homo sapiens
cgctaagggagcgcaaggtcaagttcgccttggccctgcctccagctcaggtactagggggtctagacctgaggctgcccgggccggaggcagccttgagtcccgagaccaaacgtcgtttccctctcggacctcgggcgccgggccgcgcgctgaccgacagcccctgctaggcccagcaggtcccctagtcccccgcagtcccccgagactcgccgagcgccgttgctgagccctgcaaatagcagctacctgcttcagcctagatcctgccatgaagcggactgctgctccctggctcccactctgatctgcttttcactcttgccttgtctcccaattaataaggggtggctggcagaggatccttacaccgacaaggaagggtggccactgcaacaggtgtggatgtgcctgacaagatgaagagccgaatacctgtggtgctcctggcctgtggctcctttaaccccatcaccaacatgcacctgcgcatgtttgaggtggccagagatcacctacaccaaacaggaatgyaccaggtcatccagggtatcatctctcctgtcaacgacacctatgggaagaaagacctygcagcttctcatcaccgagtggccatggcccggctggccctgcagacatccgactggatccgggtggacccttgggagagtgagcaggcacagtggatggagacagtgaaggtgctgaggcatcatcacagcaaactgctcagatctcyaccccagatggaaggcccagaccatggcaaggcactcttctcgacccctgcagctgtgcytgagctgaagcttctctgtggggcagacgtcttgaagaccttccagacccccaacctctggaaggatgcgcacatccaggaaatagtggagaagtttggcttggtgtgcgtgggccgagtaggtcacgacccaaaaggttacatcgcagaatctcccatcctacggatgcaccagcacaacattcacctggccaaggagcctgtgcagaatgagatcagtgccacatacatcaggcgagccttgggccaagggcagagcgtaaagtacctgattcccgatgctgtcatcacrtacatcaaggaccatggcctctacaccaagggcagtacctggaaaggcaaaagcacccagagcactgagggcaagacaagctagggaggggggactcagcacccacacctcctccaacaagctcctgctggggagagggctgttaaggtttctgttttactttggtttttgcttctccatttttcatttgctttatttctacagtgattctacttctgaggagtcttctgtcccaggaagagataccttctttacaggagaggaaaggtctaaatcacaaggatagacatttatcaaagaagttaaaatggtgtggcaggtcattaggattaggcagaatctctcagagctgctggacaaggaggtctacttattttgtgtggatggtaattatggcatgcacgctgaatgcagttctgagcatggcagcggcccctgagggtcagatcagaattgcccacaatgtgttttttaactaggaccaggtgcagcatgctagtcttgattggaaagatttgacaggatgctaattactgaacagtgggttttgtcaacgccctggtttcagaatatgaactgaggagtcaaacagttggaaacagcacattgctgatttacactggatcttgccttagaaaccattgtctgcctgcctaaccagcytttcataaaatttaaacaaaactctttctacgtagtgatcctcaagcaatatttttgatacagcaagtgtcaaacttgctatagcataaaagccggggctcctgatttccaggtttctaaaawkgaactgaggtaaaacagatgcctgaccgttttaaaggatcttttttaatgttttatgactgcctgtctgtttgaatactggcaaagggataaataataaattgacatc

SEQ ID NO: 3586 - DNA, 2014 bp, Homo sapiens
cccagcgaaggggcggggcgcagatctgtttccctcagactccatctgcccggggccgctaagggagcgcaaggtcaagttcgccttggccctgcctccagctcaggtactagggggtctagacctgaggctgcccgggccggaggcagccttgagtcccgagaccaaacgtcgtttccctctcggacctcgggcgccgggccgcgcgctgaccgacagcccctgctaggcccagcaggtcccctagtcccccgcagtcccccgagactcgccgagcgccgttgctgagccctgcaaatagcagctacctgcttcagcctagatcctgccatgaagcggactgctgctccctggctcccactctgatctgcttttcactcttgccttgtctcccaattaataagcagggtggccactgcaacaggtgtggatgtgcctgacaagatgaagagccgaatacctgtggtgctcctggcctgtggctcctttaaccccatcaccaacatgcacctgcgcatgtttgaggtggccagagatcacctacaccaaacaggaatgyaccaggtcatccagggtatcatctctcctgtcaacgacacctatgggaagaaagacctygcagcttctcatcaccgagtggccatggcccggctggccctgcagacatccgactggatccgggtggacccttgggagagtgagcaggcacagtggatggagacagtgaaggtgctgaggcatcatcacagcaaactgctcagatctcyaccccagatggaaggcccagaccatggcaaggcactcttctcgacccctgcagctgtgcytgagctgaagcttctctgtggggcagacgtcttgaagaccttccagacccccaacctctggaaggatgcgcacatccaggaaatagtggagaagtttggcttggtgtgcgtgggccgagtaggtcacgacccaaaaggttacatcgcagaatctcccatcctacggatgcaccagcacaacattcacctggccaaggagcctgtgcagaatgagatcagtgccacatacatcaggcgagccttgggccaagggcagagcgtaaagtacctgattcccgatgctgtcatcacrtacatcaaggaccatggcctctacaccaagggcagtacctggaaaggcaaaagcacccagagcactgagggcaagacaagctagggaggggggactcagcacccacacctcctccaacaagctcctgctggggagagggctgttaaggtttctgttttactttggtttttgcttctccatttttcatttgctttatttctacagtgattctacttctgaggagtcttctgtcccaggaagagataccttctttacaggagaggaaaggtctaaatcacaaggatagacatttatcaaagaagttaaaatggtgtggcaggtcattaggattaggcagaatctctcagagctgctggacaaggaggtctacttattttgtgtggatggtaattatggcatgcacgctgaatgcagttctgagcatggcagcggcccctgagggtcagatcagaattgcccacaatgtgttttttaactaggaccaggtgcagcatgctagtcttgattggaaagatttgacaggatgctaattactgaacagtgggttttgtcaacgccctggtttcagaatatgaactgaggagtcaaacagttggaaacagcacattgctgatttacactggatcttgccttagaaaccattgtctgcctgcctaaccagcytttcataaaatttaaacaaaactctttctacgtagtgatcctcaagcaatatttttgatacagcaagtgtcaaacttgctatagcataaaagccggggctcctgatttccaggtttctaaaawkgaactgaggtaaaacagatgcctgaccgttttaaaggatcttttttaatgttttatgactgcctgtctgtttgaatactggcaaagggataaataataaattgacatc

SEQ ID NO: 3587 - DNA, 6276 bp, Homo sapiens
atgagagcagatacatttctctctcttcttcattgttattttttcagttcctggtaacagctcagattgcatgtttaataaatacttgccttacgaatgaatgaattcatttctgtcttttcccatctccttgtgtagtgcccggaaggcagtggatgaggaagaggaagcagttgaagaacgtcgcaatatgcgaactatctgggtgactggcagaaaaggtttaactgaaagggaagcagcagcccttatagtggaagaagccagaatgattctgcagcaggacttagttgaaatgggagtgcaatggaatccatgtgccctgttacattctagtacatgctcattgactcatagtgagtccgaagtaaaggaacayacatttatatcccaaactaagagttcttataaaaaattaacatcaaagaacaaaagtaacacaatatttagtgattcttatattaagcattcaccaaatatagtgcaagacttaaayaaargtagagmgcatacaagttcctttaattgtaatttccagaatgggaatcaagaacatcagasatgttccattttcagagcaagaaaacgggcctctttagatataaataaagagaagccaggagcctctcagaatgaggggaaaacaagtgataagaaagttgttcagactttttcacagaaaacaaaaaaggcacctttgaatttcaattcagaaaagatgagcagaagttttcgatcttggaaacgtagaaagcatctaaagcgrtctagggacagcagccycctgaaagactctggagcgtgtagaatccatttacaaggacagactctgtctaatcctagtctttgtgaagacccgtttaccttagatgagaagaaaacggaatttagaaattcagggccatttgctaaaaatgtatctttgagtggtaaggaaaaagataataaaacatcattcccattacaaataaagcaaaattgttcatggaacataacactaactaatgataattttgtggagcatattgtcacaggatctcagagtaaaaatgtgacttgtcaggccactagtgtggttagtgaaaagggcagaggagtagctgttgaggcagaaaaaataaatgaagtgctgatacaaaatggttcaaaaaaccagaatgtttatatgaaacaccatgacatccatccaattaaccagtacctgcgaaagcaatctcrtgaacagacaagcactattaccaaacagaaaaatataatagagagacaaatgccctgtgaagcagtcagtagttacataaatagagactcaaatgttactatcaattgtgaaaggataaagcttaatacagaggaaaataaaccaagtcattttcaggcattagragrtgatataagcagaactgtgatacccagtgaagtacttccatcagctggagcatttagcaaatcagaaggccagcatgagaattttctaaatatttctagactacaagaaaaaacaggtacttatacaacaaacaaaactaaaaataatcatgtttctgacttaggtttagtcctctgtgattttgaagatagtttctatctggatactcagtcagagaaaataatacaacagatggcaactgaaaaygccaaactaggagcaaaggacaccaacctggcagcagggataatgcagaagagcttagtccaacagaactcaatgaactcttttcagaaggagtgtcacattccttttcctgctgaacagcacmctctaggagcgactaagatagatcatttggaccttaagactgtaggtactatgaaacaaagcagtgattcacatggggttgatatcctgactccagaaagcccgattttccattctccaatactattggaggaaaatggtctttttttaaaaaagaatgaagtttctgttactgattcacaattaaatagttttcttcaaggttatcaaacacaagaaactgtgaaaccagttatacttctgattcctcaaaagagaactcccactggtgtagaaggagaatgtcttccagttcctgaaacaagtttgaatatgagtgatagtttactatttgatagcttcagtgatgactatctagtaaaagaacaattacctgataygcaaatgaaagaaccccttccttcagaagtaacatcaaaccattttagtgattctctgtgtctacaagaagacctaattaaaaaatcaaatgtaaatgagaatcaagatacccamcagcagttgacttgttccaatgatgaatctattatattttcagaaatgkattctgttcakatggttgaagctttggacaatgtggatatatttcctgtccaagagaagaatcatactgtagtatctcctagagcattagaactaagtgatccagtacttgatgagcaccaccaaggtgatcaagatggaggagatcaagatgaaagggctgaaaaatcaaaattaactgggaccaggcaaaatcattcattcatatggtcaggggcatcatttgatctaagtccaggactgcaaaggattttagataaagtatccagtcctctagaaaatgaaaagctaaaatcaatgactataaacttttccagtttgaatagaaaaaatacagagttaaatgaagaacaagaagttatttcaaacttggagacaaaacaagtgcagggaatttcattttcttctaataatgaagtaaaaagcaagattgagatgctagaaaacaatgccaatcatgatgaaacctcatccctcttacctcgtaaagaaagtaatatagttgatgataatggtctcattcctcctacacccattccaacatctgcttctaagctgacatttccakggattcttgaaacacctgtaaacccttggaaaactaataatgttttacaacctggtgaaagttatttatttggctcaccttcagatattaaaaaccackatttaagtccagggagtagaaatgggttcaaagacaacagccctwttagtgacacaagcttttcacttcagttatcacaggatggattacagttaactccagcctcaagcagttcagaaagtttgtccataattgatgtagcaagtgaccaaaatcttttccaaacattcattaaggagtggcggtgcaaaaagcgattttccatctcactggcttgtgaaaagattagaagtttgacatcttctaaaactgctactattggcagtaggtttaagcaagctagctcacctcaggaaattcctattagagatgatggatttcccattaaaggttgtgatgacaccttggtggttggactggcagtatgctggggtggaagggatgcctattatttttcactgcagaaggaacaaaagcattctgaaattagtgccagtttggttccaccttctttagatccaagcctgactttgaaagacaggatgtggtaccttcaatcttgcttgcraaaggaatctgataaagaatgttctgttgtcatctatgacttcatccagagctataaaattcttcttctttcttgtggcatctccttggagcaaagttatgaagatcctaaggtggcatgctggttactagatccagattctcaggagccgactcttcatagcatagttaccagttttcttcctcatgagcttccactcctagaagggatggagaccagccaagggattcaaagcctggggctaaatgctggcagtgagcattctgggcgatacagagcatctgtggagtccattctcatcttcaactctatgaatcagctcaactctttgttgcagaaggaaaaccttcaagatgttttccgtaaggtggaaatgccctctcagtactgcttggccttgctagaactaaatggaattggctttagtactgcagaatgtgaaagtcagaaacatataatgcaagccaagctggatgcaattgagacccaggcctatcaactagctggccacagtttttctttcaccagttcagatgacatcgctgaggttttatttttggaattgaagttgcccccaaatagagagatgaaaaaccaaggcagcaagaaaactctgggttctaccagaagagggattgacaatggacgcaagctaaggctgggaagacagttcagcactagtaaggacrttttaaataaattaaaggcattacatcctttaccaggcttgatattagaatggagaagaatcactaatgctattaccaaagtggtctttccccttcagcgggaaaagtgtcttaatccttttcttggaatggaaagaatctatcctgtatcacagtcgcacactgctacaggacgaataacctttacagaaccaaatattcagaatgtgccaagagattttgaaatcaaaatgccaacactagtaggagaaagcccaccttctcaagctgtaggcaaaggcctacttcccatgggcagaggaaaatataagaagggtttcagcgtgaatcctagrtgccaggcacagatggaggagagagctgyagacagaggaatgccattttcaattagcatgcgacatgcctttgtgcctttcccaggtggttcaatactggctgctgactactctcagcttgaactgaggatcttggctcatttatcccatgatcgtcgtctcattcaagtgttaaacactggagctgatgttttcaggagcattgcagcagagtggaagatgattgagccagagtctgttggggatgatctgaggcagcaggcaaaacagatttgctatgggatcatttatggaatgggagctaaatctttgggagagcagatgggcattaaagaaaatgatgctgcatgctatattgactccttcaaatccagatacacagggattaatcaattcatgacagagacagtraagaattgtaaaagagacggatttgttcagaccattttgggaaggcgtagatatttgccaggaatcaaagacaacaacccttatcgtaaagctcacgctgagcgtcaagctatcaacacaatagtccaaggatcagcagctgatattgtcaaaatagccacagttaacattcagaagcaattagagaccttccactcaaccttcaaatcccatggtcatcgagagggtatgctccaaagtgaccraacaggattgtcacgaaagagaaaactgcaagggatgttctgcccaatcagaggaggcttcttcatccttcaastccatgatgaactcctatatgaagtggyagaagaagatgttgttcaggtagctcagattgtcaagaatgaaatggaaagtgctgtaaaactgtctgtgaaattgaaagtgaaagtgaaaataggcgccagctggggagagctaaaggactttgatgtgtaactgtgctgttgatgaagtcctcccagggaagcctgtgcagatgcagtcacctggaaagaacagagattaccctttcacctacctcagcaaaacaaactttcaagtcttgatagacttagcctagtaattttatagtgagagtttcaaactatatatcagtgtctatagcatcaaaaacttctgggggcgtgggggaagtagaataccaagtataatagttacattcactttcaaagagcatctatgaatttgccttttgtaacttactgtggctttaaacatattcagaacagatgcttgaaatatgcacttagcactttggttccacatctgtctgggtaaaccatgaagaaaatgaagctgctgcctcaatcgacccagacagcagccataggcagataaagatttggtttcaccctggtggtggtaggcatcgtgtgtgactttttttcctctaatatcaattttacagtacggaaatagtattttaaaatagtattggctaataaattatgaattctataaagtagtaagacttggtatggttggagtgtaggaatgaatattcatgaaatgtttcttattgcttttccttccctaattcatacaatgaatgtatttggaatacttacatattataaaataaactatacctcttcaagaggtatcctgttctgtaagatcagatgtttttattgcaggtcaatataatactgccagagacagaaaatacccccttatcagtcccttagtgcctctttctgtttgtggcatggtgagaaaacccatgctgaaaagattgtactttgtgatcccaatcagagggatggagctaatctttttgctgttgaaataaaatgaatttatgagaaactttatatcaacaa

SEQ ID NO: 3588 - DNA, 9064 bp, Homo sapiens
atgaatggycaccgttttacgttcagaactcgttcgcttctacctttacaaaagggacaacacagatgcattactaagctcttggctcataacgatccctggggtatattcagagccccttcctcgcggcgttcatatagtgtctcaggggtctgtcagccagcaatccccaattcctcattacatattcctcacaatgcatgctggctaaaatggaaattgtgttcagaaatagccctgccctaccatcatatactaggagaaaggaggaaattatgctctattagaaacctttgaagactggcgggaagatgtccgcagctgttgccaggccagggttctcccgagagggaggacgctgggactstggcttgccctgatcggccgagaagagtttgccatgaatcttctgcgtcggagtgggaaacggcggcgttcagaatcaggctcagattcgttctcgggaagcggcggtgacagcagtgccagcccccagttcctctccgggtccgtgctgagcccgccgcccggccttggtcgctgcctgaaggccgcagctgcaggagaatgcaagcctacagttcctgactacgaaakagacaagctactattggcaaactggggacttcctaaagcagttctggaaaaataccacagttttggtgtaaaaaagatgtttgaatggcaggcagagtgccttttgcttggacaagtcctggaaggaaagaatttagtttattcagctcctacaagtgctgggaagactcttgtggcagaattacttattttgaagcgggttttggaaatgcggaagaaagctttgtttattcttccctttgtttctgtggctaaagagaagaaatactacctccagagtctgtttcaggaagtaggaataaaagtagacggttatatgggcagcacctctccatcaaggcatttytcttcattggatattgcagtctgcacaattgagagagccaatggtctgatcaatcgcctcatagaggaaaataagatggatctgttaggaatggtggttgtggatgaattacatatgctgggagactctcaccgagggtatctgctggaacttttgctgaccaagatttgctatattactcggaaatcagcatcttgtcaggcagatctagccagttctctgtctaatgctgtgcaaatcgttggcatgagtgctacccttcctaatttggagcttgtggcttcctggttgaatgctgaactctaccataccgactttcgccctgtaccgcttttggagtcagtaaaagttggaaattccatatatgactcttcaatgaaacttgtgagggaatttgagcccatgctacaagtgaagggagatgaggaccatgttgttagtttatgttatgagacgatttgtgataaccattcagtattacttttttgtccatcaaagaaatggtgtgagaagctggcagatatcattgctcgagagttttataatctacatcatcaagctgagggtgagattggtgaaaccctctgaatgcccaccagtaattctggaacaaaaagaactcctggaagtgatggatcagttaagacgtttgccttcaggactggactctgtattacagaaaactgtaccatggggagtagcatttcatcatgcaggtcttacttttgaggagagggatatcattgaaggagcctttcgtcaaggtctcattcgggtcttggcrgcaacttctactctttcttctggggtgaatttacctgcacgtcgtgtgattattcgaacccctatttttggtggtcgacctctagatattcttacttataagcagatggttggycgtgctggcaggaaaggagtggacacagtaggcgagagtatcttaatttgtaagaactctgagaaatcaaaaggcatagctctccttcagggttctctaaagcctgttygcagctgtctgcaaagacgagaaggagaagaagtaactggcagcatgatacgagctattctggagataatagttggtggagtggcaagtacatcacaagatatgcatacttatgctgcctgcacatttttggctgcaagtatgaaagaagggaagcaaggaattcagagaaatcaagagtctgttcagcttggagygattgaggcctgtgtgatgtggctactagaaaatgaattcatccagagtacagaagccagtgatggaacagaaggaaaggtgtatcatccaacacatcttggttcggccactctttcttcttcactttctccagctgatactttagatatttttgctgacctgcaaagagcaatgaagggctttgttttagagaatgatcttcatattctctatctggttacacctatgtttgaggattggactactattgattggtatcgatttttctgtttatgggagaagttgccaacttcaatgaaaagggtggcagagctagtgggagttgaagaggggttcttggcccgttgtgtgaaaggaaaagtagtagccagaactgagagacagcatcgacaaatggccatccataaaaggtttttcaccagtcttgtgctattagatttaatcagtgaagttcccttaagggaaataaatcagaaatatggatgcaatcgtgggcagattcaatctttgcaacagtcagctgctgtttatgcagggatgattacagtattttccaaccgtctgggctggcacaacatggaactactactttcccaatttcagaagcgtcttacgtttggcatccagagggagctgtgtgacctggttcgggtatccttactaaatgctcagagagccagggttctctatgcttctggctttcatactgtggcagaccttgctagagcaaatattgtggaggtggaggtgattctgaaaaatgctgtgcctttcaaaagtgcccggaaggcagtggatgaggaagaggaagcagttgaagaacgtcgcaatatgcgaactatctgggtgactggcagaaaaggtttaactgaaagggaagcagcagcccttatagtggaagaagccagaatgattctgcagcaggacttagttgaaatgggagtgcaatggaatccatgtgccctgttacattctagtacatgctcattgactcatagtgagtccgaagtaaaggaacayacatttatatcccaaactaagagttcttataaaaaattaacatcaaagaacaaaagtaacacaatatttagtgattcttatattaagcattcaccaaatatagtgcaagacttaaayaaargtagagmgcatacaagttcctttaattgtaatttccagaatgggaatcaagaacatcagasatgttccattttcagagcaagaaaacgggcctctttagatataaataaagagaagccaggagcctctcagaatgaggggaaaacaagtgataagaaagttgttcagactttttcacagaaaacaaaaaaggcacctttgaatttcaattcagaaaagatgagcagaagttttcgatcttggaaacgtagaaagcatctaaagcgrtctagggacagcagccycctgaaagactctggagcgtgtagaatccatttacaaggacagactctgtctaatcctagtctttgtgaagacccgtttaccttagatgagaagaaaacggaatttagaaattcagggccatttgctaaaaatgtatctttgagtggtaaggaaaaagataataaaacatcattcccattacaaataaagcaaaattgttcatggaacataacactaactaatgataattttgtggagcatattgtcacaggatctcagagtaaaaatgtgacttgtcaggccactagtgtggttagtgaaaagggcagaggagtagctgttgaggcagaaaaaataaatgaagtgctgatacaaaatggttcaaaaaaccagaatgtttatatgaaacaccatgacatccatccaattaaccagtacctgcgaaagcaatctcrtgaacagacaagcactattaccaaacagaaaaatataatagagagacaaatgccctgtgaagcagtcagtagttacataaatagagactcaaatgttactatcaattgtgaaaggataaagcttaatacagaggaaaataaaccaagtcattttcaggcattagragrtgatataagcagaactgtgatacccagtgaagtacttccatcagctggagcatttagcaaatcagaaggccagcatgagaattttctaaatatttctagactacaagaaaaaacaggtacttatacaacaaacaaaactaaaaataatcatgtttctgacttaggtttagtcctctgtgattttgaagatagtttctatctggatactcagtcagagaaaataatacaacagatggcaactgaaaaygccaaactaggagcaaaggacaccaacctggcagcagggataatgcagaagagcttagtccaacagaactcaatgaactcttttcagaaggagtgtcacattccttttcctgctgaacagcacmctctaggagcgactaagatagatcatttggaccttaagactgtaggtactatgaaacaaagcagtgattcacatggggttgatatcctgactccagaaagcccgattttccattctccaatactattggaggaaaatggtctttttttaaaaaagaatgaagtttctgttactgattcacaattaaatagttttcttcaaggttatcaaacacaagaaactgtgaaaccagttatacttctgattcctcaaaagagaactcccactggtgtagaaggagaatgtcttccagttcctgaaacaagtttgaatatgagtgatagtttactatttgatagcttcagtgatgactatctagtaaaagaacaattacctgataygcaaatgaaagaaccccttccttcagaagtaacatcaaaccattttagtgattctctgtgtctacaagaagacctaattaaaaaatcaaatgtaaatgagaatcaagatacccamcagcagttgacttgttccaatgatgaatctattatattttcagaaatgkattctgttcakatggttgaagctttggacaatgtggatatatttcctgtccaagagaagaatcatactgtagtatctcctagagcattagaactaagtgatccagtacttgatgagcaccaccaaggtgatcaagatggaggagatcaagatgaaagggctgaaaaatcaaaattaactgggaccaggcaaaatcattcattcatatggtcaggggcatcatttgatctaagtccaggactgcaaaggattttagataaagtatccagtcctctagaaaatgaaaagctaaaatcaatgactataaacttttccagtttgaatagaaaaaatacagagttaaatgaagaacaagaagttatttcaaacttggagacaaaacaagtgcagggaatttcattttcttctaataatgaagtaaaaagcaagattgagatgctagaaaacaatgccaatcatgatgaaacctcatccctcttacctcgtaaagaaagtaatatagttgatgataatggtctcattcctcctacacccattccaacatctgcttctaagctgacatttccakggattcttgaaacacctgtaaacccttggaaaactaataatgttttacaacctggtgaaagttatttatttggctcaccttcagatattaaaaaccackatttaagtccagggagtagaaatgggttcaaagacaacagccctwttagtgacacaagcttttcacttcagttatcacaggatggattacagttaactccagcctcaagcagttcagaaagtttgtccataattgatgtagcaagtgaccaaaatcttttccaaacattcattaaggagtggcggtgcaaaaagcgattttccatctcactggcttgtgaaaagattagaagtttgacatcttctaaaactgctactattggcagtaggtttaagcaagctagctcacctcaggaaattcctattagagatgatggatttcccattaaaggttgtgatgacaccttggtggttggactggcagtatgctggggtggaagggatgcctattatttttcactgcagaaggaacaaaagcattctgaaattagtgccagtttggttccaccttctttagatccaagcctgactttgaaagacaggatgtggtaccttcaatcttgcttgcraaaggaatctgataaagaatgttctgttgtcatctatgacttcatccagagctataaaattcttcttctttcttgtggcatctccttggagcaaagttatgaagatcctaaggtggcatgctggttactagatccagattctcaggagccgactcttcatagcatagttaccagttttcttcctcatgagcttccactcctagaagggatggagaccagccaagggattcaaagcctggggctaaatgctggcagtgagcattctgggcgatacagagcatctgtggagtccattctcatcttcaactctatgaatcagctcaactctttgttgcagaaggaaaaccttcaagatgttttccgtaaggtggaaatgccctctcagtactgcttggccttgctagaactaaatggaattggctttagtactgcagaatgtgaaagtcagaaacatataatgcaagccaagctggatgcaattgagacccaggcctatcaactagctggccacagtttttctttcaccagttcagatgacatcgctgaggttttatttttggaattgaagttgcccccaaatagagagatgaaaaaccaaggcagcaagaaaactctgggttctaccagaagagggattgacaatggacgcaagctaaggctgggaagacagttcagcactagtaaggacrttttaaataaattaaaggcattacatcctttaccaggcttgatattagaatggagaagaatcactaatgctattaccaaagtggtctttccccttcagcgggaaaagtgtcttaatccttttcttggaatggaaagaatctatcctgtatcacagtcgcacactgctacaggacgaataacctttacagaaccaaatattcagaatgtgccaagagattttgaaatcaaaatgccaacactagtaggagaaagcccaccttctcaagctgtaggcaaaggcctacttcccatgggcagaggaaaatataagaagggtttcagcgtgaatcctagrtgccaggcacagatggaggagagagctgyagacagaggaatgccattttcaattagcatgcgacatgcctttgtgcctttcccaggtggttcaatactggctgctgactactctcagcttgaactgaggatcttggctcatttatcccatgatcgtcgtctcattcaagtgttaaacactggagctgatgttttcaggagcattgcagcagagtggaagatgattgagccagagtctgttggggatgatctgaggcagcaggcaaaacagatttgctatgggatcatttatggaatgggagctaaatctttgggagagcagatgggcattaaagaaaatgatgctgcatgctatattgactccttcaaatccagatacacagggattaatcaattcatgacagagacagtraagaattgtaaaagagacggatttgttcagaccattttgggaaggcgtagatatttgccaggaatcaaagacaacaacccttatcgtaaagctcacgctgagcgtcaagctatcaacacaatagtccaaggatcagcagctgatattgtcaaaatagccacagttaacattcagaagcaattagagaccttccactcaaccttcaaatcccatggtcatcgagagggtatgctccaaagtgaccraacaggattgtcacgaaagagaaaactgcaagggatgttctgcccaatcagaggaggcttcttcatccttcaastccatgatgaactcctatatgaagtggyagaagaagatgttgttcaggtagctcagattgtcaagaatgaaatggaaagtgctgtaaaactgtctgtgaaattgaaagtgaaagtgaaaataggcgccagctggggagagctaaaggactttgatgtgtaactgtgctgttgatgaagtcctcccagggaagcctgtgcagatgcagtcacctggaaagaacagagattaccctttcacctacctcagcaaaacaaactttcaagtcttgatagacttagcctagtaattttatagtgagagtttcaaactatatatcagtgtctatagcatcaaaaacttctgggggcgtgggggaagtagaataccaagtataatagttacattcactttcaaagagcatctatgaatttgccttttgtaacttactgtggctttaaacatattcagaacagatgcttgaaatatgcacttagcactttggttccacatctgtctgggtaaaccatgaagaaaatgaagctgctgcctcaatcgacccagacagcagccataggcagataaagatttggtttcaccctggtggtggtaggcatcgtgtgtgactttttttcctctaatatcaattttacagtacggaaatagtattttaaaatagtattggctaataaattatgaattctataaagtagtaagacttggtatggttggagtgtaggaatgaatattcatgaaatgtttcttattgcttttccttccctaattcatacaatgaatgtatttggaatacttacatattataaaataaactatacctcttcaagaggtatcctgttctgtaagatcagatgtttttattgcaggtcaatataatactgccagagacagaaaatacccccttatcagtcccttagtgcctctttctgtttgtggcatggtgagaaaacccatgctgaaaagattgtactttgtgatcccaatcagagggatggagctaatctttttgctgttgaaataaaatgaatttatgagaaactttatatcaacaa

SEQ ID NO: 3589 - DNA, 9065 bp, Homo sapiens
atgaatggycaccgttttacgttcagaactcgttcgcttctacctttacaaaagggacaacacagatgcattactaagctcttggctcataacgatccctggggtatattcagagccccttcctcgcggcgttcatatagtgtctcaggggtctgtcagccagcaatccccaattcctcattacatattcctcacaatgcatgctggctaaaatggaaattgtgttcagaaatagccctgccctaccatcatatactaggagaaaggaggaaattatgctctattagaaagtttgagtttgaagactggcgggaagatgtccgcagctgttgccaggccagggttctcccgagagggaggacgctgggactstggcttgccctgatcggccgagaagagtttgccatgaatcttctgcgtcggagtgggaaacggcggcgttcagaatcaggctcagattcgttctcgggaagcggcggtgacagcagtgccagcccccagttcctctccgggtccgtgctgagcccgccgcccggccttggtcgctgcctgaaggccgcagctgcaggagaatgcaagcctacagttcctgactacgaaakagacaagctactattggcaaactggggacttcctaaagcagttctggaaaaataccacagttttggtgtaaaaaagatgtttgaatggcaggcagagtgccttttgcttggacaagtcctggaaggaaagaatttagtttattcagctcctacaagtgctgggaagactcttgtggcagaattacttattttgaagcgggttttggaaatgcggaagaaagctttgtttattcttccctttgtttctgtggctaaagagaagaaatactacctccagagtctgtttcaggaagtaggaataaaagtagacggttatatgggcagcacctctccatcaaggcatttytcttcattggatattgcagtctgcacaattgagagagccaatggtctgatcaatcgcctcatagaggaaaataagatggatctgttaggaatggtggttgtggatgaattacatatgctgggagactctcaccgagggtatctgctggaacttttgctgaccaagatttgctatattactcggaaatcagcatcttgtcaggcagatctagccagttctctgtctaatgctgtgcaaatcgttggcatgagtgctacccttcctaatttggagcttgtggcttcctggttgaatgctgaactctaccataccgactttcgccctgtaccgcttttggagtcagtaaaagttggaaattccatatatgactcttcaatgaaacttgtgagggaatttgagcccatgctacaagtgaagggagatgaggaccatgttgttagtttatgttatgagacgatttgtgataaccattcagtattacttttttgtccatcaaagaaatggtgtgagaagctggcagatatcattgctcgagagttttataatctacatcatcaagctgagggattggtgaaaccctctgaatgcccaccagtaattctggaacaaaaagaactcctggaagtgatggatcagttaagacgtttgccttcaggactggactctgtattacagaaaactgtaccatggggagtagcatttcatcatgcaggtcttacttttgaggagagggatatcattgaaggagcctttcgtcaaggtctcattcgggtcttggcrgcaacttctactctttcttctggggtgaatttacctgcacgtcgtgtgattattcgaacccctatttttggtggtcgacctctagatattcttacttataagcagatggttggycgtgctggcaggaaaggagtggacacagtaggcgagagtatcttaatttgtaagaactctgagaaatcaaaaggcatagctctccttcagggttctctaaagcctgttygcagctgtctgcaaagacgagaaggagaagaagtaactggcagcatgatacgagctattctggagataatagttggtggagtggcaagtacatcacaagatatgcatacttatgctgcctgcacatttttggctgcaagtatgaaagaagggaagcaaggaattcagagaaatcaagagtctgttcagcttggagygattgaggcctgtgtgatgtggctactagaaaatgaattcatccagagtacagaagccagtgatggaacagaaggaaaggtgtatcatccaacacatcttggttcggccactctttcttcttcactttctccagctgatactttagatatttttgctgacctgcaaagagcaatgaagggctttgttttagagaatgatcttcatattctctatctggttacacctatgtttgaggattggactactattgattggtatcgatttttctgtttatgggagaagttgccaacttcaatgaaaagggtggcagagctagtgggagttgaagaggggttcttggcccgttgtgtgaaaggaaaagtagtagccagaactgagagacagcatcgacaaatggccatccataaaaggtttttcaccagtcttgtgctattagatttaatcagtgaagttcccttaagggaaataaatcagaaatatggatgcaatcgtgggcagattcaatctttgcaacagtcagctgctgtttatgcagggatgattacagtattttccaaccgtctgggctggcacaacatggaactactactttcccaatttcagaagcgtcttacgtttggcatccagagggagctgtgtgacctggttcgggtatccttactaaatgctcagagagccagggttctctatgcttctggctttcatactgtggcagaccttgctagagcaaatattgtggaggtggaggtgattctgaaaaatgctgtgcctttcaaaagtgcccggaaggcagtggatgaggaagaggaagcagttgaagaacgtcgcaatatgcgaactatctgggtgactggcagaaaaggtttaactgaaagggaagcagcagcccttatagtggaagaagccagaatgattctgcagcaggacttagttgaaatgggagtgcaatggaatccatgtgccctgttacattctagtacatgctcattgactcatagtgagtccgaagtaaaggaacayacatttatatcccaaactaagagttcttataaaaaattaacatcaaagaacaaaagtaacacaatatttagtgattcttatattaagcattcaccaaatatagtgcaagacttaaayaaargtagagmgcatacaagttcctttaattgtaatttccagaatgggaatcaagaacatcagasatgttccattttcagagcaagaaaacgggcctctttagatataaataaagagaagccaggagcctctcagaatgaggggaaaacaagtgataagaaagttgttcagactttttcacagaaaacaaaaaaggcacctttgaatttcaattcagaaaagatgagcagaagttttcgatcttggaaacgtagaaagcatctaaagcgrtctagggacagcagccycctgaaagactctggagcgtgtagaatccatttacaaggacagactctgtctaatcctagtctttgtgaagacccgtttaccttagatgagaagaaaacggaatttagaaattcagggccatttgctaaaaatgtatctttgagtggtaaggaaaaagataataaaacatcattcccattacaaataaagcaaaattgttcatggaacataacactaactaatgataattttgtggagcatattgtcacaggatctcagagtaaaaatgtgacttgtcaggccactagtgtggttagtgaaaagggcagaggagtagctgttgaggcagaaaaaataaatgaagtgctgatacaaaatggttcaaaaaaccagaatgtttatatgaaacaccatgacatccatccaattaaccagtacctgcgaaagcaatctcrtgaacagacaagcactattaccaaacagaaaaatataatagagagacaaatgccctgtgaagcagtcagtagttacataaatagagactcaaatgttactatcaattgtgaaaggataaagcttaatacagaggaaaataaaccaagtcattttcaggcattagragrtgatataagcagaactgtgatacccagtgaagtacttccatcagctggagcatttagcaaatcagaaggccagcatgagaattttctaaatatttctagactacaagaaaaaacaggtacttatacaacaaacaaaactaaaaataatcatgtttctgacttaggtttagtcctctgtgattttgaagatagtttctatctggatactcagtcagagaaaataatacaacagatggcaactgaaaaygccaaactaggagcaaaggacaccaacctggcagcagggataatgcagaagagcttagtccaacagaactcaatgaactcttttcagaaggagtgtcacattccttttcctgctgaacagcacmctctaggagcgactaagatagatcatttggaccttaagactgtaggtactatgaaacaaagcagtgattcacatggggttgatatcctgactccagaaagcccgattttccattctccaatactattggaggaaaatggtctttttttaaaaaagaatgaagtttctgttactgattcacaattaaatagttttcttcaaggttatcaaacacaagaaactgtgaaaccagttatacttctgattcctcaaaagagaactcccactggtgtagaaggagaatgtcttccagttcctgaaacaagtttgaatatgagtgatagtttactatttgatagcttcagtgatgactatctagtaaaagaacaattacctgataygcaaatgaaagaaccccttccttcagaagtaacatcaaaccattttagtgattctctgtgtctacaagaagacctaattaaaaaatcaaatgtaaatgagaatcaagatacccamcagcagttgacttgttccaatgatgaatctattatattttcagaaatgkattctgttcakatggttgaagctttggacaatgtggatatatttcctgtccaagagaagaatcatactgtagtatctcctagagcattagaactaagtgatccagtacttgatgagcaccaccaaggtgatcaagatggaggagatcaagatgaaagggctgaaaaatcaaaattaactgggaccaggcaaaatcattcattcatatggtcaggggcatcatttgatctaagtccaggactgcaaaggattttagataaagtatccagtcctctagaaaatgaaaagctaaaatcaatgactataaacttttccagtttgaatagaaaaaatacagagttaaatgaagaacaagaagttatttcaaacttggagacaaaacaagtgcagggaatttcattttcttctaataatgaagtaaaaagcaagattgagatgctagaaaacaatgccaatcatgatgaaacctcatccctcttacctcgtaaagaaagtaatatagttgatgataatggtctcattcctcctacacccattccaacatctgcttctaagctgacatttccakggattcttgaaacacctgtaaacccttggaaaactaataatgttttacaacctggtgaaagttatttatttggctcaccttcagatattaaaaaccackatttaagtccagggagtagaaatgggttcaaagacaacagccctwttagtgacacaagcttttcacttcagttatcacaggatggattacagttaactccagcctcaagcagttcagaaagtttgtccataattgatgtagcaagtgaccaaaatcttttccaaacattcattaaggagtggcggtgcaaaaagcgattttccatctcactggcttgtgaaaagattagaagtttgacatcttctaaaactgctactattggcagtaggtttaagcaagctagctcacctcaggaaattcctattagagatgatggatttcccattaaaggttgtgatgacaccttggtggttggactggcagtatgctggggtggaagggatgcctattatttttcactgcagaaggaacaaaagcattctgaaattagtgccagtttggttccaccttctttagatccaagcctgactttgaaagacaggatgtggtaccttcaatcttgcttgcraaaggaatctgataaagaatgttctgttgtcatctatgacttcatccagagctataaaattcttcttctttcttgtggcatctccttggagcaaagttatgaagatcctaaggtggcatgctggttactagatccagattctcaggagccgactcttcatagcatagttaccagttttcttcctcatgagcttccactcctagaagggatggagaccagccaagggattcaaagcctggggctaaatgctggcagtgagcattctgggcgatacagagcatctgtggagtccattctcatcttcaactctatgaatcagctcaactctttgttgcagaaggaaaaccttcaagatgttttccgtaaggtggaaatgccctctcagtactgcttggccttgctagaactaaatggaattggctttagtactgcagaatgtgaaagtcagaaacatataatgcaagccaagctggatgcaattgagacccaggcctatcaactagctggccacagtttttctttcaccagttcagatgacatcgctgaggttttatttttggaattgaagttgcccccaaatagagagatgaaaaaccaaggcagcaagaaaactctgggttctaccagaagagggattgacaatggacgcaagctaaggctgggaagacagttcagcactagtaaggacrttttaaataaattaaaggcattacatcctttaccaggcttgatattagaatggagaagaatcactaatgctattaccaaagtggtctttccccttcagcgggaaaagtgtcttaatccttttcttggaatggaaagaatctatcctgtatcacagtcgcacactgctacaggacgaataacctttacagaaccaaatattcagaatgtgccaagagattttgaaatcaaaatgccaacactagtaggagaaagcccaccttctcaagctgtaggcaaaggcctacttcccatgggcagaggaaaatataagaagggtttcagcgtgaatcctagrtgccaggcacagatggaggagagagctgyagacagaggaatgccattttcaattagcatgcgacatgcctttgtgcctttcccaggtggttcaatactggctgctgactactctcagcttgaactgaggatcttggctcatttatcccatgatcgtcgtctcattcaagtgttaaacactggagctgatgttttcaggagcattgcagcagagtggaagatgattgagccagagtctgttggggatgatctgaggcagcaggcaaaacagatttgctatgggatcatttatggaatgggagctaaatctttgggagagcagatgggcattaaagaaaatgatgctgcatgctatattgactccttcaaatccagatacacagggattaatcaattcatgacagagacagtraagaattgtaaaagagacggatttgttcagaccattttgggaaggcgtagatatttgccaggaatcaaagacaacaacccttatcgtaaagctcacgctgagcgtcaagctatcaacacaatagtccaaggatcagcagctgatattgtcaaaatagccacagttaacattcagaagcaattagagaccttccactcaaccttcaaatcccatggtcatcgagagggtatgctccaaagtgaccraacaggattgtcacgaaagagaaaactgcaagggatgttctgcccaatcagaggaggcttcttcatccttcaastccatgatgaactcctatatgaagtggyagaagaagatgttgttcaggtagctcagattgtcaagaatgaaatggaaagtgctgtaaaactgtctgtgaaattgaaagtgaaagtgaaaataggcgccagctggggagagctaaaggactttgatgtgtaactgtgctgttgatgaagtcctcccagggaagcctgtgcagatgcagtcacctggaaagaacagagattaccctttcacctacctcagcaaaacaaactttcaagtcttgatagacttagcctagtaattttatagtgagagtttcaaactatatatcagtgtctatagcatcaaaaacttctgggggcgtgggggaagtagaataccaagtataatagttacattcactttcaaagagcatctatgaatttgccttttgtaacttactgtggctttaaacatattcagaacagatgcttgaaatatgcacttagcactttggttccacatctgtctgggtaaaccatgaagaaaatgaagctgctgcctcaatcgacccagacagcagccataggcagataaagatttggtttcaccctggtggtggtaggcatcgtgtgtgactttttttcctctaatatcaattttacagtacggaaatagtattttaaaatagtattggctaataaattatgaattctataaagtagtaagacttggtatggttggagtgtaggaatgaatattcatgaaatgtttcttattgcttttccttccctaattcatacaatgaatgtatttggaatacttacatattataaaataaactatacctcttcaagaggtatcctgttctgtaagatcagatgtttttattgcaggtcaatataatactgccagagacagaaaatacccccttatcagtcccttagtgcctctttctgtttgtggcatggtgagaaaacccatgctgaaaagattgtactttgtgatcccaatcagagggatggagctaatctttttgctgttgaaataaaatgaatttatgagaaactttatatcaacaa

SEQ ID NO: 3590 - DNA, 2483 bp, Homo sapiens
cgcaagcttcgcctcttgggttcatgccattctcctgcctcagcctcccaagtagctgggactacaggcgcctgccaccagcctggctaatttttttgtatttttagtagagacggggtttcaccgtgttaaccaggatggtctccatctccagacctcgtgatccgccygcctcggactcccaaagtgctgggattacaggcatgagccaccgcgcccggtggcttgcatgttttcttaaaaagctacagaaatttccaaatatcttctttcagataatagttggtggagtggcaagtacatcacaagatatgcatacttatgctgcctgcacatttttggctgcaagtatgaaagaagggaagcaaggaattcagagaaatcaagagtctgttcagcttggagygattgaggcctgtgtgatgtggctactagaaaatgaattcatccagagtacagaagccagtgatggaacagaaggtaagtgtgacttctcagttgcaatttactcactttttcttctttagtgaggktgtatgactgctcagtgaatggaaattgtcttttcatgtagtataaaaggaatttgattttttgagcagtgtatcaactcatttttagtaaatcagtattgtatttagcaacttcagaccattatgatagagcctgctcatacattttcatgctctggataaggtactatttgtaaaatttatcagccgggagggttagcatggaaaacagaaagatagtattttgttttattttattttgaatgtttgttcctctgtttcctcaccctaaccctaaaccaggaaaggtgtatcatccaacacatcttggttcggccactctttcttcttcactttctccagctgatactttagatatttttgctgacctgcaaagagcaatgaagggctttgttttagagaatgatcttcatattctctatctggtaagttstgttttaacarttatgtttgtgaaaatagggagaaaaaaatagatatataatcctgaacatcaaagataccctaacagaacatctcgtctgttttccatgcctaggttagtactggtgggaatagagaagaggtaagaagataattgttttaaagtaataatctaaatgttctagttacctttaaatttattttctccaacctcctttcaaaaaagatttgagttgttttataaaaaatatatatttttacaacgtataaaagaacagcaaagaaaaatgggatatcagaaaattaaagatcggatcatgatgtaaaactcaagcaaaggtcagtacacaaacatgcgtgccattaagtcatgtccaatgctgttgtcaactttgattctgggttttctagcaactaaaagaaagaggaaagcttgattagtgttaatattcataagataaaaaacaaaacaagtttaggaaaaacattgcatttccctgcctaagagaaatttagtcctaaaaggatactttggaacttaacattgtttgataaaaatctctataataaatgcaataaggaattttaagtttgtttatattagacaatgctctgtgaatattattttgtataacaaagatattaataagaattggatagtgtttaaggtcatgttctctggcaagaacctgatcagaaataattaattttgtcagttaagagcagatgcatgcattttgataagcaagtgataaggggaggtgagtaaaattgaaattctcattagaatgaagggggcttatcaggaaatgtgtttcaataaaaatcgctatgtagtgagcagaggggaaatgtctagacagtaccaattttcttttattacaaactcgcataatacatgggtgataataggctcaaaggtctgtgcccaagaatgtggctgggaggaatctcaaagcaggtttcaccggtcatctatcatggccttaaaaataagtcatttattatacagtggctragattgtgggctctaggatcagactgccttagttcaacttttggcctcatcacttagtaatcatataaccttgggtaagtatttaacctctcttacgattccatttcctcatttgtaaaatggagataataatacccacctcagggctgatagtctttgatgaatgtttggtatctgaataaatgtttaataacatctattatttctagtaaattctcccataaacattatgtaagtcatttgccaaattacctaactactcctactcctgttccctctctaaaacgtgaagactgttggcagtgttagtatgctgaatgcttgtggttagtggtcttgtatacttctctcaccattcgagttgtatgcccttcaagagttagttgtgttcccaaacttgttcatgtcagtttgcttctgagaaaattaggctgaggcagaaggatcacctgagtccaggaatttgagaccagcatgggaaacagagcaagaatctgtcgctaccaaac

SEQ ID NO: 3591 - DNA, 2303 bp, Homo sapiens
aggcagtaatcgttctggtcactgggacacagctgccctcgcccattctaaaaagtcagcaccctcaggcccgcrggtaaccacctcctcctgagcayggtgaccagcttagaagcaaaattaagagactcatcagattctgagctgctgcgggatattttgcagaagactgtgaagcatcctgtgtgtgtgaagcacccgccatcagtcaagtgtgcccagtgctttctctcagaactcatcaaaaatccctcggaaggctcggtcacactctccgagcacagccatcatctcccacggtaccacaggcctggtcacatgggacgctgcccgctaccttgcagaatgggccatcaagaacctggcagccttcactaacaggactgtcctagagcttggcagtggcgccggccttacaggcctgtccatctgcaagatgtgccacccccggacatacatcttcagcgactgtcacagccgggtcctcgagcagctccgagggaatgtccttctcaatggcctctcattagaggcagacatcactgccaacttagatagccccagggtgacagtggcccagctggactgggaygtagygacggtccatcagctctstgccttccagccagatgttgtcattacagcagacgtgctgtattgcccagaagccatcgtgtccctggtcggggtcctgcggaggctggctgcctgctgggagcaccagygggctcctgaggtctacatggcctttaccgtccgcaacccagagacgtgccagstgttcaccaccgagctaggctgggctgggatcagatgggaagcggaagctcatcatgaccagaaactgtttccctatggagagcacttggagatggcaatgctgaacctcacactgtaggactcatacacgactccaacgggattgttagaatcaaatcactctcgtgggaagaatttttatatgggaaagcggataaaactttcattggactggaatgtttggagaatgttaaattccaaatcaggaaccacaatctgccctctaataagacatcggctatctaagcatgtgggtgccccctttctgccagcagttctggttcttaagaaaatcaccataaatcagacatgaaaattctggctccaaaaatagcattttctttgtgcaaataaaaacgtgtgtatcaagtatgaygttcccccaacgtggacaacactcggttcctcacaaagccaagctcgctgcagctgccacatccctggacacattcggttcctcacaaagccaagcccgcggcagctgccacatccctggacacactcggttcctcacaaagccaagcccgctgcagctgccacatccctgggcttrtggtgcagcaggtgcttttctcaagacaggaatcaaagtgttaggaacatggcagaaaggtgacacctggagaccaaatgcaggatgaggagtactgcagaggtcacagggaagtcacagaacagtaatacgctagcagggacatggggcgtgaagaacagaagaagacaggaagcatttctgagactccaaagaagaaatcagggccaaccacagcttcccgggtcattcaccaggtggcaccactgccgtcatttcagcttctggccactgggaggcgctgcttgaaagggtttgccctgagactccaaraagaarctgcgggaaggacagcaggggccctggggttttagcctctggcccaggagttatgtgtccataaccaaagggagcacagtctgcacccagctctcatcccatcagagctgctgcgactcccgcaggttcttccggaactggtttagcttgccttcaggatcaggaaagtttgagaaaagcatctgcaaaatactgaagagcagagcttacctcattgcctgtccccaccccatcccaggtcaccacctggmtgaccccagstccccgacccaacaacaamccctcccaagtccctagctccctcacttggacttgagacccttcacaccccagcacatgctttctggaaacttccccgtatgtcccactttcccacacttggtgccctggagcacctyccggcctctacrtgatgtmcgttcmcctgygagcaccctcctctyrgcctctggccaacacagtcccacccatctgtgggtaacaaggwgksgttcttttcagccttgctaaactgtctgaatcaaggatcacaaactacagcctgcaggccaaakccagcccacagcctgtgtttgtaaataaagctttrttggaacaaagccacaccccttaa

SEQ ID NO: 3592 - DNA, 1990 bp, Homo sapiens
ggccccgcccacgtcatggcgcctgaggagaacgcgggtaccaaactcttgctgcagagtttcgagcgccgcttcctagcggcgcgcacactgcgctccttcccctggcagcttagaagcaaaattaagagactcatcagattctgagctgctgcgggatattttgcagaagcaygaggctgtccacacggagcttttggacgagctgtacgaggcgctggcrgagaccctgatggccaaggagtccacccagggccactggagctatttgctgacgtgctgtattgcccagaagccatcgtgtccctggtcggggtcctgcggaggctggctgcctgctgggagcaccagygggctcctgaggtctacatggcctttaccgtccgcaacccagagacgtgccagstgttcaccaccgagctaggctgggctgggatcagatgggaagcggaagctcatcatgaccagaaactgtttccctatggagagcacttggagatggcaatgctgaacctcacactgtaggactcatacacgactccaacgggattgttagaatcaaatcactctcgtgggaagaatttttatatgggaaagcggataaaactttcattggactggaatgtttggagaatgttaaattccaaatcaggaaccacaatctgccctctaataagacatcggctatctaagcatgtgggtgccccctttctgccagcagttctggttcttaagaaaatcaccataaatcagacatgaaaattctggctccaaaaatagcattttctttgtgcaaataaaaacgtgtgtatcaagtatgaygttcccccaacgtggacacactcggttcctcacaaagccaagcccgctgcagctgccacatccctggacacactcggttcctcacaaagccaagctcgctgcagctgccacatccctggacacattcggttcctcacaaagccaagcccgcggcagctgccacatccctggacacactcggttcctcacaaagccaagcccgctgcagctgccacatccctgggcttrtggtgcagcaggtgcttttctcaagacaggaatcaaagtgttaggaacatggcagaaaggtgacacctggagaccaaatgcaggatgaggagtactgcagaggtcacagggaagtcacagaacagtaatacgctagcagggacatggggcgtgaagaacagaagaagacaggaagcatttctgagactccaaagaagaaatcagggccaaccacagcttcccgggtcattcaccaggtggcaccactgccgtcatttcagcttctggccactgggaggcgctgcttgaaagggtttgccctgagactccaaraagaarctgcgggaaggacagcaggggccctggggttttagcctctggcccaggagttatgtgtccataaccaaagggagcacagtctgcacccagctctcatcccatcagagctgctgcgactcccgcaggttcttccggaactggtttagcttgccttcaggatcaggaaagtttgagaaaagcatctgcaaaatactgaagagcagagcttacctcattgcctgtccccaccccatcccaggtcaccacctggmtgaccccagstccccgacccaacaacaamccctcccaagtccctagctccctcacttggacttgagacccttcacaccccagcagcgctccgcctccatcttgacatgctttctggaaacttccccgtatgtcccactttcccacacttggtgccctggagcacctyccggcctctacrtgatgtmcgttcmcctgygagcaccctcctctyrgcctctggccaacacagtcccacccatctgtgggtaacaaggwgksgttcttttcagccttgctaaactgtctgaatcaaggatcacaaactacagcctgcaggccaaakccagcccacagcctgtgtttgtaaataaagctttrttggaacaaagcc

SEQ ID NO: 3593 - DNA, 1714 bp, Homo sapiens
gccccgcccacgtcatggcgcctgaggagaacgcgggtaccaaactcttgctgcagagtttcgagcgccgcttcctagcggcgcgcacactgcgctccttcccctggcagacgtgctgtattgcccagaagccatcgtgtccctggtcggggtcctgcggaggctggctgcctgctgggagcaccagygggctcctgaggtctacatggcctttaccgtccgcaacccagagacgtgccagstgttcaccaccgagctaggctgggctgggatcagatgggaagcggaagctcatcatgaccagaaactgtttccctatggagagcacttggagatggcaatgctgaacctcacactgtaggactcatacacgactccaacgggattgttagaatcaaatcactctcgtgggaagaatttttatatgggaaagcggataaaactttcattggactggaatgtttggagaatgttaaattccaaatcaggaaccacaatctgccctctaataagacatcggctatctaagcatgtgggtgccccctttctgccagcagttctggttcttaagaaaatcaccataaatcagacatgaaaattctggctccaaaaatagcattttctttgtgcaaataaaaacgtgtgtatcaagtatgaygttcccccaacgtggacaacattcggttcctcacaaagccaagcccgcggcagctgccacatccctggacacactcggttcctcacaaagccaagcccgctgcagctgccacatccctgggcttrtggtgcagcaggtgcttttctcaagacaggaatcaaagtgttaggaacatggcagaaaggtgacacctggagaccaaatgcaggatgaggagtactgcagaggtcacagggaagtcacagaacagtaatacgctagcagggacatggggcgtgaagaacagaagaagacaggaagcatttctgagactccaaagaagaaatcagggccaaccacagcttcccgggtcattcaccaggtggcaccactgccgtcatttcagcttctggccactgggaggcgctgcttgaaagggtttgccctgagactccaaraagaarctgcgggaaggacagcaggggccctggggttttagcctctggcccaggagttatgtgtccataaccaaagggagcacagtctgcacccagctctcatcccatcagagctgctgcgactcccgcaggttcttccggaactggtttagcttgccttcaggatcaggaaagtttgagaaaagcatctgcaaaatactgaagagcagagcttacctcattgcctgtccccaccccatcccaggtcaccacctggmtgaccccagstccccgacccaacaacaamccctcccaagtccctagctccctcacttggacttgagacccttcacaccccagcacatgctttctggaaacttccccgtatgtcccactttcccacacttggtgccctggagcacctyccggcctctacrtgatgtmcgttcmcctgygagcaccctcctctyrgcctctggccaacacagtcccacccatctgtgggtaacaaggwgksgttcttttcagccttgctaaactgtctgaatcaaggatcacaaactacagcctgcaggccaaakccagcccacagcctgtgtttgtaaataaagctttrttggaacaaagccacaccccttaa

SEQ ID NO: 3594 - DNA, 1574 bp, Homo sapiens
cgcttccggaaaggatcacgccgaaggccgcacttcatagtctccgacgcacctccaarccctttctcctgctctaggcccagcgccttggacgtgcacagtagatccctcccggcttcccggcttcccgtctcgtcaccctctgctcagaacctgaggacgcagccatggagcggtcggccttcatggagctggatgctgggagcaggctggtgatgcatctccgcgagtggccagccctgctggtcagcagcacgggctggacagagtttgaacaacttactcttgatggacacaaccttccttctcttgtctgtgtgataacagggtcggtggacctgggtgtctgtctgcacatgtcctccagtggcctggacctgcccatgaaggtggtggacatgttcgggtgctgtttgcctgtgtgtgccgtgaacttcaagtgtttacatgagctggtgaaacatgaagaaaatggcctggtctttgaggactcagaggaactggcagctctgcagatgcttttctcaaactttcctgatcctgcaggcaagctaaaccagttyyggaagracctgcgggagtygcagcagctccgatgggatgagagctgggtgcagactgtgctccctttggttatggacatacaactcctgggccagaggctaaaaccccgggacccctgctgtccttcccgcagcttcttctcggagtctcagggcaaacccttttgagcagcgcctcccagtggccagaagctgaaatgacggcagtggtgccgcctggtgaatgaattggttctgtgacccgggaagctgtgcttggctctgatttcttttccggaggctcggaaacacttcctctcttcttctgttcttcatgccccatgcccctgctagcgtattactgttctgtgacttccctgtgacctctgcagtactccttatcctgcgtttggtctccaggtgtcacctttctgccgtgttcctaacattttgattcctgtcttgaaaaaagcacctgctgcatcgtaagcccagggatgtggcagctgcagcgggcttggctttgtgaagaactgagtgtgtccgcggattgtgtccacatacttgatacacacgtttttatttgcacaaagaaaatgctatttttggagccagagttttcatgtctgagtgatggcgatttccttaagaaccagaactgytggcagaaagggagcacccacacgcttagatagccgatgtcttattagagggcagtttgtagttcctgatttggaaattaacattctccaaacattccagtccagtgaaagttttatcmgctttcccatatgaaacctcttcccwtgagagtgacttgattctcacaatcccattggagtcgtgtgtgagtcctacagtgtgaggttcagcattgccatctccaagtgckcttcatagggaaacagtttctggtcatgacgaggttccacttcccatctgatcctggccyggcctggaaacagagcacatgtgtttcaggatggcagtgtttggggacaggacatgagcgtattgtgtggggctgctagg

SEQ ID NO: 3595 - DNA, 1286 bp, Homo sapiens
tctcagactgctgtgctagcaatcagtgagactccgtgggcgtaggaccctcygagccaggtgcgggatataatcttgtggtgcgccgttttttaagccggtccgaaaagcgcaatattcgggtgggagtgacccgatttcccagggctgtgaccatctatgacaagccggcatctttctttaaagagacacctctggacctgctgcaccggctcttcatgaagctgggtggcactcactctcygttcagggcctgctcagaacctgaggacgcagccatggagcggtcggccttcatggagctggatgctgggagcaggctggtgatgcatctccgcgagtggccagccctgctggtcagcagcacgggctggacagaggatgaagacttctccatcctgctggcagctttagaaaagtttgaacaacttactcttgatggacacaaccttccttctcttgtctgtgtgataacaggagggtcggtggacctgggtgtctgtctgcacatgtcctccagtggcctggacctgcccatgaaggtggtggacatgttcgggtgctgtttgcctgtgtgtgccgtgaacttcaagtgtttacatgagctggtgaaacatgaagaaaatggcctggtctttgaggactcagaggaactggcagctctgcagatgcttttctcaaactttcctgatcctgcaggcaagctaaaccagttyyggaagracctgcgggagtygcagcagctccgatgggatgagagctgggtgcagactgtgctccctttggttatggacatacaactcctgggccagaggctaaaaccccgggacccctgctgtccttcccgcagcttcttctcggagtctcagggcaaacccttttgagcagcgcctcccagtggccagaagctgaaatgacggcagtggtgccgcctggtgaatgaattggttctgtgacccgggaagctgtgcttggctctgatttcttttccggaggctcggaaacacttcctctcttcttctgttcttcatgccccatgcccctgctagcgtattactgttctgtgacttccctgtgacctctgcagtactccttatcctgcgtttggtctccaggtgtcacctttctgccgtgttcctaacattttgattcctgtcttgaaaaaagcacctgctgcatcgtaagcccagggatgtggcagctgcagcgggcttggctttgtgaagaactgagtgtgtccgcggatgtggcagctgcagcagtcttggctttgtgaggaaccaagt

SEQ ID NO: 3596 - DNA, 1527 bp, Homo sapiens
catcttttatgtgctgagccagtccccagggtgttgtctttacttgttccatggccatggaattaagaaaaacatgcaaaaataattcttcagtccttgaagagcatccagcacagaaggtacaaaccctccttaaggctccctcctcaaatcagtttgtccattttgatgtgcacccccccaggcctttatacccttcagatgccaagtctaagaaccagctcctggaaaccacaccccctgttccaacccccagactggcttgagcatgcggtggtggggggagcccaggtgggcaccccaggggtctggtgtcttctccaggcagctctcaggctcccttggttctctctgcagtttacatgagctggtgaaacatgaagaaaatggcctggtctttgaggactcagaggaactggcagctctgcagatgcttttctcaaactttcctgatcctgcaggcaagctaaaccagttyyggaagracctgcgggagtygcagcagctccgatgggatgagagctgggtgcagactgtgctccctttggttatggacatacaactcctgggccagaggctaaaaccccgggacccctgctgtccttcccgcagcttcttctcggagtctcagggcaaacccttttgagcagcgcctcccagtggccagaagctgaaatgacggcagtggtgccgcctggtgaatgaattggttctgtgacccgggaagctgtgcttggctctgatttcttttccggaggctcggaaacacttcctctcttcttctgttcttcatgccccatgcccctgctagcgtattactgttctgtgacttccctgtgacctctgcagtactccttatcctgcgtttggtctccaggtgtcacctttctgccgtgttcctaacattttgattcctgtcttgaaaaaagcacctgctgcatcgtaagcccagggatgtggcagctgcagcgggcttggctttgtgaagaactgagtgtgtccgcggatgtggcagctgcagcagtcttggctttgtgaggaaccaagttgtccacatacttgatacacacgtttttatttgcacaaagaaaatgctatttttggagccagagttttcatgtctgagtgatggcgatttccttaagaaccagaactgytggcagaaagggagcacccacacgcttagatagccgatgtcttattagagggcagtttgtagttcctgatttggaaattaacattctccaaacattccagtccagtgaaagttttatcmgctttcccatatgaaacctcttcccwtgagagtgacttgattctcacaatcccattggagtcgtgtgtgagtcctacagtgtgaggttcagcattgccatctccaagtgckcttcatagggaaacagtttctggtcatgacgaggttccacttcccatctgatcctggccyggcctggaaacagagcacatgtgtttcaggatggcagtgtttggggacaggacatgagcgtattgtgtggggctgctagg

SEQ ID NO: 3597 - DNA, 1612 bp, Homo sapiens
cgcttccggaaaggatcacgccgaaggccgcacttcatagtctccgacgcacctccaarccctttctcctgctctaggcccagcgccttggacgtgcacagtagatccctcccggcttcccggcttcccgtctcgtcaccctctgctcagaacctgaggacgcagccatggagcggtcggccttcatggagctggatgctgggagcaggctggtgatgcatctccgcgagtggccagccctgctggtcagcagcacgggctggacagagtttgaacaacttactcttgatggacacaaccttccttctcttgtctgtgtgataacagggtcggtggacctgggtgtctgtctgcacatgtcctccagtggcctggacctgcccatgaaggtggtggacatgttcgggtgctgtttgcctgtgtgtgccgtgaacttcaagtgtttacatgagctggtgaaacatgaagaaaatggcctggtctttgaggactcagaggaactggcagctctgcagatgcttttctcaaactttcctgatcctgcaggcaagctaaaccagttyyggaagracctgcgggagtygcagcagctccgatgggatgagagctgggtgcagactgtgctccctttggttatggacatacaactcctgggccagaggctaaaaccccgggacccctgctgtccttcccgcagcttcttctcggagtctcagggcaaacccttttgagcagcgcctcccagtggccagaagctgaaatgacggcagtggtgccgcctggtgaatgaattggttctgtgacccgggaagctgtgcttggctctgatttcttttccggaggctcggaaacacttcctctcttcttctgttcttcatgccccatgcccctgctagcgtattactgttctgtgacttccctgtgacctctgcagtactccttatcctgcgtttggtctccaggtgtcacctttctgccgtgttcctaacattttgattcctgtcttgaaaaaagcacctgctgcatcgtaagcccagggatgtggcagctgcagcgggcttggctttgtgaagaactgagtgtgtccgcggatgtggcagctgcagcagtcttggctttgtgaggaaccaagttgtccacatacttgatacacacgtttttatttgcacaaagaaaatgctatttttggagccagagttttcatgtctgagtgatggcgatttccttaagaaccagaactgytggcagaaagggagcacccacacgcttagatagccgatgtcttattagagggcagtttgtagttcctgatttggaaattaacattctccaaacattccagtccagtgaaagttttatcmgctttcccatatgaaacctcttcccwtgagagtgacttgattctcacaatcccattggagtcgtgtgtgagtcctacagtgtgaggttcagcattgccatctccaagtgckcttcatagggaaacagtttctggtcatgacgaggttccacttcccatctgatcctggccyggcctggaaacagagcacatgtgtttcaggatggcagtgtttggggacaggacatgagcgtattgtgtggggctgctagg

SEQ ID NO: 3598 - DNA, 1939 bp, Homo sapiens
cactgcggccccgcccacgtcatggcgcccgaggagaacgctgggacctaactcttgctgcagagtttgsagcgccgctttctggcggcgcgcgcrctgcgctccttcccctggcagagcttagaagcaaaattaacagactcatcagattctgagcttctgcgggatattttgcagaagactgtgaagcatcctgtgtgtgtgacgcacccgccgtcagtcaagtatgcccggtgctttctctcagaactcatcaaaaagacgtgctgtattgcccagaagccatcgtgttgctggtcggggtcctgctgaggctggctgcctgccgggagcaccagcgggctcctgaggtctatgtggcctttactgtccgcaacccagagacatgccagctgttcaccaccgagctaggccrggccaggatcagatgggaagtggaacctcgtcatgaccagaaactgtttccctatgaagmgcacttggagatggcaatgctgaacctcacactgtaggactcacacacgactccaatgggattgtgagaatcaagtcactctcawgggaagaggtttcatatgggaaagckgataaaactttcactggactggaatgtttggagaatgttaatttccaaatcaggaactacaaactgccctctaataagacatcggctatctaagcgtgtgggtgctccctttctgccarcagttctggttcttaaggaaatcgccatcactcagacatgaaaactctggctccaaaaatagcattttctttgtgcaaataaaaacgtgtgtatcaagtatgtggacacactcggttccycacaaagccaagcctgctgcagctgccacatccctggacacacttggttcctcacaaagccaagactgctgcagctgccacatccgcggacacactcagttcttcacaaagccaagcccgctgcagctgccacatccctgggcttacgatgcagcaggtgcttttttcaagacaggaatcaaaatgttaggaacacggcagaaaggtgacacctggagaccaaacgcaggataaggagtactgcagaggtcacagggaagtcacagaacagtaatacgctagcaggggcatggggcatgaagaacagaagaagagaggaagtgtttccgagcctccggaaaagaaatcagagccaagcacagcttcccgggtcacagaaccaattcattcaccaggcggcaccactgccgtcatttcagcttctggccactgggaggcgctgctcaaaagggtttgccctgagactccgagaagaagctgcgggaaggacagcaggggtcccggggttttagcctctggcccaggagttgtatgtccataaccaaagggagcacagtctgcacccagctctcatcccatcggagctgctgcractcccgcaggtycttccrraactggtttagcttgcctgcaggatcaggaaagtttgagaaaagcatctgcaaaaaaataaagagcagagcttacctcattgcctgtccccaccccatcccaggtcaccacctggctgaccccaggtccccgacccaacaacaacccctcccaagttcctaactctctcacttggactcgagactcttcacgccccagcagcgctccgcctccaacttgacatcayrstttctggaaacttccccgyatgtcccactttcccacacttggtgccctggagcacctcccggcctctaacgtgctgtatgttcccctgcgagcaccctcctcttggcctctggccaagtcccacccatctgtgggtaacaagggggtgtcggtgttcttttcagccttgctaaactctctgaatcaaggatcacaaactacagcctgcaggccaaatccagcccacagcctgtgtttgtaaataaagttttattggaacaaagccacacccctt

SEQ ID NO: 3599 - DNA, 2526 bp, Homo sapiens
tccctgcggcgctaagaaggggagactgaggctgaggctggggaacatcgggcagcatgagcggctgcgggctcttcctgcgcaccacggctgcggctcgtgcctgccggggtctggtggtctctaccgcgaaccggcggctactgcgcaccagcccgcctgtacgagctttcgccaaagagcttttcctaggcaaaatcaagaaggtaacgcgagccctgggcgaacccttgctgtctggctcccgcttttcaccctcagctgcaagactggtgttgaactttgtgagattccccaaacctgccagagagatacaccctgcggccgaggcgtgttaacactccggattcctgagttccaggaaaaccttcccagagaaaggaaagaagttttcccatttccagaagttagccaagatgaacttaatgaaatcaatcagttcttgggacccgtggaaaaattcttcactgaagaggtggactcccgaaaaattgaccaggaagggaaaatcccagatgaaactttggagaaattgaagagcctagggctttttgggctgcaagtcccagaagaatatggtggcctgggcttctccaacaccatgtactcamgactaggggagatcatcagcatggatgggtccatcactgtgaccctggcagcgcaccaggctattggcctcaaggggatcatcttggctggcactgaggagcagaaagccaaatacttgcctaaactggcgtccggggagcacattgcagccttctgcctcacggagccagccagtgggagcgatgcagcctcaatccggagcagagccacactaagtgaagacaagaagcactacatcctcaatggctccaaggtctggattactaatggaggactggccaatatttttactgtgtttgcaaagactgaggtcgttgattctgatggatcagtgaaagacaaaatcacagcattcatagtagaaagagactttggtggagtcactaatgggaaacccgaagataaaytaggcattcggggctccaacacttgtgaagtccattttgaaaacaccaagatacctgtggaaaacatccttggagaggtcggagatgggtttaaggtggccatgaacatcctcaacagcggccggttcagcatgggcagcgtcgtggctgggctgctcaagagattgattggtagaaatgactgctgagtacgcctgcacaaggaaacagtttaacaagaggctcagtgaatttggattgattcaggagaaatttgcactgatggctcagaaggcttacgtcatggagagtatgacctacctcacagcagggatgctggaccaacctggctttcccgactgctccatcgaggcagccatggtgaaggtgttcagctccgaggccgcctggcagtgtgtgagtgaggcgctgcagatcctcgggggcttgggctacacaagggactatccgtacgagcgcatactgcgtgacacccgcatcctcctcatcttcgagggaaccaatgagattctccggatgtacatcgccctgacgggtctgcagcatgccggccgcatcctgactaccaggatccatgagcttaaacaggccaaagtgagcacagtcatggataccgttggccggaggcttcgggactccctgggccraactgtggacctggggctgacaggcaaccatggagttgtgcacccyagtcttgcggacagtgccaacaagtttgaggagaacacctactgcttcggccggaccgtggagacactgctgctccgctttggcaagaccatcatggaggagcagctggtactgaagcgggtggccaacatcctcatcaacctgtatggcatgacggccgtgctgtcgcgggccagccgctccatccgcattgggctccgcaaccacgaccacgaggttctcttggccaacaccttctgcgtggaagcttacttgcagaatctcttcagcctctctcagctggacaagtatgctccagaaaacctagatgagcagattaagaaagtgtcccagcagatccttgagaagcgagcctatatctgtgcccaccctctggacaggacatgctgaggcaggggacagtgtcccctgctaccgcccrcccctacccatggcccgttgctggatgactgttactcttttttcagaaggtgttgggattatcacaggttaagccttttgttccccgtctgcacctgaagggttgtcgcctggcctgggagagcctcttccaggttttgacctgcaggcagtgctctctaacaggaccatcacagcttytgaactgagccggagagagagaatggaattgctgacccctggaactggcggggataaagaggaagaggacttggagggactggtacagcaagacctacgtttcctgtctctgccttaccccaaagaaagaactgtcagtatctttgccgytggaaggtcccagtgaagcccagagcctctgcccccagctcttggctggacacctagagatcag

SEQ ID NO: 3600 - DNA, 2375 bp, Homo sapiens
cgcggcaggtggtagccttcccgcccttctggcctctccatcccctgctgcgggggaccgcgcaagcgcagtgagtactgcacgttgtcgcgggccagtaacgtcatcagacgtgtgtgtgtccctgcggcgctaagaaggggagactgaggctgaggctggggaacatcgggcagcatgagcggctgcgggctcttcctgcgcaccacggctgcggctcgtgcctgccggggtctggtggtctctaccgcgaaccggcggctactgcgcaccagcccgcctgtacgagctttcgccaaagagcttttcctaggcaaaatcaagaagaaagaagttttcccatttccagaagttagccaagatgaacttaatgaaatcaatcagttcttgggacccgtggaaaaattcttcactgaagaggtggactcccgaaaaattgaccaggaagggaaaatcccagatgaaactttggagaaattgaagagcctagggctttttgggctgcaagtcccagaagaatatggtggcctgggcttctccaacaccatgtactcamgactaggggagatcatcagcatggatgggtccatcactgtgaccctggcagcgcaccaggctattggcctcaaggggatcatcttggctggcactgaggagcagaaagccaaatacttgcctaaactggcgtccggggagcacattgcagccttctgcctcacggagccagccagtgggagcgatgcagcctcaatccggagcagagccacactaagtgaagacaagaagcactacatcctcaatggctccaaggtctggattactaatggaggactggccaatatttttactgtgtttgcaaagactgaggtcgttgattctgatggatcagtgaaagacaaaatcacagcattcatagtagaaagagactttggtggagtcactaatgggaaacccgaagataaaytaggcattcggggctccaacacttgtgaagtccattttgaaaacaccaagatacctgtggaaaacatccttggagaggtcggagatgggtttaaggtggccatgaacatcctcaacagcggccggttcagcatgggcagcgtcgtggctgggctgctcaagagattgattgaaatgactgctgagtacgcctgcacaaggaaacagtttaacaagaggctcagtgaatttggattgattcaggagaaatttgcactgatggctcagaaggcttacgtcatggagagtatgacctacctcacagcagggatgctggaccaacctggctttcccgactgctccatcgaggcagccatggtgaaggtgttcagctccgaggccgcctggcagtgtgtgagtgaggcgctgcagatcctcgggggcttgggctacacaagggactatccgtacgagcgcatactgcgtgacacccgcatcctcctcatcttcgagggaaccaatgagattctccggatgtacatcgccctgacgggtctgcagcatgccggccgcatcctgactaccaggatccatgagcttaaacaggccaaagtgagcacagtcatggataccgttggccggaggcttcgggactccctgggccraactgtggacctggggctgacaggcaaccatggagttgtgcacccyagtcttgcggacagtgccaacaagtttgaggagaacacctactgcttcggccggaccgtggagacactgctgctccgctttggcaagaccatcatggaggagcagctggtactgaagcgggtggccaacatcctcatcaacctgtatggcatgacggccgtgctgtcgcgggccagccgctccatccgcattgggctccgcaaccacgaccacgaggttctcttggccaacaccttctgcgtggaagcttacttgcagaatctcttcagcctctctcagctggacaagtatgctccagaaaacctagatgagcagattaagaaagtgtcccagcagatccttgagaagcgagcctatatctgtgcccaccctctggacaggacatgctgaggcaggggacagtgtcccctgctaccgcccrcccctacccatggcccgttgctggatgactgttactcttttttcagaaggtgttgggattatcacaggttaagccttttgttccccgtctgcacctgaagggttgtcgcctggcctgggagagcctcttccagggtgtgaggtgggtggggacctgtgtcaggtgtggatagccatttctgctcaaccacacattctctaagaaacagcttgaaagctctgtctgggtcattcatttaaactagaagcagaggcacttaaaacatgtaccaggaaccatttaacaaagaatataaaatgtc

SEQ ID NO: 3601 - DNA, 2549 bp, Homo sapiens
cgcggcaggtggtagccttcccgcccttctggcctctccatcccctgctgcgggggaccgcgcaagcgcagtgagtactgcacgttgtcgcgggccagtaacgtcatcagacgtgtgtgtgtccctgcggcgctaagaaggggagactgaggctgaggctggggaacatcgggcagcatgagcggctgcgggctcttcctgcgcaccacggctgcggctcgtgcctgccggggtctggtggtctctaccgcgaaccggcggctactgcgcaccagcccgcctgtacgagctttcgccaaagagcttttcctaggcaaaatcaagaagaaagaagttttcccatttccagaagttagccaagatgaacttaatgaaatcaatcagttcttgggacccgtggaaaaattcttcactgaagaggtggactcccgaaaaattgaccaggaagggaaaatcccagatgaaactttggagaaattgaagagcctagggctttttgggctgcaagtcccagaagaatatggtggcctgggcttctccaacaccatgtactcamgactaggggagatcatcagcatggatgggtccatcactgtgaccctggcagcgcaccaggctattggcctcaaggggatcatcttggctggcactgaggagcagaaagccaaatacttgcctaaactggcgtccggggagcacattgcagccttctgcctcacggagccagccagtgggagcgatgcagcctcaatccggagcagagccacactaagtgaagacaagaagcactacatcctcaatggctccaaggtctggattactaatggaggactggccaatatttttactgtgtttgcaaagactgaggtcgttgattctgatggatcagtgaaagacaaaatcacagcattcatagtagaaagagactttggtggagtcactaatgggaaacccgaagataaaytaggcattcggggctccaacacttgtgaagtccattttgaaaacaccaagatacctgtggaaaacatccttggagaggtcggagatgggtttaaggtggccatgaacatcctcaacagcggccggttcagcatgggcagcgtcgtggctgggctgctcaagagattgattgaaatgactgctgagtacgcctgcacaaggaaacagtttaacaagaggctcagtgaatttggattgattcaggagaaatttgcactgatggctcagaaggcttacgtcatggagagtatgacctacctcacagcagggatgctggaccaacctggctttcccgactgctccatcgaggcagccatggtgaaggtgttcagctccgaggccgcctggcagtgtgtgagtgaggcgctgcagatcctcgggggcttgggctacacaagggactatccgtacgagcgcatactgcgtgacacccgcatcctcctcatcttcgagggaaccaatgagattctccggatgtacatcgccctgacgggtctgcagcatgccggccgcatcctgactaccaggatccatgagcttaaacaggccaaagtgagcacagtcatggataccgttggccggaggcttcgggactccctgggccraactgtggacctggggctgacaggcaaccatggagttgtgcacccyagtcttgcggacagtgccaacaagtttgaggagaacacctactgcttcggccggaccgtggagacactgctgctccgctttggcaagaccatcatggaggagcagctggtactgaagcgggtggccaacatcctcatcaacctgtatggcatgacggccgtgctgtcgcgggccagccgctccatccgcattgggctccgcaaccacgaccacgaggttctcttggccaacaccttctgcgtggaagcttacttgcagaatctcttcagcctctctcagctggacaagtatgctccagaaaacctagatgagcagattaagaaagtgtcccagcagatccttgagaagcgagcctatatctgtgcccaccctctggacaggacatgctgaggcaggggacagtgtcccctgctaccgcccrcccctacccatggcccgttgctggatgactgttactcttttttcagaaggtgttgggattatcacaggttaagccttttgttccccgtctgcacctgaagggttgtcgcctggcctgggagagcctcttccaggttttgacctgcaggcagtgctctctaacaggaccatcacagcttytgaactgagccggagagagagaatggaattgctgacccctggaactggcgggtattctggtcattgaggagacaccatagtggaaactggggcttatgctgctgcctccagggtgtgaggtgggtggggacctgtgtcaggtgtggatagccatttctgctcaaccacacattctctaagaaacagcttgaaagctctgtctgggtcattcatttaaactagaagcagaggcacttaaaacatgtaccaggaaccatttaacaaagaatataaaatgtcacaatctgtgtactgtt

SEQ ID NO: 3602 - DNA, 1641 bp, Homo sapiens
ggatcagcttccagcccagtcggcccggcccgggggccatggagctccgagcggcggatcgcgagcctcctgcgaaccccagcctgcacgcccggttagcattcggccgggagatgcggcagtggaatctggaagggcggtgaaaaacctacgtcctgccctcgcccggcctctccattcgtcccccgggtagagaggtgcccggctcccaccccttcccagccccagccctggagacagcagcccctagactactgagggacagcgacagcatgaaggctccgggtcggctcgtgctcatcatcctgtgctccgtggtcttctctgccgtctacatcctcctgtgctgctgggccggcctgcccctctgcctggccacctgcctggaccaccacttccccacaggctccaggcccactgtgccgggacccctgcacttcagtggatatagcagtgtgccagatgggaagccgctggtccgcgagccctgccgcagctgtgccgtggtgtccagctcyggccaaatgctgggctcaggcctgggtgctgagatcgacagtgccgagtgcgtgttccgcatgaaccaggcgcccaccgtgggctttgaggcggatgtgggccagcgcagcaccctgcgtgtcgtctcacacacaagcgtgccgctgctgctgcgsaactattcacactacttccagaaggcccgagacacgctctacatggtgtggggccagggcaggcacatggaccgggtgctcggcggccgcacctaccgcacgctgctgcagctcaccaggatgtaccccggcctgcaggtgtacaccttcacggagcgcatgatggcctactgcgaccagatcttccaggacgagacgggcaagaaccggaggcagtcgggctccttcctcagcaccggctggttcaccatgatcctcgcgctggagctgtgtgaggagatcgtggtctatgggatggtcagcgacagctactgcagggagaagagccacccctcagtgccttaccactactttgagaagggccggctagatgagtgtcagatgtacctggcacaygagcaggcgccccgaagcgcccaccgcttcatcactgagaaggcggtcttctcccgctgggccaagaagaggcccatcgtgttcgcccatccgtcctggaggactgagtagcttccgtcrtcctgccagycgccatgccgttgcgaggcctccgggatgtcccatcccaagccatcacactccacaaaaacatttaatttatggwtcctgcctcctgccacgtgctgggtggacctaaggttccttcccrccccattctggcgacacttggagccatctcagcctccactccctgagtaattcayggcatttgggggctcaccccacctccaggtctgtcaagtggcctttgtccctggggctgatggcccccaactcaccagcatcatgaccttgtgccagtcctggtcctccctccccagccrcycctaccaccttttggtgccacacttctcaggctggccgccctggttggggcagccgagagcctggggttcattggtgaaggggccttggagttgtgactgccggggccgtatcaggaacgtacgggtaaacgtgtgttttctgg

SEQ ID NO: 3603 - DNA, 1537 bp, Homo sapiens
ggatcagcttccagcccagtcggcccggcccgggggccatggagctccgagcggcggatcgcgagcctcctgcgaaccccagcctgcacgcccggttagcattcggccgggagatgcggcagtggaatctggaagggcggtgaaaaacctacgtcctgccctcgcccggcctctccattcgtcccccgggtagagaggtgcccggctcccaccccttcccagccccagccctggagacagcagcccctagactactgagggacagcgacagcatgaaggctccgggtcggctcgtgctcatcatcctgtgctccgtggtcttctctgccgtctacatcctcctgtgctgctgggccggcctgcccctctgcctggccacctgcctggaccaccacttccccacaggctccaggcccactgtgccgggacccctgcacttcagtggatatagcagtgtgccagatgggaagccgctggtccgcgagccctgccgcagctgtgccgtggtgtccagctcyggccaaatgctgggctcaggcctgggtgctgagatcgacagtgccgagtgcgtgttccgcatgaaccaggcgcccaccgtgggctttgaggcggatgtgggccagcgcagcaccctgcgtgtcgtctcacacacaagcgtgccgctgctgctgcgsaactattcacactacttccagaaggcccgagacacgctctacatggtgtggggccagggcaggcacatggaccgggtgctcggcggccgcacctaccgcacgctgctgcagctcaccaggatgtaccccggcctgcaggtgtacaccttcacggagcgcatgatggcctactgcgaccagatcttccaggacgagacgggcaagaaccggaggcagtcgggctccttcctcagcaccggctggttcaccatgatcctcgcgctggagctgtgtgaggagatcgtggtctatgggatggtcagcgacagctactgcagggagaagagccacccctcagtgccttaccactactttgagaagggccggctagatgagtgtcagatgtacctggcacaygagcaggcgccccgaagcgcccaccgcttcatcactgagaaggcggtcttctcccgctgggccaagaagaggcccatcgtgttcgcccatccgtcctggaggactgagtagcttccgtcrtcctgccagycgccatgccgttgcgaggcctccgggatgtcccatcccaagccatcacactccactccctgagtaattcayggcatttgggggctcaccccacctccaggtctgtcaagtggcctttgtccctggggctgatggcccccaactcaccagcatcatgaccttgtgccagtcctggtcctccctccccagccrcycctaccaccttttggtgccacacttctcaggctggccgccctggttggggcagccgagagcctggggttcattggtgaaggggccttggagttgtgactgccggggccgtatcaggaacgtacgggtaaacgtgtgttttctgg

SEQ ID NO: 3604 - DNA, 1686 bp, Homo sapiens
ggatcagcttccagcccagtcggcccggcccgggggccatggagctccgagcggcggatcgcgagcctcctgcgaaccccagcctgcacgcccggttagcattcggccgggagatgcggcagtggaatctggaagggcggtgaaaaacctacgtcctgccctcgcccggcctctccattcgtcccccgggtagagaggtgcccggctcccaccccttcccagccccagccctggagacagcagcccctagactactgagggacagcgacagcatgaaggctccgggtcggctcgtgctcatcatcctgtgctccgtggtcttctctgccgtctacatcctcctgtgctgctgggccggcctgcccctctgcctggccacctgcctggaccaccacttccccacaggctccaggcccactgtgccgggacccctgcacttcagtggatatagcagtgtgccagatgggaagccgctggtccgcgagccctgccgcagctgtgccgtggtgtccagctcyggccaaatgctgggctcaggcctgggtgctgagatcgacagtgccgagtgcgtgttccgcatgaaccaggcgcccaccgtgggctttgaggcggatgtgggccagcgcagcaccctgcgtgtcgtctcacacacaagcgtgccgctgctgctgcgsaactattcacactacttccagaaggcccgagacacgctctacatggtgtggggccagggcaggcacatggaccgggtgctcggcggccgcacctaccgcacgctgctgcagctcaccaggatgtaccccggcctgcaggtgtacaccttcacggagcgcatgatggcctactgcgaccagatcttccaggacgagacgggcaagaaccggaggcagtcgggctccttcctcagcaccggctggttcaccatgatcctcgcgctggagctgtgtgaggagatcgtggtctatgggatggtcagcgacagctactgcagggagaagagccacccctcagtgccttaccactactttgagaagggccggctagatgagtgtcagatgtacctggcacaygagcaggcgccccgaagcgcccaccgcttcatcactgagaaggcggtcttctcccgctgggccaagaagaggcccatcgtgttcgcccatccgtcctggaggactgagtagcttccgtcrtcctgccagycgccatgccgttgcgaggcctccgggatgtcccatcccaagccatcacactccacaaaaacatttaatttatggwtcctgcctcctgccacgtgctgggtggacctaaggttccttcccrccccattctggcgacacttggagccatctcaggcctcatgacttgaaggggagtggaggggggagccgtgtctcccccctccactccctgagtaattcayggcatttgggggctcaccccacctccaggtctgtcaagtggcctttgtccctggggctgatggcccccaactcaccagcatcatgaccttgtgccagtcctggtcctccctccccagccrcycctaccaccttttggtgccacacttctcaggctggccgccctggttggggcagccgagagcctggggttcattggtgaaggggccttggagttgtgactgccggggccgtatcaggaacgtacgggtaaacgtgtgttttctgg

SEQ ID NO: 3605 - DNA, 1554 bp, Homo sapiens
ggatcagcttccagcccagtcggcccggcccgggggccatggagctccgagcggcggatcgcgagcctcctgcgaaccccagcctgcacgcccggttagcattcggccgggagatgcggcagtggaatctggaagggcggtgaaaaacctacgtcctgccctcgcccggcctctccattcgtcccccgggtagagagggtcggctcgtgctcatcatcctgtgctccgtggtcttctctgccgtctacatcctcctgtgctgctgggccggcctgcccctctgcctggccacctgcctggaccaccacttccccacaggctccaggcccactgtgccgggacccctgcacttcagtggatatagcagtgtgccagatgggaagccgctggtccgcgagccctgccgcagctgtgccgtggtgtccagctcyggccaaatgctgggctcaggcctgggtgctgagatcgacagtgccgagtgcgtgttccgcatgaaccaggcgcccaccgtgggctttgaggcggatgtgggccagcgcagcaccctgcgtgtcgtctcacacacaagcgtgccgctgctgctgcgsaactattcacactacttccagaaggcccgagacacgctctacatggtgtggggccagggcaggcacatggaccgggtgctcggcggccgcacctaccgcacgctgctgcagctcaccaggatgtaccccggcctgcaggtgtacaccttcacggagcgcatgatggcctactgcgaccagatcttccaggacgagacgggcaagaaccggaggcagtcgggctccttcctcagcaccggctggttcaccatgatcctcgcgctggagctgtgtgaggagatcgtggtctatgggatggtcagcgacagctactgcagggagaagagccacccctcagtgccttaccactactttgagaagggccggctagatgagtgtcagatgtacctggcacaygagcaggcgccccgaagcgcccaccgcttcatcactgagaaggcggtcttctcccgctgggccaagaagaggcccatcgtgttcgcccatccgtcctggaggactgagtagcttccgtcrtcctgccagycgccatgccgttgcgaggcctccgggatgtcccatcccaagccatcacactccacaaaaacatttaatttatggwtcctgcctcctgccacgtgctgggtggacctaaggttccttcccrccccattctggcgacacttggagccatctcagcctccactccctgagtaattcayggcatttgggggctcaccccacctccaggtctgtcaagtggcctttgtccctggggctgatggcccccaactcaccagcatcatgaccttgtgccagtcctggtcctccctccccagccrcycctaccaccttttggtgccacacttctcaggctggccgccctggttggggcagccgagagcctggggttcattggtgaaggggccttggagttgtgactgccggggccgtatcaggaacgtacgggtaaacgtgtgttttctgg

SEQ ID NO: 3606 - DNA, 2723 bp, Homo sapiens
gcccagcgggggcgggaccggaacggagccgtgcggccccgcgcgctcgcagtctgtctcccgccgtccccacgcacgcgtcccggctcacgcgtccccccgcccgcccgcccgcccgcccgcccccgcttgtgccgcccctaccagagacccccaggagcaggatgtccttccagggcaagaaaagcatcccccggatcacgagtgaccgccttctgatcagaggtgggaggatcgtgaatgacgaccagtccttttacgctgatgtgcacgtggaagatggcttgataaaacaaatcggagaaaacctcatcgtccctgggggcatcaagaccattgacgcccacggcctgatggtccttcctggtggcgttgacgtccacacaaggctgcagatgcctgtcctgggcatgacaccggctgacgacttctgtcagggcaccaaggcagcgctagcaggaggaaccaccatgatcttggaccacgtcttccccgacacgggtgtgagcctgctggcggcctacgagcagtggcgggagcgggcggacagcgcggcctgctgcgactactccctgcacgtggacatcacccgatggcatgagagcatcaaggaggagctggaggccctggtcaaggagaagggtgtgaactccttcctggtcttcatggcatacaaggaccggtgccagtgcagcgacagccagatgtacgagatcttcagcatcatccgggacctgggggccttggcccaggtgcacgctgagaacggggacatcgtggaggaggagcagaagcggttgctggagctcggcatcactggccccgagggccacgtgctcagccaccccgaggaggtggaggctgaggcggtgtaccgagctgtcaccatcgccaagcaggcaaactgcccgctgtacgtcaccaaggtgatgagcaagggggcggccgacgccatcgctcaggccaagcgcagaggggtggtcgtgtttggggagcccatcaccgccagcctgggcaccgacggttcacactactggagcaagaactgggccaaggccgcagccttcgtcacatcaccccctgtcaacccagaccccaccacggcrgaccacctcacctgcttgctgtccagcggggacctccaggtgacaggcagcgcccactgcaccttcaccactgcccagaaggctgtgggcaaggacaacttcgcgctgatccccgagggcaccaacggcattgaggagcgcatgtcgatggtctgggagaaatgtgtggcctctgggaagatggacgagaatgagttcgtcgcrgtgaccagtacaaatgctgccaaaatcttcaatttttacccaaggaaggggcgagtggctgtgggctctgacgctgacctggtcatatggaaccccaaggccaccaagatcatctctgccaagacccacaatctgaacgtggagtacaacatcttcgagggagtggagtgccggggagcgcctgccgtggtcataagtcagggccgagtggcgctggaggacgggaagatgtttgtcaccccgggggcgggccgcttcgtccctcggaaaacattcccggactttgtctacaagaggatcaaagctcgcaacaggctggcggagatccacggtgtgccccgtggrctgtatgacgggcccgtccacgaggtgatggtgcctgccaagmcagggagtggcgctccggcccgcgcgtcctgcccaggcaagatctccgtscctcctgtgcgcaacctacatcagtcggggttcagcctatctgggtctcaggctgatgaccacatcgcccgacgcacagcacagaagatcatggcaccacctggcggccgctccaacatcacctctctctcctagacgcccaggaccggccctgtgagccgtgctggccccacccgaggccgcgggggccccagggcactcgcccccctccttagcattttcttttgtagaagtttctcgaaggtgcttggcggtcttgccttccccctccccacaggctctccttgtggggtcccaggtcctgctgccaagagcccctcaagagaagggctgaacctggggagatgtcactgccagggtgaggtggagccacatggcagggacaatgccrgcagcctgagcccaggcaccccagtgcccgctgggcccagcctggggacagggaacctgccgggctcacagtgtgggagcagctggacaccaggcttcttggtgaaccggcgaggggccgagtcccgcctggtgggcatttgcygccgcctccccaccaccagtcactgcctcgcagagccctacactcccgcagccgctcctcagaggcctgtgcccatcgcaggcctgggaggaaagtgggcgcagagccctcctgctcacacagctgctgagacttcagggacccatcagaacttggtgcagcacagccccgcccgtggagggtcccttttacgcaccccaaggcccacacctaagcttccatgtagccctcatccagggaagttttgcgatcctttaggaagacactgtcctcttattacagattgtgtatttccgtaggcttcttagtagcagctttgtacactgaggacactgtagccaggaacctgtgcatgccacccaccgcctggacaggcagtcatcctgcctctgatgtgaatcaggcccattaaagacgtctgggtttgaagccgcctgtgc

SEQ ID NO: 3607 - DNA, 2920 bp, Homo sapiens
cctgccctccgtctctcgcggccagcgtggaacagcctcgcggggtcacagcctggcgctcggaccctggcccgggtcatctgcgaaggagccggctttggscaagagacccccaggagcaggatgtccttccagggcaagaaaagcatcccccggatcacgagtgaccgccttctgatcagaggtgggaggatcgtgaatgacgaccagtccttttacgctgatgtgcacgtggaagatggcttgataaacacttagtatggtgcctggctcatagcaggtgcttcctaaatactggtgcccacatctattagcgcacctgcttccgtttgtcaagctgctccgtcctctagtcaaaaaagtaccaaccagggacctgagtggaaaaccacagggcgtggcgtctgcgtgaggctggaccctgcagtgaccgtcctgagctgcgctgagtgatgctttgctccctggcactcccgaggagctagtccaacaaatcggagaaaacctcatcgtccctgggggcatcaagaccattgacgcccacggcctgatggtccttcctggtggcgttgacgtccacacaaggctgcagatgcctgtcctgggcatgacaccggctgacgacttctgtcagggcaccaaggcagcgctagcaggaggaaccaccatgatcttggaccacgtcttccccgacacgggtgtgagcctgctggcggcctacgagcagtggcgggagcgggcggacagcgcggcctgctgcgactactccctgcacgtggacatcacccgatggcatgagagcatcaaggaggagctggaggccctggtcaaggagaagggtgtgaactccttcctggtcttcatggcatacaaggaccggtgccagtgcagcgacagccagatgtacgagatcttcagcatcatccgggacctgggggccttggcccaggtgcacgctgagaacggggacatcgtggaggaggagcagaagcggttgctggagctcggcatcactggccccgagggccacgtgctcagccaccccgaggaggtggaggctgaggcggtgtaccgagctgtcaccatcgccaagcaggcaaactgcccgctgtacgtcaccaaggtgatgagcaagggggcggccgacgccatcgctcaggccaagcgcagaggggtggtcgtgtttggggagcccatcaccgccagcctgggcaccgacggttcacactactggagcaagaactgggccaaggccgcagccttcgtcacatcaccccctgtcaacccagaccccaccacggcrgaccacctcacctgcttgctgtccagcggggacctccaggtgacaggcagcgcccactgcaccttcaccactgcccagaaggctgtgggcaaggacaacttcgcgctgatccccgagggcaccaacggcattgaggagcgcatgtcgatggtctgggagaaatgtgtggcctctgggaagatggacgagaatgagttcgtcgcrgtgaccagtacaaatgctgccaaaatcttcaatttttacccaaggaaggggcgagtggctgtgggctctgacgctgacctggtcatatggaaccccaaggccaccaagatcatctctgccaagacccacaatctgaacgtggagtacaacatcttcgagggagtggagtgccggggagcgcctgccgtggtcataagtcagggccgagtggcgctggaggacgggaagatgtttgtcaccccgggggcgggccgcttcgtccctcggaaaacattcccggactttgtctacaagaggatcaaagctcgcaacaggctggcggagatccacggtgtgccccgtggrctgtatgacgggcccgtccacgaggtgatggtgcctgccaagmcagggagtggcgctccggcccgcgcgtcctgcccaggcaagatctccgtscctcctgtgcgcaacctacatcagtcggggttcagcctatctgggtctcaggctgatgaccacatcgcccgacgcacagcacagaagatcatggcaccacctggcggccgctccaacatcacctctctctcctagacgcccaggaccggccctgtgagccgtgctggccccacccgaggccgcgggggccccagggcactcgcccccctccttagcattttcttttgtagaagtttctcgaaggtgcttggcggtcttgccttccccctccccacaggctctccttgtggggtcccaggtcctgctgccaagagcccctcaagagaagggctgaacctggggagatgtcactgccagggtgaggtggagccacatggcagggacaatgccrgcagcctgagcccaggcaccccagtgcccgctgggcccagcctggggacagggaacctgccgggctcacagtgtgggagcagctggacaccaggcttcttggtgaaccggcgaggggccgagtcccgcctggtgggcatttgcygccgcctccccaccaccagtcactgcctcgcagagccctacactcccgcagccgctcctcagaggcctgtgcccatcgcaggcctgggaggaaagtgggcgcagagccctcctgctcacacagctgctgagacttcagggacccatcagaacttggtgcagcacagccccgcccgtggagggtcccttttacgcaccccaaggcccacacctaagcttccatgtagccctcatccagggaagttttgcgatcctttaggaagacactgtcctcttattacagattgtgtatttccgtaggcttcttagtagcagctttgtacactgaggacactgtagccaggaacctgtgcatgccacccaccgcctggacaggcagtcatcctgcctctgatgtgaatcaggcccattaaagacgtctgggtttgaagccgcctgtgc

SEQ ID NO: 3608 - DNA, 2874 bp, Homo sapiens
tcgggcccctcctgccctccgtctctcgcggccagcgtggaacagcctcgcggggtcacagcctggcgctcggaccctggcccgggtcatctgcgaaggagccggctttggscaagagtgaccgccttctgatcagaggtgggaggatcgtgaatgacgaccagtccttttacgctgatgtgcacgtggaagatggcttgataaacacttagtatggtgcctggctcatagcaggtgcttcctaaatactggtgcccacatctattagcgcacctgcttccgtttgtcaagctgctccgtcctctagtcaaaaaagtaccaaccagggacctgagtggaaaaccacagggcgtggcgtctgcgtgaggctggaccctgcagtgaccgtcctgagctgcgctgagtgatgctttgctccctggcactcccgaggagctagtccaacaaatcggagaaaacctcatcgtccctgggggcatcaagaccattgacgcccacggcctgatggtccttcctggtggcgttgacgtccacacaaggctgcagatgcctgtcctgggcatgacaccggctgacgacttctgtcagggcaccaaggcagcgctagcaggaggaaccaccatgatcttggaccacgtcttccccgacacgggtgtgagcctgctggcggcctacgagcagtggcgggagcgggcggacagcgcggcctgctgcgactactccctgcacgtggacatcacccgatggcatgagagcatcaaggaggagctggaggccctggtcaaggagaagggtgtgaactccttcctggtcttcatggcatacaaggaccggtgccagtgcagcgacagccagatgtacgagatcttcagcatcatccgggacctgggggccttggcccaggtgcacgctgagaacggggacatcgtggaggaggagcagaagcggttgctggagctcggcatcactggccccgagggccacgtgctcagccaccccgaggaggtggaggctgaggcggtgtaccgagctgtcaccatcgccaagcaggcaaactgcccgctgtacgtcaccaaggtgatgagcaagggggcggccgacgccatcgctcaggccaagcgcagaggggtggtcgtgtttggggagcccatcaccgccagcctgggcaccgacggttcacactactggagcaagaactgggccaaggccgcagccttcgtcacatcaccccctgtcaacccagaccccaccacggcrgaccacctcacctgcttgctgtccagcggggacctccaggtgacaggcagcgcccactgcaccttcaccactgcccagaaggctgtgggcaaggacaacttcgcgctgatccccgagggcaccaacggcattgaggagcgcatgtcgatggtctgggagaaatgtgtggcctctgggaagatggacgagaatgagttcgtcgcrgtgaccagtacaaatgctgccaaaatcttcaatttttacccaaggaaggggcgagtggctgtgggctctgacgctgacctggtcatatggaaccccaaggccaccaagatcatctctgccaagacccacaatctgaacgtggagtacaacatcttcgagggagtggagtgccggggagcgcctgccgtggtcataagtcagggccgagtggcgctggaggacgggaagatgtttgtcaccccgggggcgggccgcttcgtccctcggaaaacattcccggactttgtctacaagaggatcaaagctcgcaacaggctggcggagatccacggtgtgccccgtggrctgtatgacgggcccgtccacgaggtgatggtgcctgccaagmcagggagtggcgctccggcccgcgcgtcctgcccaggcaagatctccgtscctcctgtgcgcaacctacatcagtcggggttcagcctatctgggtctcaggctgatgaccacatcgcccgacgcacagcacagaagatcatggcaccacctggcggccgctccaacatcacctctctctcctagacgcccaggaccggccctgtgagccgtgctggccccacccgaggccgcgggggccccagggcactcgcccccctccttagcattttcttttgtagaagtttctcgaaggtgcttggcggtcttgccttccccctccccacaggctctccttgtggggtcccaggtcctgctgccaagagcccctcaagagaagggctgaacctggggagatgtcactgccagggtgaggtggagccacatggcagggacaatgccrgcagcctgagcccaggcaccccagtgcccgctgggcccagcctggggacagggaacctgccgggctcacagtgtgggagcagctggacaccaggcttcttggtgaaccggcgaggggccgagtcccgcctggtgggcatttgcygccgcctccccaccaccagtcactgcctcgcagagccctacactcccgcagccgctcctcagaggcctgtgcccatcgcaggcctgggaggaaagtgggcgcagagccctcctgctcacacagctgctgagacttcagggacccatcagaacttggtgcagcacagccccgcccgtggagggtcccttttacgcaccccaaggcccacacctaagcttccatgtagccctcatccagggaagttttgcgatcctttaggaagacactgtcctcttattacagattgtgtatttccgtaggcttcttagtagcagctttgtacactgaggacactgtagccaggaacctgtgcatgccacccaccgcctggacaggcagtcatcctgcctctgatgtgaatcaggcccattaaagacgtctgggtttgaagccgcctgtgc

SEQ ID NO: 3609 - DNA, 2825 bp, Homo sapiens
aacggagccgtgcggccccgcgcgctcgcagtctgtctcccgccgtccccacgcacgcgtcccggctcacgccccccgcttgtgccgcccctaccagagacccccaggagcaggatgtccttccagggcaagaaaagcatcccccggatcacgagtgaccgccttctgatcagaggtgggaggatcgtgaatgacgaccagtccttttacgctgatgtgcacgtggaagatggcttgataaactgctccgtcctctagtcaaaaaagtaccaaccagggacctgagtggaaaaccacagggcgtggcgtctgcgtgaggctggaccctgcagtgaccgtcctgagctgcgctgagtgatgctttgctccctggcactcccgaggagctagtccaacaaatcggagaaaacctcatcgtccctgggggcatcaagaccattgacgcccacggcctgatggtccttcctggtggcgttgacgtccacacaaggctgcagatgcctgtcctgggcatgacaccggctgacgacttctgtcagggcaccaaggcagcgctagcaggaggaaccaccatgatcttggaccacgtcttccccgacacgggtgtgagcctgctggcggcctacgagcagtggcgggagcgggcggacagcgcggcctgctgcgactactccctgcacgtggacatcacccgatggcatgagagcatcaaggaggagctggaggccctggtcaaggagaagggtgtgaactccttcctggtcttcatggcatacaaggaccggtgccagtgcagcgacagccagatgtacgagatcttcagcatcatccgggacctgggggccttggcccaggtgcacgctgagaacggggacatcgtggaggaggagcagaagcggttgctggagctcggcatcactggccccgagggccacgtgctcagccaccccgaggaggtggaggctgaggcggtgtaccgagctgtcaccatcgccaagcaggcaaactgcccgctgtacgtcaccaaggtgatgagcaagggggcggccgacgccatcgctcaggccaagcgcagaggggtggtcgtgtttggggagcccatcaccgccagcctgggcaccgacggttcacactactggagcaagaactgggccaaggccgcagccttcgtcacatcaccccctgtcaacccagaccccaccacggcrgaccacctcacctgcttgctgtccagcggggacctccaggtgacaggcagcgcccactgcaccttcaccactgcccagaaggctgtgggcaaggacaacttcgcgctgatccccgagggcaccaacggcattgaggagcgcatgtcgatggtctgggagaaatgtgtggcctctgggaagatggacgagaatgagttcgtcgcrgtgaccagtacaaatgctgccaaaatcttcaatttttacccaaggaaggggcgagtggctgtgggctctgacgctgacctggtcatatggaaccccaaggccaccaagatcatctctgccaagacccacaatctgaacgtggagtacaacatcttcgagggagtggagtgccggggagcgcctgccgtggtcataagtcagggccgagtggcgctggaggacgggaagatgtttgtcaccccgggggcgggccgcttcgtccctcggaaaacattcccggactttgtctacaagaggatcaaagctcgcaacaggctggcggagatccacggtgtgccccgtggrctgtatgacgggcccgtccacgaggtgatggtgcctgccaagmcagggagtggcgctccggcccgcgcgtcctgcccaggcaagatctccgtscctcctgtgcgcaacctacatcagtcggggttcagcctatctgggtctcaggctgatgaccacatcgcccgacgcacagcacagaagatcatggcaccacctggcggccgctccaacatcacctctctctcctagacgcccaggaccggccctgtgagccgtgctggccccacccgaggccgcgggggccccagggcactcgcccccctccttagcattttcttttgtagaagtttctcgaaggtgcttggcggtcttgccttccccctccccacaggctctccttgtggggtcccaggtcctgctgccaagagcccctcaagagaagggctgaacctggggagatgtcactgccagggtgaggtggagccacatggcagggacaatgccrgcagcctgagcccaggcaccccagtgcccgctgggcccagcctggggacagggaacctgccgggctcacagtgtgggagcagctggacaccaggcttcttggtgaaccggcgaggggccgagtcccgcctggtgggcatttgcygccgcctccccaccaccagtcactgcctcgcagagccctacactcccgcagccgctcctcagaggcctgtgcccatcgcaggcctgggaggaaagtgggcgcagagccctcctgctcacacagctgctgagacttcagggacccatcagaacttggtgcagcacagccccgcccgtggagggtcccttttacgcaccccaaggcccacacctaagcttccatgtagccctcatccagggaagttttgcgatcctttaggaagacactgtcctcttattacagattgtgtatttccgtaggcttcttagtagcagctttgtacactgaggacactgtagccaggaacctgtgcatgccacccaccgcctggacaggcagtcatcctgcctctgatgtgaatcaggcccattaaagacgtctgggtttgaagccgcctgtgc

SEQ ID NO: 3610 - DNA, 2875 bp, Homo sapiens
gcccagcgggggcgggaccggaacggagccgtgcggccccgcgcgctcgcagtctgtctcccgccgtccccacgcacgcgtcccggctcacgcgtccccccgcccgcccgcccgcccgcccgcccccgcttgtgccgcccctaccagagacccccaggagcaggatgtccttccagggcaagaaaagcatcccccggatcacgagtgaccgccttctgatcagaggtgggaggatcgtgaatgacgaccagtccttttacgctgatgtgcacgtggaagatggcttgataaactgctccgtcctctagtcaaaaaagtaccaaccagggacctgagtggaaaaccacagggcgtggcgtctgcgtgaggctggaccctgcagtgaccgtcctgagctgcgctgagtgatgctttgctccctggcactcccgaggagctagtccaacaaatcggagaaaacctcatcgtccctgggggcatcaagaccattgacgcccacggcctgatggtccttcctggtggcgttgacgtccacacaaggctgcagatgcctgtcctgggcatgacaccggctgacgacttctgtcagggcaccaaggcagcgctagcaggaggaaccaccatgatcttggaccacgtcttccccgacacgggtgtgagcctgctggcggcctacgagcagtggcgggagcgggcggacagcgcggcctgctgcgactactccctgcacgtggacatcacccgatggcatgagagcatcaaggaggagctggaggccctggtcaaggagaagggtgtgaactccttcctggtcttcatggcatacaaggaccggtgccagtgcagcgacagccagatgtacgagatcttcagcatcatccgggacctgggggccttggcccaggtgcacgctgagaacggggacatcgtggaggaggagcagaagcggttgctggagctcggcatcactggccccgagggccacgtgctcagccaccccgaggaggtggaggctgaggcggtgtaccgagctgtcaccatcgccaagcaggcaaactgcccgctgtacgtcaccaaggtgatgagcaagggggcggccgacgccatcgctcaggccaagcgcagaggggtggtcgtgtttggggagcccatcaccgccagcctgggcaccgacggttcacactactggagcaagaactgggccaaggccgcagccttcgtcacatcaccccctgtcaacccagaccccaccacggcrgaccacctcacctgcttgctgtccagcggggacctccaggtgacaggcagcgcccactgcaccttcaccactgcccagaaggctgtgggcaaggacaacttcgcgctgatccccgagggcaccaacggcattgaggagcgcatgtcgatggtctgggagaaatgtgtggcctctgggaagatggacgagaatgagttcgtcgcrgtgaccagtacaaatgctgccaaaatcttcaatttttacccaaggaaggggcgagtggctgtgggctctgacgctgacctggtcatatggaaccccaaggccaccaagatcatctctgccaagacccacaatctgaacgtggagtacaacatcttcgagggagtggagtgccggggagcgcctgccgtggtcataagtcagggccgagtggcgctggaggacgggaagatgtttgtcaccccgggggcgggccgcttcgtccctcggaaaacattcccggactttgtctacaagaggatcaaagctcgcaacaggctggcggagatccacggtgtgccccgtggrctgtatgacgggcccgtccacgaggtgatggtgcctgccaagmcagggagtggcgctccggcccgcgcgtcctgcccaggcaagatctccgtscctcctgtgcgcaacctacatcagtcggggttcagcctatctgggtctcaggctgatgaccacatcgcccgacgcacagcacagaagatcatggcaccacctggcggccgctccaacatcacctctctctcctagacgcccaggaccggccctgtgagccgtgctggccccacccgaggccgcgggggccccagggcactcgcccccctccttagcattttcttttgtagaagtttctcgaaggtgcttggcggtcttgccttccccctccccacaggctctccttgtggggtcccaggtcctgctgccaagagcccctcaagagaagggctgaacctggggagatgtcactgccagggtgaggtggagccacatggcagggacaatgccrgcagcctgagcccaggcaccccagtgcccgctgggcccagcctggggacagggaacctgccgggctcacagtgtgggagcagctggacaccaggcttcttggtgaaccggcgaggggccgagtcccgcctggtgggcatttgcygccgcctccccaccaccagtcactgcctcgcagagccctacactcccgcagccgctcctcagaggcctgtgcccatcgcaggcctgggaggaaagtgggcgcagagccctcctgctcacacagctgctgagacttcagggacccatcagaacttggtgcagcacagccccgcccgtggagggtcccttttacgcaccccaaggcccacacctaagcttccatgtagccctcatccagggaagttttgcgatcctttaggaagacactgtcctcttattacagattgtgtatttccgtaggcttcttagtagcagctttgtacactgaggacactgtagccaggaacctgtgcatgccacccaccgcctggacaggcagtcatcctgcctctgatgtgaatcaggcccattaaagacgtctgggtttgaagccgcctgtgc

SEQ ID NO: 3611 - DNA, 2712 bp, Homo sapiens
ggcggggcccagcgggggcgggaccggaacggagccgtgcggccccgcgcgctcgcagtctgtctcccgccgtccccacgcacgcgtcccggctcacgcgtccccccgccccccccgcttgtgccgcccctaccagagacccccaggagcaggatgtccttccagggcaagaaaagcatcccccggatcacgagtgaccgccttctgatcagaggtgggaggatcgtgaatgacgaccagtccttttacgctgatgtgcacgtggaagatggcttgataaaacaaatcggagaaaacctcatcgtccctgggggcatcaagaccattgacgcccacggcctgatggtccttcctggtggcgttgacgtccacacaaggctgcagatgcctgtcctgggcatgacaccggctgacgacttctgtcagggcaccaaggcagcgctagcaggaggaaccaccatgatcttggaccacgtcttccccgacacgggtgtgagcctgctggcggcctacgagcagtggcgggagcgggcggacagcgcggcctgctgcgactactccctgcacgtggacatcacccgatggcatgagagcatcaaggaggagctggaggccctggtcaaggagaagggtgtgaactccttcctggtcttcatggcatacaaggaccggtgccagtgcagcgacagccagatgtacgagatcttcagcatcatccgggacctgggggccttggcccaggtgcacgctgagaacggggacatcgtggaggaggagcagaagcggttgctggagctcggcatcactggccccgagggccacgtgctcagccaccccgaggaggtggaggctgaggcggtgtaccgagctgtcaccatcgccaagcaggcaaactgcccgctgtacgtcaccaaggtgatgagcaagggggcggccgacgccatcgctcaggccaagcgcagaggggtggtcgtgtttggggagcccatcaccgccagcctgggcaccgacggttcacactactggagcaagaactgggccaaggccgcagccttcgtcacatcaccccctgtcaacccagaccccaccacggcrgaccacctcacctgcttgctgtccagcggggacctccaggtgacaggcagcgcccactgcaccttcaccactgcccagaaggctgtgggcaaggacaacttcgcgctgatccccgagggcaccaacggcattgaggagcgcatgtcgatggtctgggagaaatgtgtggcctctgggaagatggacgagaatgagttcgtcgcrgtgaccagtacaaatgctgccaaaatcttcaatttttacccaaggaaggggcgagtggctgtgggctctgacgctgacctggtcatatggaaccccaaggccaccaagatcatctctgccaagacccacaatctgaacgtggagtacaacatcttcgagggagtggagtgccggggagcgcctgccgtggtcataagtcagggccgagtggcgctggaggacgggaagatgtttgtcaccccgggggcgggccgcttcgtccctcggaaaacattcccggactttgtctacaagaggatcaaagctcgcaacaggctggcggagatccacggtgtgccccgtggrctgtatgacgggcccgtccacgaggtgatggtgcctgccaagmcagggagtggcgctccggcccgcgcgtcctgcccaggcaagatctccgtscctcctgtgcgcaacctacatcagtcggggttcagcctatctgggtctcaggctgatgaccacatcgcccgacgcacagcacagaagatcatggcaccacctggcggccgctccaacatcacctctctctcctagacgcccaggaccggccctgtgagccgtgctggccccacccgaggccgcgggggccccagggcactcgcccccctccttagcattttcttttgtagaagtttctcgaaggtgcttggcggtcttgccttccccctccccacaggctctccttgtggggtcccaggtcctgctgccaagagcccctcaagagaagggctgaacctggggagatgtcactgccagggtgaggtggagccacatggcagggacaatgccrgcagcctgagcccaggcaccccagtgcccgctgggcccagcctggggacagggaacctgccgggctcacagtgtgggagcagctggacaccaggcttcttggtgaaccggcgaggggccgagtcccgcctggtgggcatttgcygccgcctccccaccaccagtcactgcctcgcagagccctacactcccgcagccgctcctcagaggcctgtgcccatcgcaggcctgggaggaaagtgggcgcagagccctcctgctcacacagctgctgagacttcagggacccatcagaacttggtgcagcacagccccgcccgtggagggtcccttttacgcaccccaaggcccacacctaagcttccatgtagccctcatccagggaagttttgcgatcctttaggaagacactgtcctcttattacagattgtgtatttccgtaggcttcttagtagcagctttgtacactgaggacactgtagccaggaacctgtgcatgccacccaccgcctggacaggcagtcatcctgcctctgatgtgaatcaggcccattaaagacgtctgggtttgaagccgcctgtgc

SEQ ID NO: 3612 - DNA, 2682 bp, Homo sapiens
cctgccctccgtctctcgcggccagcgtggaacagcctcgcggggtcacagcctggcgctcggaccctggcccgggtcatctgcgaaggagccggctttggscaagagacccccaggagcaggatgtccttccagggcaagaaaagcatcccccggatcacgagtgaccgccttctgatcagaggtgggaggatcgtgaatgacgaccagtccttttacgctgatgtgcacgtggaagatggcttgataaaacaaatcggagaaaacctcatcgtccctgggggcatcaagaccattgacgcccacggcctgatggtccttcctggtggcgttgacgtccacacaaggctgcagatgcctgtcctgggcatgacaccggctgacgacttctgtcagggcaccaaggcagcgctagcaggaggaaccaccatgatcttggaccacgtcttccccgacacgggtgtgagcctgctggcggcctacgagcagtggcgggagcgggcggacagcgcggcctgctgcgactactccctgcacgtggacatcacccgatggcatgagagcatcaaggaggagctggaggccctggtcaaggagaagggtgtgaactccttcctggtcttcatggcatacaaggaccggtgccagtgcagcgacagccagatgtacgagatcttcagcatcatccgggacctgggggccttggcccaggtgcacgctgagaacggggacatcgtggaggaggagcagaagcggttgctggagctcggcatcactggccccgagggccacgtgctcagccaccccgaggaggtggaggctgaggcggtgtaccgagctgtcaccatcgccaagcaggcaaactgcccgctgtacgtcaccaaggtgatgagcaagggggcggccgacgccatcgctcaggccaagcgcagaggggtggtcgtgtttggggagcccatcaccgccagcctgggcaccgacggttcacactactggagcaagaactgggccaaggccgcagccttcgtcacatcaccccctgtcaacccagaccccaccacggcrgaccacctcacctgcttgctgtccagcggggacctccaggtgacaggcagcgcccactgcaccttcaccactgcccagaaggctgtgggcaaggacaacttcgcgctgatccccgagggcaccaacggcattgaggagcgcatgtcgatggtctgggagaaatgtgtggcctctgggaagatggacgagaatgagttcgtcgcrgtgaccagtacaaatgctgccaaaatcttcaatttttacccaaggaaggggcgagtggctgtgggctctgacgctgacctggtcatatggaaccccaaggccaccaagatcatctctgccaagacccacaatctgaacgtggagtacaacatcttcgagggagtggagtgccggggagcgcctgccgtggtcataagtcagggccgagtggcgctggaggacgggaagatgtttgtcaccccgggggcgggccgcttcgtccctcggaaaacattcccggactttgtctacaagaggatcaaagctcgcaacaggctggcggagatccacggtgtgccccgtggrctgtatgacgggcccgtccacgaggtgatggtgcctgccaagmcagggagtggcgctccggcccgcgcgtcctgcccaggcaagatctccgtscctcctgtgcgcaacctacatcagtcggggttcagcctatctgggtctcaggctgatgaccacatcgcccgacgcacagcacagaagatcatggcaccacctggcggccgctccaacatcacctctctctcctagacgcccaggaccggccctgtgagccgtgctggccccacccgaggccgcgggggccccagggcactcgcccccctccttagcattttcttttgtagaagtttctcgaaggtgcttggcggtcttgccttccccctccccacaggctctccttgtggggtcccaggtcctgctgccaagagcccctcaagagaagggctgaacctggggagatgtcactgccagggtgaggtggagccacatggcagggacaatgccrgcagcctgagcccaggcaccccagtgcccgctgggcccagcctggggacagggaacctgccgggctcacagtgtgggagcagctggacaccaggcttcttggtgaaccggcgaggggccgagtcccgcctggtgggcatttgcygccgcctccccaccaccagtcactgcctcgcagagccctacactcccgcagccgctcctcagaggcctgtgcccatcgcaggcctgggaggaaagtgggcgcagagccctcctgctcacacagctgctgagacttcagggacccatcagaacttggtgcagcacagccccgcccgtggagggtcccttttacgcaccccaaggcccacacctaagcttccatgtagccctcatccagggaagttttgcgatcctttaggaagacactgtcctcttattacagattgtgtatttccgtaggcttcttagtagcagctttgtacactgaggacactgtagccaggaacctgtgcatgccacccaccgcctggacaggcagtcatcctgcctctgatgtgaatcaggcccattaaagacgtctgggtttgaagccgcctgtgc

SEQ ID NO: 3613 - DNA, 2543 bp, Homo sapiens
gcccagcgggggcgggaccggaacggagccgtgcggccccgcgcgctcgcagtctgtctcccgccgtccccacgcacgcgtcccggctcacgcgtccccccgcccgcccgcccgcccgcccgcccccgcttgtgccgcccctaccagagacccccaggagcaggatgtccttccagggcaagaaaagcatcccccggatcacgagtgaccgccttctgatcagaggtgggaggatcgtgaatgacgaccagtccttttacgctgatgtgcacgtggaagatggcttgataaaacaaatcggagaaaacctcatcgtccctgggggcatcaagaccattgacgcccacggcctgatggtccttcctggtggcgttgacgtccacacaaggctgcagatgcctgtcctgggcatgacaccggctgacgacttctgtcagggcaccaaggcagcgctagcaggaggaaccaccatgatcttggaccacgtcttccccgacacgggtgtgagcctgctggcggcctacgagcagtggcgggagcgggcggacagcgcggcctgctgcgactactccctgcacgtggacatcacccgatggcatgagagcatcaaggaggagctggaggccctggtcaaggagaagggtgtgaactccttcctggtcttcatggcatacaaggaccggtgccagtgcagcgacagccagatgtacgagatcttcagcatcatccgggacctgggggccttggcccaggtgcacgctgagaacggggacatcgtggaggaggagcagaagcggttgctggagctcggcatcactggccccgagggccacgtgctcagccaccccgaggaggtggaggctgaggcggtgtaccgagctgtcaccatcgccaagcaggcaaactgcccgctgtacgtcaccaaggtgatgagcaagggggcggccgacgccatcgctcaggccaagcgcagaggggtggtcgtgtttggggagcccatcaccgccagcctgggcaccgacggttcacactactggagcaagaactgggccaaggccgcagccttcgtcacatcaccccctgtcaacccagaccccaccacggcrgaccacctcacctgcttgctgtccagcggggacctccaggtgacaggcagcgcccactgcaccttcaccactgcccagaaggctgtgggcaaggacaacttcgcgctgatccccgagggcaccaacggcattgaggagcgcatgtcgatggtctgggagaaatgtgtggcctctgggaagatggacgagaatgagttcgtcgcrgtgaccagtacaaatgctgccaaaatcttcaatttttacccaaggaaggggcgagtggctgtgggctctgacgctgacctggtcatatggaaccccaaggccaccaagatcatctctgccaagacccacaatctgctggcggagatccacggtgtgccccgtggrctgtatgacgggcccgtccacgaggtgatggtgcctgccaagmcagggagtggcgctccggcccgcgcgtcctgcccaggcaagatctccgtscctcctgtgcgcaacctacatcagtcggggttcagcctatctgggtctcaggctgatgaccacatcgcccgacgcacagcacagaagatcatggcaccacctggcggccgctccaacatcacctctctctcctagacgcccaggaccggccctgtgagccgtgctggccccacccgaggccgcgggggccccagggcactcgcccccctccttagcattttcttttgtagaagtttctcgaaggtgcttggcggtcttgccttccccctccccacaggctctccttgtggggtcccaggtcctgctgccaagagcccctcaagagaagggctgaacctggggagatgtcactgccagggtgaggtggagccacatggcagggacaatgccrgcagcctgagcccaggcaccccagtgcccgctgggcccagcctggggacagggaacctgccgggctcacagtgtgggagcagctggacaccaggcttcttggtgaaccggcgaggggccgagtcccgcctggtgggcatttgcygccgcctccccaccaccagtcactgcctcgcagagccctacactcccgcagccgctcctcagaggcctgtgcccatcgcaggcctgggaggaaagtgggcgcagagccctcctgctcacacagctgctgagacttcagggacccatcagaacttggtgcagcacagccccgcccgtggagggtcccttttacgcaccccaaggcccacacctaagcttccatgtagccctcatccagggaagttttgcgatcctttaggaagacactgtcctcttattacagattgtgtatttccgtaggcttcttagtagcagctttgtacactgaggacactgtagccaggaacctgtgcatgccacccaccgcctggacaggcagtcatcctgcctctgatgtgaatcaggcccattaaagacgtctgggtttgaagccgcctgtgc

SEQ ID NO: 3614 - DNA, 1910 bp, Homo sapiens
gcggcagcatggcggcgggggcggctgaggcagctgtagcggccgtggaggaggtcggctcagccgggcastttgaggagctgctgcgcctcaaagccaagtccctccttgtggtccatttctgggcaccatgggctccacagtgtgcacagatgaacgaagttatggcagagttagctaaagaactccctcaagtttcatttgtgaagttggaagctgaaggtgttcctgaagtatctgaaaaatatgaaattagctctgttcccacttttctgtttttcaagaattctcagaaaatcgaccgattagatggtgcacatgccccagagttgaccaaaaaagttcagcgacatgcatctagtggctccttcctayccagcgctaatgaacatcttaaagaagatctcaaccttcgcttgaagaaattgactcatgctgccccctgcatgctgtttatgaaaggaactcctcaagaaccacgctgtggtttcagcaagcaratggtggaaattcttcacaaacataatattcagtttagcagttttgatatcttctcagatgaagaggttcgacagggactcaaagcctattccagttggcctacctatcctcagctctatgtttctggagagctcataggaggacttgatataattaaggagctagaagcatctgaagaactagatacaatttgtcccaaagctcccaaattagaggaaaggctcaaagtgctgacaaataaagcttctgtgatgctctttatgaaaggaaacaaacaggaagcaaaatgtggattcagcaaacaaattctggaaatactaaatagtactggtgttgaatatgaaacattcgatatattggaggatgaagaagttcggcaaggattaaaagcttactcaaattggccaacataccctcagctgtatgtgaaaggggagctggtgggaggattggatattgtgaaggaactgaaagaaaatggtgaattgctgcctatactgagaggagaaaattaataaatcttaaacttggtgcccaactattacggggtctggctctgtcacccaggctggagtgcagtggcacgattatggctcattgcagcctcgacttctcggggccaagcgatcctcctgcctcagccttytgagtagctgggaccacaggcgtgcaccaccatgcccacctaattttttatttcttgtagagatgaggtctcctgcctcagcctcccaaagtgctggaatttacaggagtgtcggctgtgccccttgtgatggatgaggaaaggtatccacctttctgaatcagacacaagctgcagtagcttcctgatgcctcattcaccaggatgggtaactttaaagacaagttttataactggcatcccatctggtttcagagtcttgggggcttttttcatacagctttgtctgatatttagagacattcagattcagaagccatgagttcagttagctcatgggccgggcacgtgcactgactcactggctgcagcagaacacrttgagggagtcttggtgcacttaggtcactgtaaggttctagggctgggagctgggatttgaaccaggatctgtcagcgcagccccagtgctgtgcttgaagcctcgtgccacactggctttgaggtagcacgctgcaagttagtgagtggagttgcccaagtctggggcttctgaaatgacctggtatttttatgttcctgttagaaatggtgtggctttcacaaattaagtgccaggctgggcacaatggctcgtgcttgtaatcccagcactttgggaggcggaggcaggcgggttgcttgagctccggagcttgagaccagcctgagcaacatggcgaaacctcatatctacaaaaaataaaaaattaactggtcatgg

SEQ ID NO: 3615 - DNA, 2215 bp, Homo sapiens
gtagaagcggctgactgtacctggtacctggggccactccagaggtcccctctgggaggtgatgcctctgtgcacaagcagcctgtgcaagaatgtcaagatggacttgccaccagcgccattacggcgtgtgaagccaccaccctaacacataagccctggaataattctgtgaaagcaggaaccctcatgacaaaatcctttccctccagtgctcagagcatgcaagtgttctgctgtctttggaatcttgtctgcaaacagctcgaagggctgtttgatggccccagggcttgccattgacggcggcagcatggcggcgggggcggctgaggcagctgtagcggccgtggaggaggtcggctcagccgggcastttgaggagctgctgcgcctcaaagccaagtccctccttgtggtccatttctgggcaccatgggctccacagtgtgcacagatgaacgaagttatggcagagttagctaaagaactccctcaagtttcatttgtgaagttggaagctgaaggtgttcctgaagtatctgaaaaatatgaaattagctctgttcccacttttctgtttttcaagaattctcagaaaatcgaccgattagatggtgcacatgccccagagttgaccaaaaaagttcagcgacatgcatctagtggctccttcctayccagcgctaatgaacatcttaaagaagatctcaaccttcgcttgaagaaattgactcatgctgccccctgcatgctgtttatgaaaggaactcctcaagaaccacgctgtggtttcagcaagcaratggtggaaattcttcacaaacataatattcagtttagcagttttgatatcttctcagatgaagaggttcgacagggactcaaagcctattccagttggcctacctatcctcagctctatgtttctggagagctcataggaggacttgatataattaaggagctagaagcatctgaagaactagatacaatttgtcccaaagctcccaaattagaggaaaggctcaaagtgctgacaaataaagcttctgtgatgctctttatgaaaggaaacaaacaggaagcaaaatgtggattcagcaaacaaattctggaaatactaaatagtactggtgttgaatatgaaacattcgatatattggaggatgaagaagttcggcaaggattaaaagcttactcaaattggccaacataccctcagctgtatgtgaaaggggagctggtgggaggattggatattgtgaaggaactgaaagaaaatggtgaattgctgcctatactgagaggagaaaattaataaatcttaaacttggtgcccaactattacggggtctggctctgtcacccaggctggagtgcagtggcacgattatggctcattgcagcctcgacttctcggggccaagcgatcctcctgcctcagccttytgagtagctgggaccacaggcgtgcaccaccatgcccacctaattttttatttcttgtagagatgaggtctcctgcctcagcctcccaaagtgctggaatttacaggagtgtcggctgtgccccttgtgatggatgaggaaaggtatccacctttctgaatcagacacaagctgcagtagcttcctgatgcctcattcaccaggatgggtaactttaaagacaagttttataactggcatcccatctggtttcagagtcttgggggcttttttcatacagctttgtctgatatttagagacattcagattcagaagccatgagttcagttagctcatgggccgggcacgtgcactgactcactggctgcagcagaacacrttgagggagtcttggtgcacttaggtcactgtaaggttctagggctgggagctgggatttgaaccaggatctgtcagcgcagccccagtgctgtgcttgaagcctcgtgccacactggctttgaggtagcacgctgcaagttagtgagtggagttgcccaagtctggggcttctgaaatgacctggtatttttatgttcctgttagaaatggtgtggctttcacaaattaagtgccaggctgggcacaatggctcgtgcttgtaatcccagcactttgggaggcggaggcaggcgggttgcttgagctccggagcttgagaccagcctgagcaacatggcgaaacctcatatctacaaaaaataaaaaattaactggtcatgg

SEQ ID NO: 3616 - DNA, 2954 bp, Homo sapiens
acttgtaggacttttatgtataattttaataagctctgcacacacacacacacacacacacatgcatgtacacacatgcacccatgtgcatactctcacatgaacacgtgtaacacacrcacacacacatgcacacactcatacaattacatatgccctatgtgtacacataaccacatatgtacatgcccatgcacaccctaagcacacattcacatgcacactcatgcacattatgcatgcacacacgttcatacatacccaaatakgcacttgtgtacacacgtgcacacccacacatgcacactatgaacacacagctacacattcatgtgcacacccatacatacacacacagacaaccccatcatctccctctcctacccccgcctcattaagagtctcatctccctctcctacccccgcctcattaagagtctcatctccctctccyaccccygcctcattaagagtctcatctccctctcctacccccgcctcattaagagtctcatctccctctcytacccccgcctcattaagagtctcatctccctctcccgcccccacctagggcccgttcatgagaagagcacctcctttccccccacctcctccaggaaccaggtttggagcttctcgagattattttccaccaggggatttcccaggtccaccacatgctccgtttgcaatgagaaatgtctatccaccgaggggttttcctccttaccctcccccaagacctggatttttcccccgacccccacattctgaaggtagaaccgggcccggcgccacccgtagactcccccgagcctccgcgtgagtggcccgagccgcaggttccccgccccggaacagcgagcagggcgcgaggctcgcctggaagccccggccccagccctggctccgaccccgacggctgtccaagcccgggggacgcgaccttcccggcctctggcctgggcggccccgccgcgggacggaggcggtggtgactcagccgtgccgcaktggcggggcgggggacggggcggcgccgagaccccggccctccgcgccacggagcgggacccacggctgcgggctccacctttcctgtgcccgccgggagggagcggcaggctcggcgtcggcccattgctcttcagcctcccttcaggaacgcccctgtcgcaggaagagcggcgagggaaggccccgttgcattagctaggcctggctgccttttgaagtcagcctttaaagtttgttggacagcaggtagcctcagtcttcagacttaacctgttgccggagacagagatttcctgttccatgaactggtgtagtgagagtctgttcagatttggcgccggtgtccaggtcttcaatccctgggaagactrcaaaaggagatccagaggaatgcatagaaagcgttttctgggtggactagaagctctgaactgcaagcatgcttacgagtaaatgcttactagcgtgcgtgcctgcagggaaaggtccctccttgtggtccatttctgggcaccatgggctccacagtgtgcacagatgaacgaagttatggcagagttagctaaagaactccctcaagtttcattttaaagttggaagctgaaggtgttcctgaagtatctgaaaaatatgaaattagctctgttcccacttttctgtttttcaaggaccaaaaaagttcagcgacatgcatctagtggctccttcctayccagcgctaatgaacatcttaaagaagatctcaaccttcgcttgaagaaattgactcatgctgccccctgcatgctgtttatgaaaggaactcctcaagaaccacgctgtggtttcagcaagcaratggtggaaattcttcacaaacataatattcagtttagcagttttgatatcttctcagatgaagaggttcgacagggactcaaagcctattccagttggcctacctatcctcagctctatgtttctggagagctcataggaggacttgatataattaaggagctagaagcatctgaagaactagatacaatttgtcccaaagctcccaaattagaggaaaggctcaaagtgctgacaaataaagcttctgtgatgctctttatgaaaggaaacaaacaggaagcaaaatgtggattcagcaaacaaattctggaaatactaaatagtactggtgttgaatatgaaacattcgatatattggaggatgaagaagttcggcaaggattaaaagcttactcaaattggccaacataccctcagctgtatgtgaaaggggagctggtgggaggattggatattgtgaaggaactgaaagaaaatggtgaattgctgcctatactgagaggagaaaattaataaatcttaaacttggtgcccaactattgtaagaaatatttaattacattgggagcagttcatgatttagtcctcagaaatggactaggaatagaaaattcctgctttctcagttacatgttttgtgtatttcacaatgtcgtgctaaataaatgtatgttacatttttttcccaccaaaaatagaatgcaataaacatcttcaaattattaacaataattgtatgaaaaaagtgtatctttacagcagtattaaacatacagctactataattaacccaccttaaatctctttttcttagtacatgagtatcttctagcagttaagaaaggcagtcttcagaaaatggagaactgtggcggaatgcagtacacaacagtatttaggacaactcctttgccaacacaatggctcccctcgctggtgaaagatctctttacagcttaggaaaaacaacggaaattagtttctgatgtcattgctgagctcggcactggttacattgcagaggcagtgtaggatgtctgcaggtttagagactcatttcacaaggcaccagtagtgaattatcaagaaacatt

SEQ ID NO: 3617 - DNA, 2647 bp, Homo sapiens
gctacctcaggatgtagtgtaacaagggggctgggtgggcagagtgggcctgtgagcgcccgcatcccccagctccccccsgcagccggctccacaatggtctgctccggttgccgggtgcggattcgggttccggacgcaagrctgcgagttctccgctgcttgttgtggccggggttactgcggcraccgccagagcagccttggcgctatgttggagccaggggctacccctcagcggtacttggggctggtcctgggggagccacgcagggttgtggcagcgctgcctgaaagtatgagactggattcgaatcctcatggttttccatgggaaatggtgatatgtgcagctgttgctgcattttttgctgttctcctttttctgtggagaagttttasatcggttaggagtcggctttatgtgggaagagagaaaaagcttgctataatgctttctggactaattgaagaaaaatgtaaactacttgaaaaatttagccttgttcaaaaagagtatgaagactatgaagtagcgtcatcgttagaggatgccagctttgagaaggcggcagcagaagcacgaagtttggaggcaacctgtgaaaagttgaacaggtccaattctgaacttgagcatgaaattctctgtctagaaaaagagttaaaagaagagaaatctaaacattcgcaacaaaatgaattgatggyggatatttcaaaaacgatacagcctctagcagatgagtcagaatccctcaaatcacaagtagctgaagccaaaatgatcttcaagagatttaaaatgactgagaaacaactgaagatagcaataaaagatgctttgaatgaaaactctcaccttcaggaaagccagaaacagcttttgcaagaagctgaagtatggaacgaacaagtgaatgaacttaataaacagaaaataacatttgaagactccaaagtacatgcagaacaagttctaaatgataaagaaaatcacatcaagactctgactgaacatttgctaaagatgaaagattgggctgctaggcttagagaagacgtaacggatgatgataacttagaagtgaacagtgaatcagaagatggtgcttacttagatgatcctctaaaaggagctctgaagaaactgattcatgctactaagttaaatgcttctttaaaaaccttagaaggagaaagaaaccaaatttatatccagttacctgaaattgataaaacaaaggaagagcttacagagcatattaaaaatcttcggactgaacaagcatctttgcagtcagaaaacacacattttgaaagtgagaatcagaagcttcaacagaaacttaaagtaatgactgaattatatcaagaaaatgaaatgaaactctacaggaaattaacagtagaggaaaatagccggttagagaaagaagagaaactttctaaggtagacaaaaagatcagccatgccactaaagagctggagacctacagacagcgagccaaagatcttgaagaagaattggagagaactattcattattatcaacggcagattatttcccatgagaaaaaggcacatcataactggttggcagcttgggctgctgaaagaaacctcaatgatttaaggaaagaaaatgctcacaacagacaaaaattagctgaaacagagtataaaataaaacttctaaaaaaagatccttatgtacttgatgttccaaatacagcatttggcagagagcattccccatatggtccctcatcattgggtcggccttcatctgaaacgagagcttttctctctcccgcaactctgttggagggtccactcagactctcacctttgcctccagggggggaaggaagaggctcaagaggcccagggaatcctctggaccatcagattaccaaggmaagaggagaatcaagctgtgaaaggttaaccgatcctcacaggtctccttctgacactgggtccctgtcacttcygagggaacaggaccrtaggatgatgtttcctccaccagcgcaatcatatcttgattcagctcttcctccacaaaggcaagacagattttattctaactctggtggactgtctggaccagcagaactcagaagttttaatatgcctcctttggataaaatggatgggtcaatgccttcagaaatggaatccagtagaaatgacaccaaagatgatcttggtaatttaaatrtscctgattcatctctccctgctgaaaatgcagcaactggccctcgctttgttcctccacctcttgccctaatcagaggtccactgtttccagtggatacaaggggcccgttcatgagaagagcacctcctttccccccacctcctccaggaaccaggtttggagcttctcgagattattttccaccaggggatttcccaggtccaccacatgctccgtttgcaatgagaaatgtctatccaccgaggggttttcctccttaccctcccccaagacctggatttttcccccgacccccacattctgaaggtagaagtgagttcccttcagggctgattccgccttcaaatgagcctgctacggaacatccaaaaccgcagcaagatacctggcaatatttttgctctcttcaaaagtaa

SEQ ID NO: 3618 - DNA, 3426 bp, Homo sapiens
tgaaacagggaatcgtgtcttactcatctttgtatctccagtgtctagcagttcctgatacatagttttagctgaattttggaacatggccactgcctcaccaaagtcagatactactaataaccacagtggaaggttgcagttacaggtaactgtttctagtgccaaacttaagagaagaaagaactggttcggaacagcaatatatacagaagtagttgtagatgaggaaattaggaaaacagcaaaatccagtagttcttctaatcyaaaatgggatgaacagctaactgtaaatgttacgccacagactacattggaatttcgagtttggagtcatcacactttaaaagcagatgcttaattaggaaatgcaacgacagatctgaaacaagctctgttgatacacaatagaaaactggaaagagtgaaagaacaattaaaactttccttagaaaacaagaatggcatagcacaaactggtgaattgacagttgtgcttgatggattggtgattgagcaagaaaatataacaaactgcagctcaactccagccatagaaatacagcaaaatggtgatgccttacatgaaaatggagagccttcagcaaggacaactgccaggttggctattgaaggcacgaatggaatagataatcatgtacctacaagcactctagtccaaaactcatgctgctcgtatgtagttaatggagacaacataccttcatctccatctcaggttgctgccagacccaaaaatacaccagccccaaaactactcacatctgagcctgccgatgacactgttaatggagaatcatcctcatttgcaccaactgataatgcttctgtcatgggtattccagtagtgtctgaagaaaatgccttgtctccaaattgcactagtactactgttgaagatcctccagttcaagaaatactgacttcctcagaaaacaatgaatgcattccttctaccagtgcagaattgggatctgaatctagaagtatattagaccctgacacctctaattctggaagtagttctgcttttgaaacagccaaatcaagacagccagatgggtgtatggatccagtatagcaggagtctgggaatgccaacacagaaaccttgccatcagggtgggaacaaagaaaatatcctcatggtagaacctattatgtggatcataatactcaaastaccacacgggagagaccacaasctttaccttcaggttgggaaagaagagttgatgatcgtggaagagcttattatgtggatcataacaccagaasaacaacatggcagcggcctaccatggaatgggtcagaaattttgaacagtggcaatctcagcagaaccaacctcagggagctatgcaacagtttaaccaatgatacctctattcagcttcaatgttagccgcagaaaatgaccctcatggacctttgccaccaggccgggaaaaaagagtggattcaacagacagggtttactttgtgaatcgtaatacaaaaacaacccagtgggaagatccaagaactcaaggcttacagaatgaagaacctctgccagaaggctgggaaataagatatactcgtgaaggtgtaaggtactttgttaatcacaatgcaagaacaacaacattcaaagatccttgcaatgggaagtcatccataactaaaggtggtccacaaattgattatgaacacagctttaggcggaaacttgctcacttccgttatttgtgccagtctaatgcactacccagtcatgtaaagatcaatgtgtcccggcagacattgtttgaagattccttccaacagattatggcattaaaaccttatgacttgaggaggtgcttatatgtaatatttagaggagaagaaggacttgattatggtggcctagcaagagaatggcttttcttgctttcacatgaagttttgaacccaatgtaatgcttatttgagtatgtggggaagaacaactattctctgcagataaatccagcatcaaccattaatccagaccatctttcatactactgtttcattggtcgttttattgccatggcactatttcatggaaagcttatagatactggtttctctttaccattctacaagcatatgttaagtaaaaaacttactattaaggatttggaatctattgatactgaattttataactcccttatctggataagagataacaacattgaagaatgtggcttagaactgtacttttctgttgacatggagagttggggaaaagttacttcacatgacctgaagttgggagtttccaatattctggtgactgaggagaacaaagatgaatatattggtttaatgacagaatggcatttttctcgaggagtacaagaacagaccaaagctttccttgatggttttaatggagttgttcctcatcagtggctacagtacttcaatgaaaaagaattagaggttacgttgtgtggcacacagcaggttgacttggcagattggcagagaaatactgtttatcaacattatacaagaaacagcaagcaaatcattcggttctggcagtttgtgaaagagacagacaatgaagtaagaatgctactattgcagttcgtcactgkaacctgccgtttatctctaggaggatttgctgagctcatgggaagtaatgggcctcaaaagttttgcattgaaaaagttggcaaagatacttggttaccaagaagccatacatgttttaatctcttggatctaccaccatataagagttatgaacaactaaaggaaaaacttctttttgcaatagaagagacagagggatgtggacaagaatgaatgtggcttcttattttggaggatctcttgcattcaaataccccagccaagaaaaattgcacatagtgtatataagctgttcattctgtacagtgaattttctgaacctctcaaagtatgttttccattcttccacagcaatatgcaaaacatatttcatccttttctactttatttgttgtcctttgaaatgattgaccaggaaaaagatcatccttaaattttgaagcaagtgagagactttattaaaaatacatatgtatctatataagcatatgtgatagtggctctagttttatagagttgcaagtgtattaaacatgacagctgttcattcataaagatctggatttgctttaccttgttaatattatctaggcgaaaaagtgcaaattgctccatgttcttctctcccttgtgtaacatctcctgagggtgtttatttgtatgtctgttcaggaaggtattaagggcttaggccaaatcttactttgagtatgttaaaaaaaaaatgctgctggcttttctgaagacaggtgcttgaacctgtcagttggttttaaataaatagt

SEQ ID NO: 3619 - DNA, 3600 bp, Homo sapiens
ggccggggtgggggtcgggggagagtcaggtgtcggcgagctggagctcggtgtgccggcacccagtgactgctggcggcctgggctgctggggccgacgcctgggtggctgccgccgccgcacctgctgcgagatagtgatcttcgtcgcggaagggtgagggcgcccactgcaggaggaggtgcaggtgccgcggccgcctggctgccgggagccgaaagcttcgcgcctgggttgtgagctccttgaaacagggaatcgtgtcttactcatctttgtatctccagtgtctagcagttcctgatacatagttttagctgaattttggaacatggccactgcctcaccaaagtcagatactactaataaccacagtggaaggttgcagttacaggtaactgtttctagtgccaaacttaagagaagaaagaactggttcggaacagcaatatatacagaagtagttgtagatgaggaaattaggaaaacagcaaaatccagtagttcttctaatcyaaaatgggatgaacagctaactgtaaatgttacgccacagactacattggaatttcgagtttggagtcatcacactttaaaagcagatgcttaattaggaaatgcaacgacagatctgaaacaagctctgttgatacacaatagaaaactggaaagagtgaaagaacaattaaaactttccttagaaaacaagaatggcatagcacaaactggtgaattgacagttgtgcttgatggattggtgattgagcaagaaaatataacaaactgcagctcaactccagccatagaaatacagcaaaatggtgatgccttacatgaaaatggagagccttcagcaaggacaactgccaggttggctattgaaggcacgaatggaatagataatcatgtacctacaagcactctagtccaaaactcatgctgctcgtatgtagttaatggagacaacataccttcatctccatctcaggttgctgccagacccaaaaatacaccagccccaaaactactcacatctgagcctgccgatgacactgttaatggagaatcatcctcatttgcaccaactgataatgcttctgtcatgggtattccagtagtgtctgaagaaaatgccttgtctccaaattgcactagtactactgttgaagatcctccagttcaagaaatactgacttcctcagaaaacaatgaatgcattccttctaccagtgcagaattgggatctgaatctagaagtatattagaccctgacacctctaattctggaagtagttctgcttttgaaacagccaaatcaagacagccagatgggtgtatggatccagtatagcaggagtctgggaatgccaacacagaaaccttgccatcagggtgggaacaaagaaaatatcctcatggtagaacctattatgtggatcataatactcaaastaccacacgggagagaccacaasctttaccttcaggttgggaaagaagagttgatgatcgtggaagagcttattatgtggatcataacaccagaasaacaacatggcagcggcctaccatggaatgggtcagaaattttgaacagtggcaatctcagcagaaccaacctcagggagctatgcaacagtttaaccaatgatacctctattcagcttcaatgttagccgcagaaaatgaccctcatggacctttgccaccaggccgggaaaaaagagtggattcaacagacagggtttactttgtgaatcgtaatacaaaaacaacccagtgggaagatccaagaactcaaggcttacagaatgaagaacctctgccagaaggctgggaaataagatatactcgtgaaggtgtaaggtactttgttaatcacaatgcaagaacaacaacattcaaagatccttgcaatgggaagtcatccataactaaaggtggtccacaaattgattatgaacacagctttaggcggaaacttgctcacttccgttatttgtgccaattatggcattaaaaccttatgacttgaggaggtgcttatatgtaatatttagaggagaagaaggacttgattatggtggcctagcaagagaatggcttttcttgctttcacatgaagttttgaacccaatgtaatgcttatttgagtatgtggggaagaacaactattctctgcagataaatccagcatcaaccattaatccagaccatctttcatactactgtttcattggtcgttttattgccatggcactatttcatggaaagcttatagatactggtttctctttaccattctacaagcatatgttaagtaaaaaacttactattaaggatttggaatctattgatactgaattttataactcccttatctggataagagataacaacattgaagaatgtggcttagaactgtacttttctgttgacatggagagttggggaaaagttacttcacatgacctgaagttgggagtttccaatattctggtgactgaggagaacaaagatgaatatattggtttaatgacagaatggcatttttctcgaggagtacaagaacagaccaaagctttccttgatggttttaatggagttgttcctcatcagtggctacagtacttcaatgaaaaagaattagaggttacgttgtgtggcacacagcaggttgacttggcagattggcagagaaatactgtttatcaacattatacaagaaacagcaagcaaatcattcggttctggcagtttgtgaaagagacagacaatgaagtaagaatgctactattgcagttcgtcactgkaacctgccgtttatctctaggaggatttgctgagctcatgggaagtaatgggcctcaaaagttttgcattgaaaaagttggcaaagatacttggttaccaagaagccatacatgttttaatctcttggatctaccaccatataagagttatgaacaactaaaggaaaaacttctttttgcaatagaagagacagagggatgtggacaagaatgaatgtggcttcttattttggaggatctcttgcattcaaataccccagccaagaaaaattgcacatagtgtatataagctgttcattctgtacagtgaattttctgaacctctcaaagtatgttttccattcttccacagcaatatgcaaaacatatttcatccttttctactttatttgttgtcctttgaaatgattgaccaggaaaaagatcatccttaaattttgaagcaagtgagagactttattaaaaatacatatgtatctatataagcatatgtgatagtggctctagttttatagagttgcaagtgtattaaacatgacagctgttcattcataaagatctggatttgctttaccttgttaatattatctaggcgaaaaagtgcaaattgctccatgttcttctctcccttgtgtaacatctcctgagggtgtttatttgtatgtctgttcaggaaggtattaagggcttaggccaaatcttactttgagtatgttaaaaaaaaaatgctgctggcttttctgaagacaggtgcttgaacctgtcagttggttttaaataaatagt

SEQ ID NO: 3620 - DNA, 1524 bp, Homo sapiens
agtcgccgctgggcaccccgagaccatggggaagctcgtggcgctggtcctgctgggggtcggcctgtccttagtcggggagatgttyctggcgtttagagaaagggtgaatgcctctcgagaagtggagccagtagaacctgaaaactgccaccttattgaggaacttgaaagtggctctgaagatattgatatacttcctagtgggctggcttttatctccagtctgcaggtctgttggagtttgctggaagtccactccagaccctgtttgcctgggtatcaccagtggaggctgcagaacggcaaatattgctgcctgatttttcttctggaagcttcatcccagaggggcatccgcctgtatgagggattaaaatatccaggcatgccaaactttgcgccagatgaaccaggaaaaatcttcttgatggatctgaatgaacaaaacccaagggcacaagcrctagaaatcagtggtggatttracaaagaattatttaatccacatgggatcagtattttcatcgacaaagacaatactgtrtatctttatgttgtgaatcatccccacatgaagtccactgtggagatatttaaatttgaggaacaacaacgttctctggtatacctgaaaactataaaacatgaacttctcaaaagtgtgaatgacattgtggttcttggaccagaacagttctatgmcaccagagaccactattttaccaactccctcctgtcattttttgagatgatcttggatcttcgctggacttatgttcttttctacagcccaagggaggttaaagtggtggccaaaggattttgtagtgccaatgggatcacagtctcagcagaccagaagtatgtctatgtagctgatgtagcagctaagaacattcacataatggaaaaacatgataactgggatttaactcaactgaaggtgatacagttgggcaccttagtggataacctgactgtcgatcctgccacaggagacattttggcaggatgccatcctaatcctatgaagctactgaactataaccctgaggaccctccaggatcagaagtacttcgcatccagaatgttttgtctgagaagcccagggtgagcaccgtgtatgccaacaatggctctgtgcttcagggcacctctgtggcttctgtgtaccatgggaaaattctcataggcaccgtatttcacaaaactctgtactgtgagctctagactctagatagtaaaaaaaaaaaaaaaaagtctacatattttgtaaaagtaaactgataattgtatgataagtggcactgtaagtaaatagcaaacaccaaccagtgagtgtggcttttcttatggatagaagtaaaggagcagacagagattccttgatagccatcaaattgcaagtcaggttaatgacagtccaacaagaagccaaactttacggatctttgttagcagccccaatgttctttctacaataaaacatgtggactatgtccagtgaggtctccgactca

SEQ ID NO: 3621 - DNA, 2568 bp, Homo sapiens
ttggaaggagcaaaatgggacttttggctgaaagtgctgagctcctgcggtgggggctgaccgcaagccrcgccttctgtgcacctggtcggcccagctagctgcsgacccggcggggaggggyggggcgggccaatcggcgctgccccagcagggctgcggctgcaggcaggcagagcctcctagcccgtcggtgtctgcgcccatcgatccctttgtctatccccgaccatggcgaagctgattgcgctcaccctcttggggatgggactggcactcttcaggaaccaccagtcttcttaccaaacacgacttaatgctctccgagaggtacaacccgtagaacttcctaactgtaatttagttaaaggaatcgaaactggctctgaagacwtggagatactgcctaatggactggctttcattagctctggattaaagtatcctggaataaagagcttcaaccccaacagtcctggaaaaatacttctgatggacctgaatgaagaagatccaacagtgttggaattggggatcactggaagtaaatttgatrtatcttcatttaaccctcatgggattagcacattcacagatgaagataatgccatgtacctcctggtggtgaaccatccagatgccaagtccacagtggagttgtttaaatttcaagaagaagaaaaatcgcttttgcatctaaaaaccatcagacataaacttctgcctaatttgaatgatattgttgctgtgggacctgagcacttttatggcacaaatgatcactattttcttgacccctacttacratcctgggagatgtatttgggtttagcgtggtcgtatgttgtctactatagtccaagtgaagttcgagtggtggcagaaggatttgattttgctaatggaatcaacatttcacccgatggcaagtatgtctatatagctgagttgctggctcataagattcatgtgtatgaaaagcatgctaattggactttaactccattgaagtcccttgactttaataccctcgtggataacatatctgtggatcctgagacaggagacctttgggttggatgccatcccaatggcatgaaaatcttcttctatgactcagagaatcctcctgcatcagaggtgcttcgaatccagaacattctaacagaagaacctaaagtgacacaggtttatgcagaaaatggcacagtgttgcaaggcagtacagttgcctctgtgtacaaagggaaactgctgattggcacagtgtttcacaaagctctttactgtgagctctaacagaccgatttgcacccatgccatagaaactgaggccattatttcaaccgcttgccatattccgaggacccagtgttcttagctgaacaatgaatgctgaccctaaatgtggacatcatgaagcatcaaagcactgtttaactgggagtgatatgatgtgtagggcttttttttgagaatacactatcaaatcagtcttggaatacttgaaaacctcatttaccataaaaatccttctcactaaaatggataaatcagttatgtcaattgtcagatattaaataacagtgtgtgaccccaaaagtacttaccctaaaacatgtgttgcctgraagcacatgtgtgtatcgctgccttgccatgtcttgttcagaagacacaggggagcagggttagctcacgtgtctttagaactccagtactcacccagggactccagttcacaggccagaaaacatatgcattatgaagttcccctctactccatgcacatagtaagtctgactatggcagtcagacttacttactcccattttcccttcgatatatgactttttctcagtaaatattaacctgaaytattccaactccccttgtactcttgctttttcaattctcctgttgcaatgacacataggaaaatcttaaaattcttgggagtgttgtcacacctgaaaattatgagtctctatgatcttggcacaaattgtacatttgagtgtctttgacttggttaaaggaagtttgttcacttcgatgaytggatacagaatgaatcccataattgacatgggcgaagctaaaagtgtccccaaagactacactgttgttgaggtggtggtagtgctggtgggtttttgtttaatatttaaacttcttgttgtggaggctgaaaagaaaaaaaataatagaaaggtaaacaaacaaataaatagaaaagatcaacaacccctttggctatctactgagacatgactaggaagaaaacatgactttatcattttgttatagaarctgatatataaaggttacacattttcatttatttgtttttctgatttgaaggtataaccttcatgatgaattacttcttcagggtgttaaggcagtgactttagaaacaaatttttttcttgtttttgttttgtttttgagaccgaatctcactctgttgcccaggctggagtgcagtggtgcgatcttggctcactgcaacttctacctccgaggttcaagagattcttgtgcctcagcctcccggatagctgg

SEQ ID NO: 3622 - DNA, 2609 bp, Homo sapiens
gaataatcaagaagttacaccagggacagcatttcgctgcaggtctgttggagtttgctggaagtccactccagaccctgtttgcctgggtatcaccagtggaggctgcagaacggcaaatattgctgcctgatttttcttctggaagcttcatcccagaggggcatccgcctgtatgagggattaaaatatccaggcatgccaaactttgcgccagatgaaccaggaaaaatcttcttgatggatctgaatgaacaaaacccaagggcacaagcrctagaaatcagtggtggatttracaaagaattatttaatccacatgggatcagtattttcatcgacaaagaacacgacttaatgctctccgagaggtacaacccgtagaacttcctaactgtaatttagttaaaggaatcgaaactggctctgaagacwtggagatactgcctaatggactggctttcattagctctggattaaagtatcctggaataaagagcttcaaccccaacagtcctggaaaaatacttctgatggacctgaatgaagaagatccaacagtgttggaattggggatcactggaagtaaatttgatrtatcttcatttaaccctcatgggattagcacattcacagatgaagataatgccatgtacctcctggtggtgaaccatccagatgccaagtccacagtggagttgtttaaatttcaagaagaagaaaaatcgcttttgcatctaaaaaccatcagacataaacttctgcctaatttgaatgatattgttgctgtgggacctgagcacttttatggcacaaatgatcactattttcttgacccctacttacratcctgggagatgtatttgggtttagcgtggtcgtatgttgtctactatagtccaagtgaagttcgagtggtggcagaaggatttgattttgctaatggaatcaacatttcacccgatggcaagtatgtctatatagctgagttgctggctcataagattcatgtgtatgaaaagcatgctaattggactttaactccattgaagtcccttgactttaataccctcgtggataacatatctgtggatcctgagacaggagacctttgggttggatgccatcccaatggcatgaaaatcttcttctatgactcagagaatcctcctgcatcagaggtgcttcgaatccagaacattctaacagaagaacctaaagtgacacaggtttatgcagaaaatggcacagtgttgcaaggcagtacagttgcctctgtgtacaaagggaaactgctgattggcacagtgtttcacaaagctctttactgtgagctctaacagaccgatttgcacccatgccatagaaactgaggccattatttcaaccgcttgccatattccgaggacccagtgttcttagctgaacaatgaatgctgaccctaaatgtggacatcatgaagcatcaaagcactgtttaactgggagtgatatgatgtgtagggcttttttttgagaatacactatcaaatcagtcttggaatacttgaaaacctcatttaccataaaaatccttctcactaaaatggataaatcagttatgtcaattgtcagatattaaataacagtgtgtgaccccaaaagtacttaccctaaaacatgtgttgcctgraagcacatgtgtgtatcgctgccttgccatgtcttgttcagaagacacaggggagcagggttagctcacgtgtctttagaactccagtactcacccagggactccagttcacaggccagaaaacatatgcattatgaagttcccctctactccatgcacatagtaagtctgactatggcagtcagacttacttactcccattttcccttcgatatatgactttttctcagtaaatattaacctgaaytattccaactccccttgtactcttgctttttcaattctcctgttgcaatgacacataggaaaatcttaaaattcttgggagtgttgtcacacctgaaaattatgagtctctatgatcttggcacaaattgtacatttgagtgtctttgacttggttaaaggaagtttgttcacttcgatgaytggatacagaatgaatcccataattgacatgggcgaagctaaaagtgtccccaaagactacactgttgttgaggtggtggtagtgctggtgggtttttgtttaatatttaaacttcttgttgtggaggctgaaaagaaaaaaaataatagaaaggtaaacaaacaaataaatagaaaagatcaacaacccctttggctatctactgagacatgactaggaagaaaacatgactttatcattttgttatagaarctgatatataaaggttacacattttcatttatttgtttttctgatttgaaggtataaccttcatgatgaattacttcttcagggtgttaaggcagtgactttagaaacaaatttttttcttgtttttgttttgtttttgagaccgaatctcactctgttgcccaggctggagtgcagtggtgcgatcttggctcactgcaacttctacctccgaggttcaagagattcttgtgcctcagcctcccggatagctgg

SEQ ID NO: 3623 - DNA, 1380 bp, Homo sapiens
agtcgccgctgggcaccccgagaccatggggaagctcgtggcgctggtcctgctgggggtcggcctgtccttagtcggggagatgttyctggcgtttagagaaagggtgaatgcctctcgagaagtggagccagtagaacctgaaaactgccaccttattgaggaacttgaaagtggctctgaagatattgatatacttcctagtgggctggcttttatctccagtggattaaaatatccaggcatgccaaactttgcgccagatgaaccaggaaaaatcttcttgatggatctgaatgaacaaaacccaagggcacaagcrctagaaatcagtggtggatttracaaagaattatttaatccacatgggatcagtattttcatcgacaaagacaatactgtrtatctttatgttgtgaatcatccccacatgaagtccactgtggagatatttaaatttgaggaacaacaacgttctctggtatacctgaaaactataaaacatgaacttctcaaaagtgtgaatgacattgtggttcttggaccagaacagttctatgmcaccagagaccactattttaccaactccctcctgtcattttttgagatgatcttggatcttcgctggacttatgttcttttctacagcccaagggaggttaaagtggtggccaaaggattttgtagtgccaatgggatcacagtctcagcagaccagaagtatgtctatgtagctgatgtagcagctaagaacattcacataatggaaaaacatgataactgggatttaactcaactgaaggtgatacagttgggcaccttagtggataacctgactgtcgatcctgccacaggagacattttggcaggatgccatcctaatcctatgaagctactgaactataaccctgaggaccctccaggatcagaagtacttcgcatccagaatgttttgtctgagaagcccagggtgagcaccgtgtatgccaacaatggctctgtgcttcagggcacctctgtggcttctgtgtaccatgggaaaattctcataggcaccgtatttcacaaaactctgtactgtgagctctagactctagatagtaaaaaaaaaaaaaaaaagtctacatattttgtaaaagtaaactgataattgtatgataagtggcactgtaagtaaatagcaaacaccaaccagtgagtgtggcttttcttatggatagaagtaaaggagcagacagagattccttgatagccatcaaattgcaagtcaggttaatgacagtccaacaagaagccaaactttacggatctttgttagcagccccaatgttctttctacaataaaacatgtggactatgtccagtgaggtctccgactca

SEQ ID NO: 3624 - DNA, 2748 bp, Homo sapiens
gaataatcaagaagttacaccagggacagcatttcgctgcaggtctgttggagtttgctggaagtccactccagaccctgtttgcctgggtatcaccagtggaggctgcagaacggcaaatattgctgcctgatttttcttctggaagcttcatcccagaggggcatccgcctgtatgagttggaaggagcaaaatgggacttttggctgaaagtgctgagctcctgcggtgggggctgaccgcaagccrcgccttctgtgcacctggtcggcccagctagctgcsgacccggcggggaggggyggggcgggccaatcggcgctgccccagcagggctgcggctgcaggcaggcagagcctcctagcccgtcggtgtctgcgcccatcgatccctttgtctatccccgaccatggcgaagctgattgcgctcaccctcttggggatgggactggcactcttcaggaaccaccagtcttcttaccaaacacgacttaatgctctccgagaggtacaacccgtagaacttcctaactgtaatttagttaaaggaatcgaaactggctctgaagacwtggagatactgcctaatggactggctttcattagctctggattaaagtatcctggaataaagagcttcaaccccaacagtcctggaaaaatacttctgatggacctgaatgaagaagatccaacagtgttggaattggggatcactggaagtaaatttgatrtatcttcatttaaccctcatgggattagcacattcacagatgaagataatgccatgtacctcctggtggtgaaccatccagatgccaagtccacagtggagttgtttaaatttcaagaagaagaaaaatcgcttttgcatctaaaaaccatcagacataaacttctgcctaatttgaatgatattgttgctgtgggacctgagcacttttatggcacaaatgatcactattttcttgacccctacttacratcctgggagatgtatttgggtttagcgtggtcgtatgttgtctactatagtccaagtgaagttcgagtggtggcagaaggatttgattttgctaatggaatcaacatttcacccgatggcaagtatgtctatatagctgagttgctggctcataagattcatgtgtatgaaaagcatgctaattggactttaactccattgaagtcccttgactttaataccctcgtggataacatatctgtggatcctgagacaggagacctttgggttggatgccatcccaatggcatgaaaatcttcttctatgactcagagaatcctcctgcatcagaggtgcttcgaatccagaacattctaacagaagaacctaaagtgacacaggtttatgcagaaaatggcacagtgttgcaaggcagtacagttgcctctgtgtacaaagggaaactgctgattggcacagtgtttcacaaagctctttactgtgagctctaacagaccgatttgcacccatgccatagaaactgaggccattatttcaaccgcttgccatattccgaggacccagtgttcttagctgaacaatgaatgctgaccctaaatgtggacatcatgaagcatcaaagcactgtttaactgggagtgatatgatgtgtagggcttttttttgagaatacactatcaaatcagtcttggaatacttgaaaacctcatttaccataaaaatccttctcactaaaatggataaatcagttatgtcaattgtcagatattaaataacagtgtgtgaccccaaaagtacttaccctaaaacatgtgttgcctgraagcacatgtgtgtatcgctgccttgccatgtcttgttcagaagacacaggggagcagggttagctcacgtgtctttagaactccagtactcacccagggactccagttcacaggccagaaaacatatgcattatgaagttcccctctactccatgcacatagtaagtctgactatggcagtcagacttacttactcccattttcccttcgatatatgactttttctcagtaaatattaacctgaaytattccaactccccttgtactcttgctttttcaattctcctgttgcaatgacacataggaaaatcttaaaattcttgggagtgttgtcacacctgaaaattatgagtctctatgatcttggcacaaattgtacatttgagtgtctttgacttggttaaaggaagtttgttcacttcgatgaytggatacagaatgaatcccataattgacatgggcgaagctaaaagtgtccccaaagactacactgttgttgaggtggtggtagtgctggtgggtttttgtttaatatttaaacttcttgttgtggaggctgaaaagaaaaaaaataatagaaaggtaaacaaacaaataaatagaaaagatcaacaacccctttggctatctactgagacatgactaggaagaaaacatgactttatcattttgttatagaarctgatatataaaggttacacattttcatttatttgtttttctgatttgaaggtataaccttcatgatgaattacttcttcagggtgttaaggcagtgactttagaaacaaatttttttcttgtttttgttttgtttttgagaccgaatctcactctgttgcccaggctggagtgcagtggtgcgatcttggctcactgcaacttctacctccgaggttcaagagattcttgtgcctcagcctcccggatagctgg

SEQ ID NO: 3625 - DNA, 477 bp, Homo sapiens
cggcacagcggacaccaggactccaaaatggcgtcagttggtgagtgtccggccccagtaccagtgaaggacaagaaacttctggaggtcaaactgggggagctgccaagctggatcttgatgcgggacttcagtcctagtggcattttcggagcgtttcaaagaggttactaccggtactacaacaagtacatcaatgtgaagaaggggagcatctcggggattaccatggtgctggcatgctacgtgctctttagctactccttttcctacaagcatctcaagcacgagcggctccgcaaataccactgaagaggacacrctytgcacccccccaccccacgaccttggcccgagcccctcygtgaggaacacaatctcaatcgttgctgaatcmytycatatcctaataggaattaacctccarataaaacatgactggyacgtgtgctgattgcctgcctgtctgccgtagcc

SEQ ID NO: 3626 - DNA, 1450 bp, Homo sapiens
acccggcgcctgcactaccccgcccggagatwcccttccgacgcccgcaccgcctccccgtcactcattctaggcccgcacggtgattggcttgcggctagcgggaggtgaagaaggccgccttgtccgattggcccgcacgcagtggcgccggtcacgtggggggcgacgtttcgcgccaatttcggttggccggccacagtccaccgcgcggagattctcagcttccccaggagcaagacctctgagcccgccaagcgcggccgcacggccctcggcagcgatggcactgaaggactacgcgctagagaaggaaaaggttaagaagttcttacaagagttctaccaggatgatgaactcgggaagaagcagttcaagtatgggaaccagttggttcggctggctcatcgggaacaggtggctctgtatgtggacctggacgacgtagccgaggatgaccccgagttggtggactcaatttgtgagaatgccaggcgctacgcgaagctctttgctgatgccgtacaagagctgctgcctcagtacaaggagagggaagtggtaaataaagatgtcctggacgtttacattgagcatcggctaatgatggagcagcggagtcrggaccctgggatggtccgaagcccccagaaccagtaccctgctgaactcatgcgcagatttgagctgtattttcaaggccctagcagcarcaagcctcgtgtgatccgggaagtgcgggctgactctgtggggaagttggtaactgtgcgtggaatcgtcactcgtgtctctgaagtcaaacccaagatggtggtggccacttacacttgtgaccagtgtggggcagagacctaccagccgatccagtctcccactttcatgcctctgatcatgtgcccaagccaggagtgccaaaccaaccgctcaggagggcggctgtatctgcagacacggggctccagattcatcaaattccaggagatgaagatgcaagaacatagtgatcaggtgcctgtgggaaatatccctcgtagtatcacggtgctggtagaaggagagaacacaaggattgcccagcctggagaccacgtcagcgtcactggtattttcttgccaatcctgcgcactgggttccgacaggtggtacagggtttactctcagaaacctacctggaagcccatcggattgtgaagatgaacaagagtgaggatgatgagtctggggctggagagctcaccagggaggagctgaggcaaattgcagatgtsatatttgccaccgtccgtgaactggtctcagggggccgaagtgtscggttctctgaggcagagcagcgctgtgtatctcgtggcttcacacccgcccagttccaggyggctctggatgaatatgaggagctcaatktctggcaggtcaatgcttcccggacacggatcacttttgtc

SEQ ID NO: 3627 - DNA, 2908 bp, Homo sapiens
acccggcgcctgcactaccccgcccggagatwcccttccgacgcccgcaccgcctccccgtcactcattctaggcccgcacggtgattggcttgcggctagcgggaggtgaagaaggccgccttgtccgattggcccgcacgcagtggcgccggtcacgtggggggcgacgtttcgcgccaatttcggttggccggccacagtccaccgcgcggagattctcagcttccccaggagcaagacctctgagcccgccaagcgcggccgcacggccctcggcagcgatggcactgaaggactacgcgctagagaaggaaaaggttaagaagttcttacaagagttctaccaggatgatgaactcgggaagaagcagttcaagtatgggaaccagttggttcggctggctcatcgggaacaggtggctctgtatgtggacctggacgacgtagccgaggatgaccccgagttggtggactcaatttgtgagaatgccaggcgctacgcgaagctctttgctgatgccgtacaagagctgctgcctcagtacaaggagagggaagtggtaaataaagatgtcctggacgtttacattgagcatcggctaatgatggagcagcggagtcrggaccctgggatggtccgaagcccccagaaccagtaccctgctgaactcatgcgcagatttgagctgtattttcaaggccctagcagcarcaagcctcgtgtgatccgggaagtgcgggctgactctgtggggaagttggtaactgtgcgtggaatcgtcactcgtgtctctgaagtcaaacccaagatggtggtggccacttacacttgtgaccagtgtggggcagagacctaccagccgatccagtctcccactttcatgcctctgatcatgtgcccaagccaggagtgccaaaccaaccgctcaggagggcggctgtatctgcagacacggggctccagattcatcaaattccaggagatgaagatgcaagaacatagtgatcaggtgcctgtgggaaatatccctcgtagtatcacggtgctggtagaaggagagaacacaaggattgcccagcctggagaccacgtcagcgtcactggtattttcttgccaatcctgcgcactgggttccgacaggtggtacagggtttactctcagaaacctacctggaagcccatcggattgtgaagatgaacaagagtgaggatgatgagtctggggctggagagctcaccagggaggagctgaggcaaattgcagaggaggatttctacgaaaagctggcagcttcaatcgccccagaaatatacgggcatgaagatgtgaagaagkcactgctgctcctgckagtcgggggtgtggaccagtctcctcgaggcatgaaaatccggggcaacatcaacatctgtctgatgggggatcctggtgtggccaagtctcagctcctgtcatacattgatcgactggcgcctcgcagccagtacacaacaggccggggctcctcaggagtggggcttacggcagctgtgctgagagactccgtgagtggagaactgaccttagagggtggggccctggtgctggctgaccagggtgtgtgctgcattgatgagttcgacaagatggctgaggccgaccgcacagccatccaygaggtcatggagcagcagaccatctccattgccaaggcyrgcattctcaccacactcaatgcycgctgctccatcctggctgccgccaaccctgcctacgggcgctacaaccctcgccgcagcctggagcagaacatacagctacctgctgcactgctctcccggtttgacctcctctggctgattcaggaccggcccgaccgagacaatgacctacggttggcccagcacatyacctatgtgcaccagcacagccggcagcccccctcccagtttgaacctctggacatgaagctcatgaggcgttacatagccatgtgccgcgagaagcagcccatggtgccagagtctctggctgactacatcacagcagcatacgtggagatgaggcgagaggcttgggctagtaaggatgccacctatacttctgcccggaccctgctggctatcctgcgcctttccactgctctggcacgtctgagaatggtrgatgtggtggagaaagaagatgtgaatgaagccatcaggctaatggagatgtcaaaggactctcttctaggagacaaggggcagacagctaggactcagagrccagcagatgtsatatttgccaccgtccgtgaactggtctcagggggccgaagtgtscggttctctgaggcagagcagcgctgtgtatctcgtggcttcacacccgcccagttccaggyggctctggatgaatatgaggagctcaatktctggcaggtcaatgcttcccggacacggatcacttttgtctgattccagcctgcttgcaaccctggggtcctcttgttccctgctggcctgccccttgggaaggggcagtgatgcctttgaggggaaggaggagcccctctttctcccatgctgcacttactccttttgctaataaaagtgtttgtagattgtcatcttctagcctgggcctgacttccattaaaacagggttttgtgcgttttttagattcctgttcgtttttatgctatttcatccactcagtaaattacctgagtaaagtgcatctccctgccaggcccccagtatagacactggggatgcggcaaggactaagcggtccctgctgtttggagatacttaagatggggctccactttttgagccccccgactcccttatttggtcttatactgcctgtgtgcaagtcaggctctggggatatggcgccagtatgaaatgcagggtctcttggtttttcccctttt

SEQ ID NO: 3628 - DNA, 1465 bp, Homo sapiens
  misc_feature (1)...(1465): n = A,T,C or G
gtagatgctgcccccttggaccctcggccttctcctgctggccacagtcagaggaaaagaggtctgctacggacaacttggctgcttttctgatgaaaaaccatgggcaggaacccttcagcgacctgtaaaattacttccctggtcccccgagsacattgacacccgctttcttctgtacacaaatgaaaatccaaacaacttccaactaatcactggcacggaaccagacaccattgaggcttcaaacttccaactggaccgcaagacacgcttcatcatccatggcttcttagacaaggcggaggacagctggccatcggacatgtgcaagaaaatgtttgaagtggagaaggtgaactgcatctgtgtggactggaggcacgggtcccgggcaatgtacacccaagccgtgcaaaacattcgggttgttggggcggagacagctttcttaatacaagcactgtcvacgcagctrgggtacagccttgaggacgtgcatgtcatcggccacagcctgggcgcgcacacggccgcggaggcgggcaggaggctggggggccgcgtgggcaggatcacagggctggatccagcagggccgtgcttccaggatgaacctgaggaggttcggttggatccatctgacgccgtgtttgtggatgtgattcacacagattcttctcccatagttccttccctaggtttcggaatgagccaaaaggtgggccatctggatttctttccaaatggaggaaaggaaatgcccggatgtaagaaaaatgtcctttcaaccattactgatattgatggaatatgggaaggaattggtggctttgtgtcttgcaatcacctaagaagcttcgagtattactcaagcagcgtcctcaaccctgatggcttcctgggctatccctgtgcctcctacgatgagtttcaggasagtaagtgtttcccttgtccagctgaaggatgccccaaaatggggcactatgctgaccaatttaaggggaaaacaagtgctgtggaacaaacctttttcctgaacacaggagagagtggtaactttactagttgragatataagntatcagtcacactttctggaaaagagaaagtgaatgggtacatcaggattgctttgtatggaagtaatgaaaactcraaacaatatgagattttcaaaggatccctcaaaccagatgcaagtcacacgtgtgctattgatgtggattttaatgttggaaaaatacagaaagttaaattcctctggaacaaacrtgggataaatctatctgagcccaaactgggggcttcccaaatcacagtgcaaagtggtgaagatgggactgagtataatttttgtagcagcgacactgtggaagaaaacgtcttgcaatctctttacccttgttaaaaacgtggtgcrgctattgcggtaataaaatctttaatgcactcggtttga

SEQ ID NO: 3629 - DNA, 1354 bp, Homo sapiens
  misc_feature (1)...(1354): n = A,T,C or G
gtagatgctgcccccttggaccctcggccttctcctgctggccacagtcagaggaaaagaggtctgctacggacaacttggctgcttttctgatgaaaaaccatgggcaggaacccttcagcgacctgtaaaattacttccctggtcccccgagsacattgacacccgctttcttctgtacacaaatgaaaatccaaacaacttccaagtaagagcagctaatcactggcacggaaccagacaccattgaggcttcaaacttccaactggaccgcaagacacgcttcatcatccatggcttcttagacaaggcggaggacagctggccatcggacatgtgcaagaaaatgtttgaagtggagaaggtgaactgcatctgtgtggactggaggcacgggtcccgggcaatgtacacccaagccgtgcaaaacattcgggttgttggggcggagacagctttcttaatacaagcactgtcvacgcagctrgggtacagccttgaggacgtgcatgtcatcggccacagcctgggcgcgcacacggccgcggaggcgggcaggaggctggggggccgcgtgggcaggatcacagggctggatccagcagggccgtgcttccaggatgaacctgaggaggttcggttggatccatctgacgccgtgtttgtggatgtgattcacacagattcttctcccatagttccttccctaggtttcggaatgagccaaaaggtgggccatctggatttctttccaaatggaggaaaggaaatgcccggatgtaagaaaaatgtcctttcaaccattactgatattgatggaatatgggaaggaattggtggctttgtgtcttgcaatcacctaagaagcttcgagtattactcaagcagcgtcctcaaccctgatggcttcctgggctatccctgtgcctcctacgatgagtttcaggastgtttcccttgtccagctgaaggatgccccaaaatggggcactatgctgaccaatttaaggggaaaacaagtgctgtggaacaaacctttttcctgaacacaggagagagtggtaactttactagttgragatataagntatcagtcacactttctggaaaagagaaagtgaatgggtacatcaggattgctttgtatggaagtaatgaaaactcraaacaatatgagattttcaaaggatccctcaaaccagatgcaagtcacacgtgtgctattgatgtggattttaatgttggaaaaatacagaaagttaaattcctctggaacaaacrtgggataaatctatctgagcccaaactgggggcttcccaaatcacagtgcaaagtggtgaagatgggactga

SEQ ID NO: 3630 - DNA, 378 bp, Homo sapiens
atgaacaaacacaatctcagattagtacaattagcttcagagttgatattaatagaaattattccaaaattattcttgtcacaagtaactactatatcccacataaaaagggaaaaaatcccacccaatcacagaaaaggcatcctctgtatgtttccgkggcaatgcgttgtttatgtattctcaaattttgtctggctagttatccaccgcttctccaatggattcattcagtttcttggagaaccatatagactaatgacagcatctgggrcacacggacgtatcaagttcatggtggacattcctattataaaaaatactcaggtcttgagaattcctgtgctgaaggatyccaaaatgctttctaaaaagcat

SEQ ID NO: 3631 - DNA, 1924 bp, Homo sapiens
cggggaggcggtgcgggcgtcggaagggwatctccgggcggggtagtgcaggcgccgggtttcccgcggtccgagctggcgcgggcggaggagaatcgctcttaaagggccagcgcacacgcgttcttttgttccggggccgcagggcggggcaggcccgactttcgccgtcttcttgtctactctccagaacggccatgatttcccaattcttcattctgtcctccaagggggacccgctcatctacaaagacttccgcggggacagtggcggccgggatgtggccgagctcttctaccggaagctgacgggactgccaggagacgagtccccggttgtcatgcatcaccatggccgtcatttcattcacatcagacacagcggcctctatttggtggtcacaacttcagaaaacgtttctcccttcagcctcctagaactgctctccaggttggccacccttctgggcgattactgtggctccctgggcgaggggaccatctcccgcaatgtggctctggtatacgaactcctggatgaagtgctggactatggctatgtacagaccacatccacggagatgctgaggaatttcatccagacggaagctgtggtcagcaagcccttcagcctctttgacctcagcagcgttggcttgtttggggctgagacacaacagagcaaagtggcccccagcagtgcagccagccgccccgtcctgtccagtcgctctgaccagagccaaaagaatgaagtttttttggatgtggtcgagagattgtctgtactgatagcatctaatggatccctgctgaaggtggatgtgcagggagagattcggctcaagagcttccttcctagcggctctgagatgcgcattggcttgacggaagagttttgtgtggggaagtcagagctgagaggttatgggccaggaatccgggtcgatgaagtctcgtttcacagctctgtgaatctggacgaatttgagtctcatcgaatcctccgcttgcaaccacctcagggcgagctgactgtgatgcggtaccaactctccgatgacctcccctcaccgctccccttccggctcttcccctctgtgcagtgggaccgaggctcaggccggctccaggtttatctaaagttgcgatgtgacctgctctcaaagagccaagccctcaatgtcaggctgcacctccccctgcctcgaggggtggtcagcctgtctcaggagctgagcagcccagagcagaaggctgagctggcagagggagcccttcgctgggacctgcctcgggtgcaaggaggctctcaactctcaggccttttccagatggacgtcccagggcccccaggacctcccagccatgggctctccacctcggcctctcctctggggctgggccctgccagtctctccttcgagcttccccggcacacgtgctctggcctccaggtccgattcctcaggctggccttcaggccatgcggcaatgccaacccccacaagtgggtgcgacacctaagccacagcgacgcctatgtcattcggatctgaggctccccaaacgaggacacgacggccaaggtggcagtttgtcccacgggaggacagtcgtttcttttccagcctcctggccttcggactctgaatctgggcaggaagagtcctcagtcccaagaccaggagggggcaatgggcccagcctttctgtggtatctgatgcaggaaggactgcagtggatcagaacttacaaaccaaacttttattctgagaaactggctgtacaatatctaaaaagaaagtgacatgaaggaagcaatctacaacttccttccgcttagcgwgcatgcatgtgtgtacgtgcacgtgtgtacrtgtctgcatgtgtgggaatccgggggctggcaggtggagcatc

SEQ ID NO: 3632 - DNA, 1668 bp, Homo sapiens
cggggaggcggtgcgggcgtcggaagggwatctccgggcggggtagtgcaggcgccgggtttcccgcggtccgagctggcgcgggcggaggagaatcgctcttaaagggccagcgcacacgcgttcttttgttccggggccgcagggcggggcaggcccgactttcgccgtcttcttgtctactctccagaacggccatgatttcccaattcttcattctgtcctccaagggggacccgctcatctacaaagacttccgcggggacagtggcggccgggatgtggccgagctcttctaccggaagctgacgggactgccaggagacgagtccccggttgtcatgcatcaccatggccgtcatttcattcacatcagacacagcggcctctatttggtggtcacaacttcagaaaacgtttctcccttcagcctcctagaactgctctccaggttggccacccttctgggcgattactgtggctccctgggcgaggggaccatctcccgcaatgtggctctggtatacgaactcctggatgaagtgctggactatggctatgtacagaccacatccacggagatgctgaggaatttcatccagacggaagctgtggtcagcaagcccttcagcctctttgacctcagcagcgttggcttgtttggggctgagacacaacagagcaaagtggcccccagcagtgcagccagccgccccgtcctgtccagtcgctctgaccagagccaaaagaatgaagtttttttggatgtggtcgagagattgtctgtactgatagcatctaatggatccctgctgaaggtggatgtgcagggagagattcggctcaagagcttccttcctagcggctctgagatgcgcattggcttgacggaagagttttgtgtggggaagtcagagctgagaggttatgggccaggaatccgggtcgatgaagtctcgtttcacagctctgtgaatctggacgaatttgagtctcatcgaatcctccgcttgcaaccacctcagggcgagctgactgtgatgcggtaccaactctccgatgacctcccctcaccgctccccttccggctcttcccctctgtgcagtgggaccgaggctcaggccggctccaggtttatctaaagttgcgatgtgacctgctctcaaagagccaagccctcaatgtcaggctgcacctccccctgcctcgaggggtggtcagcctgtctcaggagctgagcagcccagagcagaaggctgagctggcagagggagcccttcgctgggacctgcctcgggtgcaaggaggctctcaactctcaggccttttccagatggacgtcccagggcccccaggacctcccagccatgggctctccacctcggcctctcctctggggctgggccctgccagtctctccttcgagcttccccggcacacgtgctctggcctccaggtccgattcctcaggctggccttcaggccatgcggcaatgccaacccccacaagtgggtgcgacacctaagccacagcgacgcctatgtcattcggatctgaggctccccaaacgaggacacgacggccaagaggcctaacatcgtgtcccagctcagccaagcctgcgatggagccataacgagtcgtccagggcgtcttctcgtccacc

SEQ ID NO: 3633 - DNA, 1720 bp, Homo sapiens
cggggaggcggtgcgggcgtcggaagggwatctccgggcggggtagtgcaggcgccgggtttcccgcggtccgagctggcgcgggcggaggagaatcgctcttaaagggccagcgcacacgcgttcttttgttccggggccgcagggcggggcaggcccgactttcgccgtcttcttgtctactctccagaacggccatgatttcccaattcttcattctgtcctccaagggggacccgctcatctacaaagacttccgcggggacagtggcggccgggatgtggccgagctcttctaccggaagctgacgggactgccaggagacgagtccccggttgtcatggactatggctatgtacagaccacatccacggagatgctgaggaatttcatccagacggaagctgtggtcagcaagcccttcagcctctttgacctcagcagcgttggcttgtttggggctgagacacaacagagcaaagtggcccccagcagtgcagccagccgccccgtcctgtccagtcgctctgaccagagccaaaagaatgaagtttttttggatgtggtcgagagattgtctgtactgatagcatctaatggatccctgctgaaggtggatgtgcagggagagattcggctcaagagcttccttcctagcggctctgagatgcgcattggcttgacggaagagttttgtgtggggaagtcagagctgagaggttatgggccaggaatccgggtcgatgaagtctcgtttcacagctctgtgaatctggacgaatttgagtctcatcgaatcctccgcttgcaaccacctcagggcgagctgactgtgatgcggtaccaactctccgatgacctcccctcaccgctccccttccggctcttcccctctgtgcagtgggaccgaggctcaggccggctccaggtttatctaaagttgcgatgtgacctgctctcaaagagccaagccctcaatgtcaggctgcacctccccctgcctcgaggggtggtcagcctgtctcaggagctgagcagcccagagcagaaggctgagctggcagagggagcccttcgctgggacctgcctcgggtgcaaggaggctctcaactctcaggccttttccagatggacgtcccagggcccccaggacctcccagccatgggctctccacctcggcctctcctctggggctgggccctgccagtctctccttcgagcttccccggcacacgtgctctggcctccaggtccgattcctcaggctggccttcaggccatgcggcaatgccaacccccacaagtgggtgcgacacctaagccacagcgacgcctatgtcattcggatctgaggctccccaaacgaggacacgacggccaaggtggcagtttgtcccacgggaggacagtcgtttcttttccagcctcctggccttcggactctgaatctgggcaggaagagtcctcagtcccaagaccaggagggggcaatgggcccagcctttctgtggtatctgatgcaggaaggactgcagtggatcagaacttacaaaccaaacttttattctgagaaactggctgtacaatatctaaaaagaaagtgacatgaaggaagcaatctacaacttccttccgcttagcgwgcatgcatgtgtgtacgtgcacgtgtgtacrtgtctgcatgtgtgggaatccgggggctggcaggtggagcatc

SEQ ID NO: 3634 - DNA, 1185 bp, Homo sapiens
atgaaggattccgtcaaactggttattttgcatcatgtagaccactatttcccaacctgcaagtgcatcatggcctttggcatttctatgatgtggctgcttttaacaacaacttgtttgatctgtggaactttaaatgctggtggattccttgatttggaaaatgaagtgaatcctgaggtgtggatgaatactagtgaaatcatcatctacaatggctaccccagtgaagagtatgaagtcaccactgaagatgggtatatactccttgtcaacagaattccttatgggcgaacacatgctaggagcacagcagatgcaggttatgatgtatggatgggaaacagtcggggaaacacttggtcaagaagacacaaaacactctyagagacagatgagaaattctgggcctttagttttgatgaaatggccaaatatgatctcccaggagtaatagacttcattgtaaataaaactggtcaggagaaattgtatttcattggacattcacttggcactacaatagggtttgtagccttttccaccatgcctgaactggcacaaagaatcaaaatgaattttgccttgggtcctacgatctcattcaaatatcccacgggcatttttaccaggttttttctacttccaaattccataatcaaggctgtttttggtaccaaaggtttctttttagaagataagaaaacgaagatagcttctaccaaaatctgcaacaataagataytctggttgatatgtagcgaatttatgtccttatgggctggatccaacaagaaaaatatgaatcagagtcgaatggatgtgtatatgtcacatgctcccactggttcatcagtacacaacattctgcatataaaacagctttaccactctgatgaattcagagcttatgactggggaaatgacgctgataatatgaaacattacaatcagagtcatccccctatatatgacctgactgccatgaaagtgcctactgctatttgggctggtggacatgatgtcctcgtaacaccccaggatgtggccaggatactccctcaaatcaagagtcttcattactttaagctattgccagattggaaccactttgattttgtctggggcctcgatgcccctcaacggatgtacagtgaaatcatagctttaatgaaggcatattcc

SEQ ID NO: 3635 - DNA, 486 bp, Homo sapiens
ggccagagacctgttgtgtttttgcagcatggtttgcttgcatcagccacaaactggatttccaacctgccgaacaacagccttgccttcattctggcagatgctggttatgatgtgtggctgggcaacagcagaggaaacacctgggccagaagaaacttgtactattcaccagattcagttgaattctgggctttcagatcccaaatgtggcagcttttagcagcagcatgctggatgcttcttcttggatctatgtatggttatgacaagaaaggaaacaatgcaaaccctgaagctaatatgaatattcatgccctgtttgcagacaatgcctactggcttgagaattatgcyaatggaagccttggattccttctagcagatgcaggttatgatgtatggatgggaaacagtcggggaaacacttggtcaagaagacacaaaacactctyagagacagatgagaaattctgggcctttagg

SEQ ID NO: 3636 - DNA, 1388 bp, Homo sapiens
  misc_feature (1)...(1388): n = A,T,C or G
atactaaccagccagagaaacagaatcctaactatttctgaggaaactgcaggtccaaaatgtggctgcttttaacaatggcaagtttgatatctgtactggggactacacatggtttgtttggaaaattacatcctggaagccctgaagtgactatgaacattagtcagatgattacttattggggatacccaaatgaagaatatgaagttgtgactgaagatggttatattcttgaagtcaatagaattccttatgggaagaaaaattcagggaatacaggccagagacctgttgtgtttttgcagcatggtttgcttgcatcagccacaaactggatttccaacctgccgaacaacagccttgccttcattctggcagatgctggttatgatgtgtggctgggcaacagcagaggaaacacctgggccagaagaaacttgtactattcaccagattcagttgaattctgggctttcagctttgatgaaatggctaaatatgaccttccagccacaatcgacttcattgtaaagaaanctggacagaagcagctacactatgttggccattcccagggcaccaccattggttttattgccttttccaccaatcccagcctggctaaaagaatcaaaaccttctatgctctagctcctgttgccactgtgaagtatacaaaaagccttataaacaaacttagatttgttcctcaatccctcttcaagwttatatttggtgacaaaatattctacccacacaacttctttgatcaatttcttgctactgaagtgtgctcccgtgagatgytgaatctcctttgcagcaatgccttatttataatttgtggatttgacagtaagaactttaacacgagtcgcttggatgtgtatctatcacataatccagcaggaacttctgttcaaaacatgttccattggacccaggctgttaagtctgggaaattccaagcttatgactggggaagcccagttcagaataggatgcactatgatcagtcccarcctccctactacaatgtgacagccatgaatgtaccaattgcagtgtggaacggtggcaaggacctgttggctgacccccaagatgttggccttttgcttccaaaactccccaatcttatttaccacaaggagattcctttttayaatcacttggactttatctgggcaatggatgcccctcaagaagtttacaatgacattgtttctatgatatcagaagataaaaagtagttctggatttaaagaattatccgtttgtttttccaaaatactttattctctcatacayagtattttcataatgtttgacatgcagtgcttctttctgtaattttgactttagaaatatattggcatcaacaa

SEQ ID NO: 3637 - DNA, 1813 bp, Homo sapiens
cagtggaacagcgggtcaggcggtgggcgcctgagcgaggggctagagcgggatgggcgggcggagcaagcctgccagcctgggcggggcctcggcacaggagctggctgcgggagcccgccgtcctgagtcgcaggccgaggagacagtgagtgcgcgccctgagtcgcaggccgaggagacagtgagtgcgcgccctgagtcgcaggccgaggagacagtgagtgcgcgccctgggcgccccgccccagcccccagccccttccytgggcccccgcaaggcgggaacgcgagcgcctcccccgagctgtgtctcgagacctttgtcctcccckcacccctcggcccgctgcctgccctttactggccccctccctcatgcccgtccctcagcaccctctcctttcaactaactttcccgctcccgacagtggctgcacttcgtgacgctgagatacagaaggacgtgcagacctactacgggcaggtgctgaagagatcggcagacctccagaccaacggctgtgtcaccacagccaggccggtccccaagcacatccgggaagccttgcaaaatgtacacgaagaagtagccctaagatattatggctgtggtctggtgatccctgagcatctagaaaactgctggattttggatctgggtagtggaagtggcagagattgctatgtacttagccagctggttggtgaaaaaggacacgtgactggaatagacatgaccaaaggccaggtggaagtggctgaaaagtatcttgactatcacatggaaaaatatggcttccaggcatctaatgtgacttttattcatggctacattgagaagttgggagaggctggaatcaagaatgagagccatgatattgttgtatcaaactgtgttattaaccttgtgcctgataaacaacaagtgcttcaggaggcatatcgggtgctgaagcatggtggggagttatatttcagtgacgtctatacgagccttgaactgccagaagaaatcaggacacacaaagttttatggggtgagtgtctgggtggtgctttatactggaaggaacttgctgtccttgctcaaaaaattgggttctgccctccacgtttggtcactgccaatctcattacaattcaaaacaaggaactggaaagagttatcggtgactgtcgttttgtttctgcaacatttcgcctcttcaaacactctaagacaggaccaaccaagagatgccaagttatttacaatggaggaattacaggacatgaaaaagaactaatgtttgatgccaattttacatttaaggaaggtgaaattgttgaagtggatgaagaaacagcagctatcttgaagaattcaagatttgctcaagattttctgatcagaccaattggagagaagttgccaacatctggaggctgttctgctttggagttaaaggatataatcacagatccatttaagcttgcagaagagtctgacagtatgaagtccagatgtgtccctgatgctgctggaggctgctgtggcacaaagaaaagctgctaaatctatagccaaccaggggaccacagtagtgggcaagagtgatctgcatgttttttaacctgcttttccccatagcacagaccataagaaacaacaaatggggccgggcacagtggctcatgcctataatcccagcactttgggaggccgaggcaggcagatcacctgaggtcaggagtttgataccagcctggccaacatggtgaaatcctgtctctaccaaaaatacaraaaaaattagctgggcatggtggt

SEQ ID NO: 3638 - DNA, 1833 bp, Homo sapiens
aattatttgtattaattttaattttattttatttttaaagagatggagtttcgctatgttgcccagggtggtctggaactctcaggctcaggtgatcctcctgcctgggtctcccaaagggctgggatttcaggcgtgcgccgccatgccctgccgcaggctttccgattctgaaccatagagtcaatgaaactgtcctccatcccctccagagatgtttgcctggaccctgttttcctcaggatatcaatgaatagttcatgagtttagtgagcaaaggtcaacctccatcaggcgcatgcgtcccttccttttcccatggaggaagagacgcctcttttccttccgctttgcttgtcttttggccccggcgactcaccatcgtcagtgcgcaaccgttcgctaactgaaatgatggcgactggaacgccagagtctcaagcgcggttcggtcagtccgtgaargggcttctcacggagaaggtgaccacctgtggtactgacgtaatcgcgctcaccaagcaggtgctgaarggctcccggagctccgagctgctaggtcaggcagctcgaaacatggtactccaggaagatgccatcttgcactcagaagatagtttaaggaagatggcaataataacaacacatcttcaataccagcaagaagctattcagaagaatgttgaacagtcatcggatctacaggaccagttgaatcatctgttgaaatagaatgacattggctgcacttcgtgacgctgagatacagaaggacgtgcagacctactacgggcaggtgctgaagagatcggcagacctccagaccaacggctgtgtcaccacagccaggccggtccccaagcacatccgggaagccttgcaaaatgtacacgaagaagtagccctaagatattatggctgtggtctggtgatccctgagcatctagaaaactgctggattttggatctgggtagtggaagtggcagagattgctatgtacttagccagctggttggtgaaaaaggacacgtgactggaatagacatgaccaaaggccaggtggaagtggctgaaaagtatcttgactatcacatggaaaaatatggcttccaggcatctaatgtgacttttattcatggctacattgagaagttgggagaggctggaatcaagaatgagagccatgatattgttgtatcaaactgtgttattaaccttgtgcctgataaacaacaagtgcttcaggaggcatatcgggtgctgaagcatggtggggagttatatttcagtgacgtctatacgagccttgaactgccagaagaaatcaggacacacaaagttttatggggtgagtgtctgggtggtgctttatactggaaggaacttgctgtccttgctcaaaaaattgggttctgccctccacgtttggtcactgccaatctcattacaattcaaaacaaggaactggaaagagttatcggtgactgtcgttttgtttctgcaacatttcgcctcttcaaacactctaagacaggaccaaccaagagatgccaagttatttacaatggaggaattacaggacatgaaaaagaactaatgtttgatgccaattttacatttaaggaaggtgaaattgttgaagtggatgaagaaacagcagctatcttgaagaattcaagatttgctcaagattttctgatcagaccaattggagagaagttgccaacatctggaggctgttctgctttggagttaaaggttagtttggctttcactacctgagagaactattttatttatttatttttgagatggagtctctctctgtcacc

SEQ ID NO: 3639 - DNA, 2388 bp, Homo sapiens
aattatttgtattaattttaattttattttatttttaaagagatggagtttcgctatgttgcccagggtggtctggaactctcaggctcaggtgatcctcctgcctgggtctcccaaagggctgggatttcaggcgtgcgccgccatgccctgccgcaggctttccgattctgaaccatagagtcaatgaaactgtcctccatcccctccagagatgtttgcctggaccctgttttcctcaggatatcaatgaatagttcatgagtttagtgagcaaaggtcaacctccatcaggcgcatgcgtcccttccttttcccatggaggaagagacgcctcttttccttccgctttgcttgtcttttggccccggcgactcaccatcgtcagtgcgcaaccgttcgctaactgaaatgatggcgactggaacgccagagtctcaagcgcggttcggtcagtccgtgaargggcttctcacggagaaggtgaccacctgtggtactgacgtaatcgcgctcaccaagcaggtgctgaarggctcccggagctccgagctgctaggtcaggcagctcgaaacatggtactccaggaagatgccatcttgcactcagaagatagtttaaggaagatggcaataataacaacacatcttcaataccagcaagaagctattcagaagaatgttgaacagtcatcggatctacaggaccagttgaatcatctgttgaaatagaatgacattggctgcacttcgtgacgctgagatacagaaggacgtgcagacctactacgggcaggtgctgaagagatcggcagacctccagaccaacggctgtgtcaccacagccaggccggtccccaagcacatccgggaagccttgcaaaatgtacacgaagaagtagccctaagatattatggctgtggtctggtgatccctgagcatctagaaaactgctggattttggatctgggtagtggaagtggcagagattgctatgtacttagccagctggttggtgaaaaaggacacgtgactggaatagacatgaccaaaggccaggtggaagtggctgaaaagtatcttgactatcacatggaaaaatatggcttccaggcatctaatgtgacttttattcatggctacattgagaagttgggagaggctggaatcaagaatgagagccatgatattgttgtatcaaactgtgttattaaccttgtgcctgataaacaacaagtgcttcaggaggcatatcgggtgctgaagcatggtggggagttatatttcagtgacgtctatacgagccttgaactgccagaagaaatcaggacacacaaagttttatggggtgagtgtctgggtggtgctttatactggaaggaacttgctgtccttgctcaaaaaattgggttctgccctccacgtttggtcactgccaatctcattacaattcaaaacaaggaactggaaagagttatcggtgactgtcgttttgtttctgcaacatttcgcctcttcaaacactctaagacaggaccaaccaagagatgccaagttatttacaatggaggaattacaggacatgaaaaagaactaatgtttgatgccaattttacatttaaggaaggtgaaattgttgaagtggatgaagaaacagcagctatcttgaagaattcaagatttgctcaagattttctgatcagaccaattggagagaagttgccaacatctggaggctgttctgctttggagttaaaggatataatcacagatccatttaagcttgcagaagagtctgacagtatgaagtccagatgtgtccctgatgctgctggaggctgctgtggcacaaagaaaagctgctaaatctatagccaaccaggggaccacagtagtgggcaagagtgatctgcatgttttttaacctgcttttccccatagcacagaccataagaaacaacaaatgggccactgcgcccggccataaatgaattatttttaagaggcattgattaaagattcacagcaaatcactagttaagcagattttttttctatttcctacttcaaagttctggtgccacatagtggtcagaaatggaacagagaagctgtcttaagccttgttcaagaagcaggaaaggcatcagaagaagtaacagttggcagagggtctcaggaaaaacatcttccttctgatcttttgcatagcaccttytggaattttcatcatgtttgcttattaaacaaagctcctactgccatcatactaatcatgcaaaaagattgccaaatcatgtttggtaggaggacttttgaggtagcttttgaacaaatgtttttttcttttttctttttttttgcaataaagaaaacaaattaatcat

SEQ ID NO: 3640 - DNA, 1717 bp, Homo sapiens
gcccgccgtcctgagtcgcaggccgaggagacagtgagtgcgcgccctgagtcgcaggccgaggagacatggctgcacttcgtgacgctgagatacagaaggacgtgcagacctactacgggcaggtgctgaagagatcggcagacctccagaccaacggctgtgtcaccacagccaggccggtccccaagcacatccgggaagccttgcaaaatgtacacgaagaagtagccctaagatattatggctgtggtctggtgatccctgagcatctagaaaactgctggattttggatctgggtagtggaagtggcagagattgctatgtacttagccagctggttggtgaaaaaggacacgtgactggaatagacatgaccaaaggccaggtggaagtggctgaaaagtatcttgactatcacatggaaaaatatggcttccaggcatctaatgtgacttttattcatggctacattgagaagttgggagaggctggaatcaagaatgagagccatgatattgttgtatcaaactgtgttattaaccttgtgcctgataaacaacaagtgcttcaggaggcatatcgggtgctgaagcatggtggggagttatatttcagtgacgtctatacgagccttgaactgccagaagaaatcaggacacacaaagttttatggggtgagtgtctgggtggtgctttatactggaaggaacttgctgtccttgctcaaaaaattgggttctgccctccacgtttggtcactgccaatctcattacaattcaaaacaaggaactggaaagagttatcggtgactgtcgttttgtttctgcaacatttcgcctcttcaaacactctaagacaggaccaaccaagagatgccaagttatttacaatggaggaattacaggacatgaaaaagaactaatgtttgatgccaattttacatttaaggaaggtgaaattgttgaagtggatgaagaaacagcagctatcttgaagaattcaagatttgctcaagattttctgatcagaccaattggagagaagttgccaacatctggaggctgttctgctttggagttaaaggatataatcacagatccatttaagcttgcagaagagtctgacagtatgaagtccagatgtgtccctgatgctgctggaggctgctgtggcacaaagaaaagctgctaaatctatagccaaccaggggaccacagtagtgggcaagagtgatctgcatgttttttaacctgcttttccccatagcacagaccataagaaacaacaaatgggccactgcgcccggccataaatgaattatttttaagaggcattgattaaagattcacagcaaatcactagttaagcagattttttttctatttcctacttcaaagttctggtgccacatagtggtcagaaatggaacagagaagctgtcttaagccttgttcaagaagcaggaaaggcatcagaagaagtaacagttggcagagggtctcaggaaaaacatcttccttctgatcttttgcatagcaccttytggaattttcatcatgtttgcttattaaacaaagctcctactgccatcatactaatcatgcaaaaagattgccaaatcatgtttggtaggaggacttttgaggtagcttttgaacaaatgtttttttcttttttctttttttttgcaataaagaaaacaaattaatcat

SEQ ID NO: 3641 - DNA, 2368 bp, Homo sapiens
gtgaaaatcgcagtggagcgaacaagggggatgctgataccgacctcctggttggaaagcctgtagagcagcgcggatgacagtggaacagcgggtcaggcggtgggcgcctgagcgaggggctagagcgggatgggcgggcggagcaagcctgccagcctgggcggggcctcggcacaggagctggctgcgggagcccgccgtcctgagtcgcaggccgaggagacagtgagtgcgcgccctgagtcgcaggccgaggagacagtgagtgcgcgccctgagtcgcaggccgaggagacagtgagtgcgcgccctgggcgccccgccccagcccccagccccttccytgggcccccgcaaggcgggaacgcgagcgcctcccccgagctgtgtctcgagacctttgtcctcccckcacccctcggcccgctgcctgccctttactggccccctccctcatgcccgtccctcagcaccctctcctttcaactaactttcccgctcccgacagtggctgcacttcgtgacgctgagatacagaaggacgtgcaggtgagagctgtagggcctggaatggcccaagtggagcctaggctaatggaagtctggcctggcccgcaccctgtcccccgggactcctggagtcggggtagggcagggtctaggcttcgacctttccagggaactgaggtcggccaagtggaggtggaggtggtgacggagccctcgcgctgcagtcacagctctcttctccctctctacccctcactccactgtgggacgctgggtcagacctactacgggcaggtgctgaagagatcggcagacctccagaccaacggctgtgtcaccacagccaggccggtccccaagcacatccgggaagccttgcaaaatgtacacgaagaagtagccctaagatattatggctgtggtctggtgatccctgagcatctagaaaactgctggattttggatctgggtagtggaagtggcagagattgctatgtacttagccagctggttggtgaaaaaggacacgtgactggaatagacatgaccaaaggccaggtggaagtggctgaaaagtatcttgactatcacatggaaaaatatggcttccaggcatctaatgtgacttttattcatggctacattgagaagttgggagaggctggaatcaagaatgagagccatgatattgttgtatcaaactgtgttattaaccttgtgcctgataaacaacaagtgcttcaggaggcatatcgggtgctgaagcatggtggggagttatatttcagtgacgtctatacgagccttgaactgccagaagaaatcaggacacacaaagttttatggggtgagtgtctgggtggtgctttatactggaaggaacttgctgtccttgctcaaaaaattgggttctgccctccacgtttggtcactgccaatctcattacaattcaaaacaaggaactggaaagagttatcggtgactgtcgttttgtttctgcaacatttcgcctcttcaaacactctaagacaggaccaaccaagagatgccaagttatttacaatggaggaattacaggacatgaaaaagaactaatgtttgatgccaattttacatttaaggaaggtgaaattgttgaagtggatgaagaaacagcagctatcttgaagaattcaagatttgctcaagattttctgatcagaccaattggagagaagttgccaacatctggaggctgttctgctttggagttaaaggatataatcacagatccatttaagcttgcagaagagtctgacagtatgaagtccagatgtgtccctgatgctgctggaggctgctgtggcacaaagaaaagctgctaaatctatagccaaccaggggaccacagtagtgggcaagagtgatctgcatgttttttaacctgcttttccccccactgcgcccggccataaatgaattatttttaagaggcattgattaaagattcacagcaaatcactagttaagcagattttttttctatttcctacttcaaagttctggtgccacatagtggtcagaaatggaacagagaagctgtcttaagccttgttcaagaagcaggaaaggcatcagaagaagtaacagttggcagagggtctcaggaaaaacatcttccttctgatcttttgcatagcaccttytggaattttcatcatgtttgcttattaaacaaagctcctactgccatcatactaatcatgcaaaaagattgccaaatcatgtttggtaggaggacttttgaggtagcttttgaacaaatgtttttttcttttttctttttttttgcaataaagaaaacaaattaatcat

SEQ ID NO: 3642 - DNA, 1776 bp, Homo sapiens
agtgggctctagtcttgccggggactcgtggggtaacttgttcttgggagccagcggtatggcgtcgggctgcaagattggcccgtccatcctcaacagcgacctggccaatttaggggccaagtgcctccagatgctagactctggggccgattatctgcatctggatgtaatggatgggcattttgttcccaacatcacctttggtcaccctgtggtagaaagccttcraaagyagctaggccaggaccctttctttgacatgcacatgatggtgtccaagccagaacagtgggtaaagccaatggctgtagcagaagccaatcagtacacctttcatctcgaggctactgagaacccagggactttgattaaagacattcgggagaatgggatgaaggttggccttgccatcaaaccaggaacctcagttgagtatttggcaccatgggctaatcaaatagatatggccttggttatgacagtggaaccggggtttggagagcagaaattcatggaagatatgatgccaaaggttcactggttgaggacccagttcccatctttggatatagagggcgatggtggagtaggttctgacactgtccataagtgtgcagaggcaggagctaacatgactgtatctggcagtgctattatgaggagtgaagaccccagatctgtgatcaacctattaagaaatatttgctcagaagctgctcagaaacgttctcttgatcgatgaaaccataaggagcccaatgtttctgttcatgaaatctcccttttactggaaaacaggaatattgactaccaaatcatcatgaaattgaagctgtactgcttttttgagcagttattcattccagtgattaaaactgattgtgcagaatattctaagaggtcagaaattggtgtgtataactacatttttagtgatgcaatttaatgattagtgagtaagatactgtttttattgagagacttgatttttataaagagtaaaaatacggctgcattaaggttacaaacagaaaagtgtcttaatgcctaaggagggcatattagctacactacaaaaacaaattttgtctgtacttctgaaaagaattttgttgtttctcagctgttttccaaaagcaaaggaagtctttatggcttttttctatttcatgttatttgtgatttgtttataagtttgggtgggatggcataccatattcttggttcttaaaatctatcacttttcaccttacacttaatgtgtaaaaactataaaaacaatgcgtgaaacccaggggttctaaaatacaagcatagattttatcagggtgtttttgtcaaagcaggttattcagtgattcctccccaccattcttaaggacgttaaataatgctgttgtgttagctctgagtagaaaggaaaaagtaaaaacctctgtatggaagtaatattgggttgaattctgactgcccttttctagctggacctttaacaaatcacccagtcttttttgtgtttctctgaagtcatttatacattaaatgtaattataacaactgtggggttgtgttgagaattaagaggtaacactatatatgtaaagtttctagtactagtcccagaatttagaatatgctcaatacaaagtagatagcattatataagtttatatttttgtgagttataaagtactttgatatattctcattaaatctgtaaatcacctctataagtaagtggtaataataaagcagatatttttgtccccattt

SEQ ID NO: 3643 - DNA, 2489 bp, Homo sapiens
cggagccggaagctgggcatctgcagctggctcggcgcactccactgaccgtcccgacgatgctacgcgcgcccggctgcctcctccggacctccgtagcgcctgccgcggccctggctgcggcgctgctctcgtcgcttgcgcgctgctctcttctagagccgagggacccggtggcctcgtcgctcagcccctatttcggcaccaagactcgctacgaggatgtcaaccccgtgctattgtcgggccccgaggctccgtggcgggaccctgagctgctggaggggacctgcaccccggtgcagctggtcgccctcattcgccacggcacccgctaccccacggkcaaacagatccgcaagctgaggcagctgcacgggttgctgcaggcccgcgggtccagggatggcggggctagtagtaccggcagccgcgacctgggtgcagcgctggccgactggcctttgtggtacgcggactggatggacgggcagctagtagaraagggacggcaggatatgcgacagctggcgctgcgtctggcctcgctcttcccggcccttttcagccgtgagaactacggccgcctgcggctcatcaccagttccaagcaccgctgcatggatagcagcgccgccttcctgcaggggctgtggcagcactaccaccctggcttgccgccgccggacgtcgcagatatggagtttggacctccaacagttaatgataaactaatgagattttttgatcactgtgagaagtttttaactgaagtagaaaaaaatgctacagctctttatcacgtggaagccttcaaaactggaccagaaatgcagaacattttaaaaaaagttgcagctactttgcaagtgccagtaaatgatttaaatgcagatttaattcaagtagcctttttcacctgttcatttgacctggcaattaaaggtgttaaatctccttggtgtgatgtttttgacatagatgatgcaaaggtattagaatatttaaatgatctgaaacaatattggaaaagaggatatgggtatactattaacagtcgatccagctgcaccttgtttcaggatatctttcagcacttggacaaagcagttgaacagaaacaaaggtctcagccaatttcttctccagtcatcctccagtttggtcatgcagagactcttcttccactgctttctctcatgggctacttcaaagacaaggaacccctaacagcgtacaattacaaaaaacaaatgcatcggaagttccgaagtggtctcattgtaccttatgcctcgaacctgatatttgtgctttaccactgtgaaaatgcyaagactcctaaagaacaattccgagtgcagatgttattaaatgaaaaggtgttacctttggcttactcacaagaaactgtttcattttatgaagatctgaagaaccactacaaggacatccttcagagttgtcaaaccagtgaagaatgtgaattagcaagggctaacagtacatctgatgaactatgagtaactgaagaacatttttaattctttaggaatctgcaatgagtgattacatgcttgtaataggtaggcaattccttgattacaggaagcttttatattacttgagtatttctgtcttttcacagaaaaacattgggtttctctctgggtttggacatgaaatgtaagaaaagatttttcactggagcagctctcttaaggagaaacaaatctatttagagaaacagctggccctgcaaatgtttacagaaatgaaattcttcctacttatataagaaatctcacactgagatagaattgtgatttcataataacacttgaaaagtgctggagtaacaaaatatctcagttggaccatccttaacttgattgaactgtctaggaactttacagattgttctgcagttctctcttcttttcctcaggtaggacagctctagcattttcttaatcaggaatattgtggtaagctgggagtatcactctggaagaaagtaacatctccagatgagaatttgaaacaagaaacagagtgttgtaaaaggacaccttcactgaagcaagtcggaaagtacaatgaaaataaatatttttggtatttatttatgaaatatttgaacattttttcaataattcctttttacttctaggaagtctcaaaagaccatcttaaattattatatgtttggacaattagcaacaagtcagatagttagaatcgaagtttttcaaatccattgcttagctaactttttcattctgtcacttggcttcgatttttatattttcctattatatgaaatgtatcttttggttgtttgatttttctttctttctttgtaaatagttctgagttctgtcaaatgccgtgaaagtatttgctataataaagaaaattcttgtgactttactaccaggacttttctcttccccatgtcaaaatacaatcaataattgatggtaaaa

SEQ ID NO: 3644 - DNA, 2257 bp, Homo sapiens
cggagccggaagctgggcatctgcagctggctcggcgcactccactgaccgtcccgacgatgctacgcgcgcccggctgcctcctccggacctccgtagcgcctgccgcggccctggctgcggcgctgctctcgtcgcttgcgcgctgctctcttctagagccgagggacccggtggcctcgtcgctcagcccctatttcggcaccaagactcgctacgaggatgtcaaccccgtgctattgtcgggccccgaggctccgtggcgggaccctgagctgctggaggggacctgcaccccggtgcagctggtcgccctcattcgccacggcacccgctaccccacggkcaaacagatccgcaagctgaggcagctgcacgggttgctgcaggcccgcgggtccagggatggcggggctagtagtaccggcagccgcgacctgggtgcagcgctggccgactggcctttgtggtacgcggactggatggacgggcagctagtagaraagggacggcaggatatgcgacagctggcgctgcgtctggcctcgctcttcccggcccttttcagccgtgagaactacggccgcctgcggctcatcaccagttccaagcaccgctgcatggatagcagcgccgccttcctgcaggggctgtggcagcactaccaccctggcttgccgccgccggacgtcgcagatatggagtttggacctccaacagttaatgataaactaatgagattttttgatcactgtgagaagtttttaactgaagtagaaaaaaatgctacagctctttatcacgtggaagccttcaaaactggaccagaaatgcagaacattttaaaaaaagttgcagctactttgcaagtgccagtaaatgatttaaatgcaggtctcagccaatttcttctccagtcatcctccagtttggtcatgcagagactcttcttccactgctttctctcatgggctacttcaaagacaaggaacccctaacagcgtacaattacaaaaaacaaatgcatcggaagttccgaagtggtctcattgtaccttatgcctcgaacctgatatttgtgctttaccactgtgaaaatgcyaagactcctaaagaacaattccgagtgcagatgttattaaatgaaaaggtgttacctttggcttactcacaagaaactgtttcattttatgaagatctgaagaaccactacaaggacatccttcagagttgtcaaaccagtgaagaatgtgaattagcaagggctaacagtacatctgatgaactatgagtaactgaagaacatttttaattctttaggaatctgcaatgagtgattacatgcttgtaataggtaggcaattccttgattacaggaagcttttatattacttgagtatttctgtcttttcacagaaaaacattgggtttctctctgggtttggacatgaaatgtaagaaaagatttttcactggagcagctctcttaaggagaaacaaatctatttagagaaacagctggccctgcaaatgtttacagaaatgaaattcttcctacttatataagaaatctcacactgagatagaattgtgatttcataataacacttgaaaagtgctggagtaacaaaatatctcagttggaccatccttaacttgattgaactgtctaggaactttacagattgttctgcagttctctcttcttttcctcaggtaggacagctctagcattttcttaatcaggaatattgtggtaagctgggagtatcactctggaagaaagtaacatctccagatgagaatttgaaacaagaaacagagtgttgtaaaaggacaccttcactgaagcaagtcggaaagtacaatgaaaataaatatttttggtatttatttatgaaatatttgaacattttttcaataattcctttttacttctaggaagtctcaaaagaccatcttaaattattatatgtttggacaattagcaacaagtcagatagttagaatcgaagtttttcaaatccattgcttagctaactttttcattctgtcacttggcttcgatttttatattttcctattatatgaaatgtatcttttggttgtttgatttttctttctttctttgtaaatagttctgagttctgtcaaatgccgtgaaagtatttgctataataaagaaaattcttgtgactttactaccaggacttttctcttccccatgtcaaaatacaatcaataattgatggtaaaa

SEQ ID NO: 3645 - DNA, 4465 bp, Homo sapiens
ctccctcgcgtggccacctccccctctgccttctcctacccagtctcttccccaactctccccacccctggtgctctccgccccgyttgcctcccgttyttccccgcccgctccatccgggtcgctgacggctgtctctggactggacagcagtggcgtccgcttttctctaaggaacccgataagaactccattttctgttgatgtggagacatagggtacctccaactttccggggtttcagaagagaattttttattgaaactggaagaccaaaataattacaagcatgttgtgctggggaaatgcatcctttgggcagctaggtttgggtggaattgatgaagaaattgtactagagcccagaaaaagtgacttctttataaataaaagggtccgagatgtaggatgtggactcagacatactgtgtttgttctggatgatggaacagtgtacacatgtggatgtaatgatctaggacagctaggtcatgaaaaatccagaaagaaaccagagcaggttgttgccctggatgcccaaaatattgtagctgtttcatgtggagaagctcatacgttagcgctaaatgacaaaggccaggtgtatgcttggggtctcgattctgatggacagcttggcctggtaggatcagaggaatgcatcagagtacccagaaatattaaaagtttgtcagatatccagattgtacaggttgcttgtggttactatcattcacttgcactttctaaagcaagtgaagtcttctgttggggacagaataaatatggccaattgggtttaggtactgactgtaaaaagcaaacttcaccgcagctgcttaagtctttgcttggaatccctttcatgcaagttgcmgcaggaggagcccatagttttgtactcaccctttctggagctatctttggatggggacgcaacaagtttggtcagctaggtcttaatgatgaaaatgataggtatgttcctaatttactaaagtcactaagatctcagaaaatagtttatatttgttgtggagaagatcatactgctgctctaaccaaggaaggtggagtgtttacttttggagctggagggtatggtcagttgggccataattctaccagtcatgaaataaacccaaggaaagtttttgaacttatgggaagcattgtcactgagattgcttgtggacggcagcacacttcygcttttgttccttcatcaggacgaatttactcttttgggcttggtggtaatgggcagctgggaaccggttcaacaagcaacaggaaaagyccctttactgtaaaaggaaattggtacccctataatgggcagtgtctaccagatattgattctgaagaatatttctgtgtaaaaagaattttctcagggggagatcaaagcttttcacattactctagtccccagaactgtgggccaccagatgacttcagatgtcccaatccgacaaagcagatctggacagtgaatgaagctctaattcagaaatggctgagctatccttctggaaggtttcctgtggagatagccaatgagatagatggaacgttttcttcctctggttgcctaaatggaagttttttagctgttagcaatgatgatcactatagaacaggtaccagattttcaggggttgatatgaatgctgctaggcttttattccacaaacttatacaacctgatcatccgcagatatctcagcaggtggcagctagtttggaaaagaatcttattcctaaactgactagctccttacctgatgttgaagcattgaggttttatcttactctaccagaatgtcccctgatgagtgattccaacaatttcacaacaatagcaattccctttggtacagctcttgtgaasctagaaaaggcaccactgaaagtacttgaaaactggtggtcagtacttgaacctccactattcctcaagatagtagaactttttaaggaagttgtggtacatcttttgaaactctacaagatcggtattcccccttctgaaagaagaattttcaacagttttcttcatactgcattaaaggttttagaaatactacatagggtaaatgagaaaatgggacagattatacagtatgataaattttatatacatgaagtacaagaattgatagacataagaaatgattatatcaactgggtccaacagcaggcctatggaatgttggcagatatccctgttacaatctgtacatatccatttgtatttgatgcccaagcaaaaactactctgttacagaccgatgcagtcttacagatgcagatggctattgatcaggcccacaggcagaatgtctcctctctttttctcccagtgattgaatctgtgaatccctgcttaattctagtggtgcgtagagaaaatattgtaggagatgcaatggaagtccttaggaaaacaaagaacatagattacaagaagccactcaaggttatatttgttggagaagatgctgtggatgcaggaggggtgcgcaaagaatttttcttgctcatcatgagggaattattggatcctaaatacggcatgtttaggtattatgaagattccaggctcatttggttttctgataagacatttgaagacagtgatttgttccatttgattggtgttatctgtggcttagcaatttataattgtaccattgtggacctccattttcctttggctttatataagaaactactgaaaaagaagccatccttggatgatttgaaagaactaatgcctgatgttgggagaagcatgcaacagttactggattatccagaagatgacatagaggaaacattttgtcttaattttacgatcacagttgaaaactttggtgcaacagaagtgaaagagctggttctaaatggtgcmgacacagctgttaacaaacaaaatcggcaagagtttgtcgatgcttatgtggattacatattcaataaatcagtggcttccttatttgatgcttttcatgcgggctttcataaggtctgtggaggaaaagtccttctgctctttcagcctaatgaactacaagcaatggtcattggaaatacaaattatgattggaaggaactggaaaagaatacagaatacaaaggggaatattgggcagaacatcctacgataaaaattttttgggaagtatttcacgaattaccattggaaaagaagaaacagtttctgttatttttgacaggtagtgatcgcattcctattcttggtatgaagagtctgaaactagtcatccagtccacaggaggtggtgaggagtatctcccagtttcccatacttgttttaatcttctggatcttccaaaatatacagaaaaagaaactctacgctctaaactgatccaagctattgatcacaatgaaggcttcagtttaatataactttggagttataactattcagtttagtgcaaaagcattaaactatttgtgtttttyttgtggtgatgaattcagcaaggtgacagaggtactattataattcttacttgcagaatgttcaatctacgagtgttcatggaagccaaaaaatattaaaggaaaatgaacaaactgttaatattattgtacagaaccatggattttttttgaccatcttctaataaacatagcaagtattatgaatacattaaagttttactaacatgaattttaagagtttgcatatttcagaaatgatctggtgtgagtgcatggaaatattgcttaatttttcttcaatcattgagtgaaaaacctttaactttggcctgcaatagtcatttgattattttttcattttgtaaataatgttaagttttgtaataaaatagttatgttctgataccagtacagtttctatggttgtaattgaacttgaacagacttttaaaggttaaaaattatgatttaaatcttactctgagactctataaaaagaaaaaaaaggtagcatggtggaaacactatcttttcttttttgctagaataagtgtctttgtgcaaacctaaatcacagatagggaatatactacataacctgcagttcttttctttgtgaatcctgacacactgatagatgggggattgtcgatcagagaacttattaatatttagtactggaagaactctgtctccacagttgccagtaataaaaagaaacattggctactatgagcaccaatcactgggttatagctttcaaaattattgatgctgcagtgctttagagctatttcyttgaatttaagaaacaaatcttaacagttttatggtgctgatgcttagttgtctcatgccattaaattgtaaaagtgagttgatgcaatacatgtgactttctgctataatgcaaatatttattttttaaatttattttaaaatgccgtgaaaactgtttaataaagatttattgttttaatatttaaa

SEQ ID NO: 3646 - DNA, 2454 bp, Homo sapiens
gagagggtttttttttttaattgtttctttgatgtttctggacagtaaatatttgaaattttcctaggatcagtaatgaaggtacacaaagtactttgggtagctataaagaagactgctgcatgtgatatgtatattcttatgagaacatttataaaaaaaggttgcagtgaaaatggaataacttaacctataatcattttatatattaaaaattgtataagcctctttcattacagaaatattcaatctttataaaccgttttactagtttacttgataagatgttggtttgtttcaaaatcttgtttcattatatgtcccctttttatatgcttggtaagagatggaagtcactagaggtgagagatgttaaaagtaggaagcatttgatctcgttaggaagaagatgtgaaatttccttgaagaaagtttcaataataaggtattaaacatgttcctggggttggtcaccattatctcctattcctctttcttttccccttcctatcaccctttcccatccattttatgttgagagttctttcatttatagagaggattttttaaactaattcatattatgactttaaagggttacagtaagtttgctttatcatttgatcctgtaaataaaaaagattttgagctgcttcctctggtatagaatatctgactataccaactaaggattaaggaaaggatgaaaagaaagcttgaatatttaatagtctaaaaatattttaaaaaattaaaaaccttcaaatcttggtaaccatttttattctgttcaaataaatgcatttggtattctaaatatttttgtagtgttctatactaacagctagtaagccaattttttggaggtctttgttaaaacgataagttaataacttggtgattttaccatgggatattccattttagaacaagaactcagggagaaccataataaaagaacaaaagttttaaatggtaaaagtcaaatccttggttcgtgagcacataccatgatcacttagttaagtgaatttgtgtaatgcttccttagycagatcattccttattctttgttttttattttttatttttgagacggagtttcgctcttgtcgcccaggctgtagtgcagtggtacagtctcagctcactggaacctctgccttccaggttcaagtgattctcctgcctcagcctcctgagtagctgggattacaggcacacaccaccacgccctgctaattttgcatttttagtagagacaggatttcaccatgttggccaggctggtcttgaactcctgacctcaagtaatctgccctcattggcctcccgaagtgctgggattacaggcgtgagccactgcgcccagcctgttccttatactctttaaaggtttgtttttgctcctccctctttaccctcccctccagtgaatgttttttagaaaaaccaatgctcagatttatcagtattactaccgttctrtactggcttactctaatggtgttatgagttatacattatacattagtataaaaacattcaaaagggtactctttatgctcagtttattaagttttatgctgtacgggatactgttaggtgctatgttaattcagtagcataggaattatagaatacctgtaactaataggtagaggttagcttgtttcagtcacagtagctttattgtagcattgctgttaaaatgttaatcttttgttttccagatggctattgatcaggcccacaggcagaatgtctcctctctttttctcccagtgattgaatctgtgaatccctgcttaattctagtggtgcgtagagaaaatattgtaggagatgcaatggaagtccttaggaaaacaaagaacatagattacaagaagccactcaaggttatatttgttggagaagatgctgtggatgcaggaggggtgcgcaaagaatttttcttgctcatcatgagggaattattggatcctaaatacggcatgtttaggtattatgaagattccaggctcatttggttttctgataaggtaaaatgtccaaccatctaaattacttctgtgtatayacccatgtatttatacctgtatgtatcaagttaattcagtaaataaggaattactactggatccctaacatataagatctgctttattacaatttgagaaattataaactttggacttggagttgtcaaaatacatttgatgcttaccacacattttaaattaacaaaataaattaagagatggttagccagaaaataatgttgactattccttctgctgatttcaatttgaggattgaataataatcaccagattaacttttctgttgggaaaaattaatttatcattagggatcattgatttatctaccttgtcatttagagcaggtcagcagactatagcccattaatctcaaagaaaaaaaaagtca

SEQ ID NO: 3647 - DNA, 3888 bp, Homo sapiens
agctgcttcccgaaaatcatgtgtgtcgactctctggtcagaatttgctccggactctcttatggcagaatcagaaatattaaaagtttgtcagatatccagattgtacaggttgcttgtggttactatcattcacttgcactttctaaagcaagtgaagtcttctgttggggacagaataaatatggccaattgggtttaggtactgactgtaaaaagcaaacttcaccgcagctgcttaagtctttgcttggaatccctttcatgcaagttgcmgcaggaggagcccatagttttgtactcaccctttctggagctatctttggatggggacgcaacaagtttggtcagctaggtcttaatgatgaaaatgataggtatgttcctaatttactaaagtcactaagatctcagaaaatagtttatatttgttgtggagaagatcatactgctgctctaaccaaggaaggtggagtgtttacttttggagctggagggtatggtcagttgggccataattctaccagtcatgaaataaacccaaggaaagtttttgaacttatgggaagcattgtcactgagattgcttgtggacggcagcacacttcygcttttgttccttcatcaggacgaatttactcttttgggcttggtggtaatgggcagctgggaaccggttcaacaagcaacaggaaaagyccctttactgtaaaaggaaattggtacccctataatgggcagtgtctaccagatattgattctgaagaatatttctgtgtaaaaagaattttctcagggggagatcaaagcttttcacattactctagtccccagaactgtgggccaccagatgacttcagatgtcccaatccgacaaagcagatctggacagtgaatgaagctctaattcagaaatggctgagctatccttctggaaggtttcctgtggagatagccaatgagatagatggaacgttttcttcctctggttgcctaaatggaagttttttagctgttagcaatgatgatcactatagaacaggtaccagattttcaggggttgatatgaatgctgctaggcttttattccacaaacttatacaacctgatcatccgcagatatctcagcaggtggcagctagtttggaaaagaatcttattcctaaactgactagctccttacctgatgttgaagcattgaggttttatcttactctaccagaatgtcccctgatgagtgattccaacaatttcacaacaatagcaattccctttggtacagctcttgtgaasctagaaaaggcaccactgaaagtacttgaaaactggtggtcagtacttgaacctccactattcctcaagatagtagaactttttaaggaagttgtggtacatcttttgaaactctacaagatcggtattcccccttctgaaagaagaattttcaacagttttcttcatactgcattaaaggttttagaaatactacatagggtaaatgagaaaatgggacagattatacagtatgataaattttatatacatgaagtacaagaattgatagacataagaaatgattatatcaactgggtccaacagcaggcctatggaatggatgtcaaccatggattaactgagttggcagatatccctgttacaatctgtacatatccatttgtatttgatgcccaagcaaaaactactctgttacagaccgatgcagtcttacagatgcagatggctattgatcaggcccacaggcagaatgtctcctctctttttctcccagtgattgaatctgtgaatccctgcttaattctagtggtgcgtagagaaaatattgtaggagatgcaatggaagtccttaggaaaacaaagaacatagattacaagaagccactcaaggttatatttgttggagaagatgctgtggatgcaggaggggtgcgcaaagaatttttcttgctcatcatgagggaattattggatcctaaatacggcatgtttaggtattatgaagattccaggctcatttggttttctgataagacatttgaagacagtgatttgttccatttgattggtgttatctgtggcttagcaatttataattgtaccattgtggacctccattttcctttggctttatataagaaactactgaaaaagaagccatccttggatgatttgaaagaactaatgcctgatgttgggagaagcatgcaacagttactggattatccagaagatgacatagaggaaacattttgtcttaattttacgatcacagttgaaaactttggtgcaacagaagtgaaagagctggttctaaatggtgcmgacacagctgttaacaaacaaaatcggcaagagtttgtcgatgcttatgtggattacatattcaataaatcagtggcttccttatttgatgcttttcatgcgggctttcataaggtctgtggaggaaaagtccttctgctctttcagcctaatgaactacaagcaatggtcattggaaatacaaattatgattggaaggaactggaaaagaatacagaatacaaaggggaatattgggcagaacatcctacgataaaaattttttgggaagtatttcacgaattaccattggaaaagaagaaacagtttctgttatttttgacaggtagtgatcgcattcctattcttggtatgaagagtctgaaactagtcatccagtccacaggaggtggtgaggagtatctcccagtttcccatacttgttttaatcttctggatcttccaaaatatacagaaaaagaaactctacgctctaaactgatccaagctattgatcacaatgaaggcttcagtttaatataactttggagttataactattcagtttagtgcaaaagcattaaactatttgtgtttttyttgtggtgatgaattcagcaaggtgacagaggtactattataattcttacttgcagaatgttcaatctacgagtgttcatggaagccaaaaaatattaaaggaaaatgaacaaactgttaatattattgtacagaaccatggattttttttgaccatcttctaataaacatagcaagtattatgaatacattaaagttttactaacatgaattttaagagtttgcatatttcagaaatgatctggtgtgagtgcatggaaatattgcttaatttttcttcaatcattgagtgaaaaacctttaactttggcctgcaatagtcatttgattattttttcattttgtaaataatgttaagttttgtaataaaatagttatgttctgataccagtacagtttctatggttgtaattgaacttgaacagacttttaaaggttaaaaattatgatttaaatcttactctgagactctataaaaagaaaaaaaaggtagcatggtggaaacactatcttttcttttttgctagaataagtgtctttgtgcaaacctaaatcacagatagggaatatactacataacctgcagttcttttctttgtgaatcctgacacactgatagatgggggattgtcgatcagagaacttattaatatttagtactggaagaactctgtctccacagttgccagtaataaaaagaaacattggctactatgagcaccaatcactgggttatagctttcaaaattattgatgctgcagtgctttagagctatttcyttgaatttaagaaacaaatcttaacagttttatggtgctgatgcttagttgtctcatgccattaaattgtaaaagtgagttgatgcaatacatgtgactttctgctataatgcaaatatttattttttaaatttattttaaaatgccgtgaaaactgtttaataaagatttattgttttaatatttaaa

SEQ ID NO: 3648 - DNA, 4135 bp, Homo sapiens
ctccgccccgyttgcctcccgttyttccccgcccgctccatccgggtcgctgacggctgtctctggactggacagcagtggcgtccgcttttctctaaggaacccgataagaactccattttctgttgatgtggagacatagggtacctccaactttccggggtttcagaagagaattttttattgaaactggaagaccaaaataattacaagcatgttgtgctggggaaatgcatcctttgggcagctaggtttgggtggaattgatgaagaaattgtactagagcccagaaaaagtgacttctttataaataaaagggtccgagatgtaggatgtggactcagacatactgtgtttgttctggatgatggaacagtgtacacatgtggatgtaatgatctaggacagctaggtcatgaaaaatccagaaagaaaccagaaatattaaaagtttgtcagatatccagattgtacaggttgcttgtggttactatcattcacttgcactttctaaagcaagtgaagtcttctgttggggacagaataaatatggccaattgggtttaggtactgactgtaaaaagcaaacttcaccgcagctgcttaagtctttgcttggaatccctttcatgcaagttgcmgcaggaggagcccatagttttgtactcaccctttctggagctatctttggatggggacgcaacaagtttggtcagctaggtcttaatgatgaaaatggaaggtggagtgtttacttttggagctggagggtatggtcagttgggccataattctaccagtcatgaaataaacccaaggaaagtttttgaacttatgggaagcattgtcactgagattgcttgtggacggcagcacacttcygcttttgttccttcatcaggacgaatttactcttttgggcttggtggtaatgggcagctgggaaccggttcaacaagcaacaggaaaagyccctttactgtaaaaggaaattggtacccctataatgggcagtgtctaccagatattgattctgaagaatatttctgtgtaaaaagaattttctcagggggagatcaaagcttttcacattactctagtccccagaactgtgggccaccagatgacttcagatgtcccaatccgacaaagcagatctggacagtgaatgaagctctaattcagaaatggctgagctatccttctggaaggtttcctgtggagatagccaatgagatagatggaacgttttcttcctctggttgcctaaatggaagttttttagctgttagcaatgatgatcactatagaacaggtaccagattttcaggggttgatatgaatgctgctaggcttttattccacaaacttatacaacctgatcatccgcagatatctcagcaggtggcagctagtttggaaaagaatcttattcctaaactgactagctccttacctgatgttgaagcattgaggttttatcttactctaccagaatgtcccctgatgagtgattccaacaatttcacaacaatagcaattccctttggtacagctcttgtgaasctagaaaaggcaccactgaaagtacttgaaaactggtggtcagtacttgaacctccactattcctcaagatagtagaactttttaaggaagttgtggtacatcttttgaaactctacaagatcggtattcccccttctgaaagaagaattttcaacagttttcttcatactgcattaaaggttttagaaatactacatagggtaaatgagaaaatgggacagattatacagtatgataaattttatatacatgaagtacaagaattgatagacataagaaatgattatatcaactgggtccaacagcaggcctatggaatgttggcagatatccctgttacaatctgtacatatccatttgtatttgatgcccaagcaaaaactactctgttacagaccgatgcagtcttacagatgcagatggctattgatcaggcccacaggcagaatgtctcctctctttttctcccagtgattgaatctgtgaatccctgcttaattctagtggtgcgtagagaaaatattgtaggagatgcaatggaagtccttaggaaaacaaagaacatagattacaagaagccactcaaggttatatttgttggagaagatgctgtggatgcaggaggggtgcgcaaagaatttttcttgctcatcatgagggaattattggatcctaaatacggcatgtttaggtattatgaagattccaggctcatttggttttctgataagacatttgaagacagtgatttgttccatttgattggtgttatctgtggcttagcaatttataattgtaccattgtggacctccattttcctttggctttatataagaaactactgaaaaagaagccatccttggatgatttgaaagaactaatgcctgatgttgggagaagcatgcaacagttactggattatccagaagatgacatagaggaaacattttgtcttaattttacgatcacagttgaaaactttggtgcaacagaagtgaaagagctggttctaaatggtgcmgacacagctgttaacaaacaaaatcggcaagagtttgtcgatgcttatgtggattacatattcaataaatcagtggcttccttatttgatgcttttcatgcgggctttcataaggtctgtggaggaaaagtccttctgctctttcagcctaatgaactacaagcaatggtcattggaaatacaaattatgattggaaggaactggaaaagaatacagaatacaaaggggaatattgggcagaacatcctacgataaaaattttttgggaagtatttcacgaattaccattggaaaagaagaaacagtttctgttatttttgacaggtagtgatcgcattcctattcttggtatgaagagtctgaaactagtcatccagtccacaggaggtggtgaggagtatctcccagtttcccatacttgttttaatcttctggatcttccaaaatatacagaaaaagaaactctacgctctaaactgatccaagctattgatcacaatgaaggcttcagtttaatataactttggagttataactattcagtttagtgcaaaagcattaaactatttgtgtttttyttgtggtgatgaattcagcaaggtgacagaggtactattataattcttacttgcagaatgttcaatctacgagtgttcatggaagccaaaaaatattaaaggaaaatgaacaaactgttaatattattgtacagaaccatggattttttttgaccatcttctaataaacatagcaagtattatgaatacattaaagttttactaacatgaattttaagagtttgcatatttcagaaatgatctggtgtgagtgcatggaaatattgcttaatttttcttcaatcattgagtgaaaaacctttaactttggcctgcaatagtcatttgattattttttcattttgtaaataatgttaagttttgtaataaaatagttatgttctgataccagtacagtttctatggttgtaattgaacttgaacagacttttaaaggttaaaaattatgatttaaatcttactctgagactctataaaaagaaaaaaaaggtagcatggtggaaacactatcttttcttttttgctagaataagtgtctttgtgcaaacctaaatcacagatagggaatatactacataacctgcagttcttttctttgtgaatcctgacacactgatagatgggggattgtcgatcagagaacttattaatatttagtactggaagaactctgtctccacagttgccagtaataaaaagaaacattggctactatgagcaccaatcactgggttatagctttcaaaattattgatgctgcagtgctttagagctatttcyttgaatttaagaaacaaatcttaacagttttatggtgctgatgcttagttgtctcatgccattaaattgtaaaagtgagttgatgcaatacatgtgactttctgctataatgcaaatatttattttttaaatttattttaaaatgccgtgaaaactgtttaataaagatttattgttttaatattt

SEQ ID NO: 3649 - DNA, 4910 bp, Homo sapiens
ccccaactctccccacccctggtgctctccgccccgyttgcctcccgttyttccccgcccgctccatccgggtcgctgacggctgtctctggactggacagcagtggcgtccgcttttctctaaggaacccggtaaagtttcccaggggccggggrggggagcagcggagcagcggcacagacgccggaggtgccctggtgatcgtcgccactggctgacagaggagggtcccaggagccggagacgtgcttcagcgaccgcgctgccttgctctctgggcaggggccgccccccgtcaccttgggcttcccctaccctgaagggcttgggcgagttgtggccccagcgggttcgggggcgtgtgacggcgttagggaggggcaggccgggctgggcggatgcaggccggcccggcatagggcgctttctccgcgcttcctgggggtgaggggcgtggggcgagggcagggctgtggctccctggccccggggctggaatgtctcatctgcctggggatgggcttctctcaggttgaggccgygcactgccaagcctcggccgccggcctctgaagcygttgcgagcggccggttgcggtagtcgtctgcttggctgcgaggttggataagaactccattttctgttgatgtggagacatagggtacctccaactttccggggtttcagaagagaattttttattgaaactggaagaccaaaataattacaagcatgttgtgctggggaaatgcatcctttgggcagctaggtttgggtggaattgatgaagaaattgtactagagcccagaaaaagtgacttctttataaataaaagggtccgagatgtaggatgtggactcagacatactgtgtttgttctggatgatggaacagtgtacacatgtggatgtaatgatctaggacagctaggtcatgaaaaatccagaaagaaaccagagcaggttgttgccctggatgcccaaaatattgtagctgtttcatgtggagaagctcatacgttagcgctaaatgacaaaggccaggtgtatgcttggggtctcgattctgatggacagcttggcctggtaggatcagaggaatgcatcagagtacccagaaatattaaaagtttgtcagatatccagattgtacaggttgcttgtggttactatcattcacttgcactttctaaagcaagtgaagtcttctgttggggacagaataaatatggccaattgggtttaggtactgactgtaaaaagcaaacttcaccgcagctgcttaagtctttgcttggaatccctttcatgcaagttgcmgcaggaggagcccatagttttgtactcaccctttctggagctatctttggatggggacgcaacaagtttggtcagctaggtcttaatgatgaaaatgataggtatgttcctaatttactaaagtcactaagatctcagaaaatagtttatatttgttgtggagaagatcatactgctgctctaaccaaggaaggtggagtgtttacttttggagctggagggtatggtcagttgggccataattctaccagtcatgaaataaacccaaggaaagtttttgaacttatgggaagcattgtcactgagattgcttgtggacggcagcacacttcygcttttgttccttcatcaggacgaatttactcttttgggcttggtggtaatgggcagctgggaaccggttcaacaagcaacaggaaaagyccctttactgtaaaaggaaattggtacccctataatgggcagtgtctaccagatattgattctgaagaatatttctgtgtaaaaagaattttctcagggggagatcaaagcttttcacattactctagtccccagaactgtgggccaccagatgacttcagatgtcccaatccgacaaagcagatctggacagtgaatgaagctctaattcagaaatggctgagctatccttctggaaggtttcctgtggagatagccaatgagatagatggaacgttttcttcctctggttgcctaaatggaagttttttagctgttagcaatgatgatcactatagaacaggtaccagattttcaggggttgatatgaatgctgctaggcttttattccacaaacttatacaacctgatcatccgcagatatctcagcaggtggcagctagtttggaaaagaatcttattcctaaactgactagctccttacctgatgttgaagcattgaggttttatcttactctaccagaatgtcccctgatgagtgattccaacaatttcacaacaatagcaattccctttggtacagctcttgtgaasctagaaaaggcaccactgaaagtacttgaaaactggtggtcagtacttgaacctccactattcctcaagatagtagaactttttaaggaagttgtggtacatcttttgaaactctacaagatcggtattcccccttctgaaagaagaattttcaacagttttcttcatactgcattaaaggttttagaaatactacatagggtaaatgagaaaatgggacagattatacagtatgataaattttatatacatgaagtacaagaattgatagacataagaaatgattatatcaactgggtccaacagcaggcctatggaatgttggcagatatccctgttacaatctgtacatatccatttgtatttgatgcccaagcaaaaactactctgttacagaccgatgcagtcttacagatgcagatggctattgatcaggcccacaggcagaatgtctcctctctttttctcccagtgattgaatctgtgaatccctgcttaattctagtggtgcgtagagaaaatattgtaggagatgcaatggaagtccttaggaaaacaaagaacatagattacaagaagccactcaaggttatatttgttggagaagatgctgtggatgcaggaggggtgcgcaaagaatttttcttgctcatcatgagggaattattggatcctaaatacggcatgtttaggtattatgaagattccaggctcatttggttttctgataagacatttgaagacagtgatttgttccatttgattggtgttatctgtggcttagcaatttataattgtaccattgtggacctccattttcctttggctttatataagaaactactgaaaaagaagccatccttggatgatttgaaagaactaatgcctgatgttgggagaagcatgcaacagttactggattatccagaagatgacatagaggaaacattttgtcttaattttacgatcacagttgaaaactttggtgcaacagaagtgaaagagctggttctaaatggtgcmgacacagctgttaacaaacaaaatcggcaagagtttgtcgatgcttatgtggattacatattcaataaatcagtggcttccttatttgatgcttttcatgcgggctttcataaggtctgtggaggaaaagtccttctgctctttcagcctaatgaactacaagcaatggtcattggaaatacaaattatgattggaaggaactggaaaagaatacagaatacaaaggggaatattgggcagaacatcctacgataaaaattttttgggaagtatttcacgaattaccattggaaaagaagaaacagtttctgttatttttgacaggtagtgatcgcattcctattcttggtatgaagagtctgaaactagtcatccagtccacaggaggtggtgaggagtatctcccagtttcccatacttgttttaatcttctggatcttccaaaatatacagaaaaagaaactctacgctctaaactgatccaagctattgatcacaatgaaggcttcagtttaatataactttggagttataactattcagtttagtgcaaaagcattaaactatttgtgtttttyttgtggtgatgaattcagcaaggtgacagaggtactattataattcttacttgcagaatgttcaatctacgagtgttcatggaagccaaaaaatattaaaggaaaatgaacaaactgttaatattattgtacagaaccatggattttttttgaccatcttctaataaacatagcaagtattatgaatacattaaagttttactaacatgaattttaagagtttgcatatttcagaaatgatctggtgtgagtgcatggaaatattgcttaatttttcttcaatcattgagtgaaaaacctttaactttggcctgcaatagtcatttgattattttttcattttgtaaataatgttaagttttgtaataaaatagttatgttctgataccagtacagtttctatggttgtaattgaacttgaacagacttttaaaggttaaaaattatgatttaaatcttactctgagactctataaaaagaaaaaaaaggtagcatggtggaaacactatcttttcttttttgctagaataagtgtctttgtgcaaacctaaatcacagatagggaatatactacataacctgcagttcttttctttgtgaatcctgacacactgatagatgggggattgtcgatcagagaacttattaatatttagtactggaagaactctgtctccacagttgccagtaataaaaagaaacattggctactatgagcaccaatcactgggttatagctttcaaaattattgatgctgcagtgctttagagctatttcyttgaatttaagaaacaaatcttaacagttttatggtgctgatgcttagttgtctcatgccattaaattgtaaaagtgagttgatgcaatacatgtgactttctgctataatgcaaatatttattttttaaatttattttaaaatgccgtgaaaactgtttaataaagatttattgttttaatatttaaa

SEQ ID NO: 3650 - DNA, 2902 bp, Homo sapiens
cggccatttttggggcgggcacccaatctctcgccctgtaaactgcggggtgacgggacgctgttactaggactcaagatggccaccgcgcccgctagtcatctcgctagcccgcgcgccagtgagctggcacgagacacgcggtggcccacggcgtctggggacgatctccagcccttcgcacggggcggagcgcccgccttccctccaatcagcacgccgggccggctagccaggggccgcccgcgcgcggggtgtgtgaggacgcgctcccagtcgctgagtgcctgagccgggaagcagttgctgtggtacctgctgctgcccgagcggacgtagagcatcggacgcgggcgccgtggcgytgggcaggagggcgaagccatgacgtcagtcagagaaaatattctctttggaatgggaaatcctctgcttgacatctctgctgtagtggacaaagatttccttgataagtattctctgaaaccaaatgaccaaatcttggctgaagacaaacacaaggaactgtttgatgaacttgtgaaaaaattcaaagtcgaatatcatgctggtggctctacccagaattcaattaaagtggctcagtggatgattcaacagccacacaaagcagcaacattttttggatgcattgggatagataaatttggggagatcctgaagagaaaagctgctgaagcccatgtggatgctcattactacgagcagaatgagcagccaacaggaacttgtgctgcatgcatcactggtgacaacagrtccctcatagctaatcttgctgctgccaattgttataaaaaggaaaaacatcttgatctggagaaaaactggatgttggtagaaaaagcaagagtttgttatatagcaggcttttttcttacagtttccccagagtcagtattaaaggtggctcaccatgcttctgaaaacaacaggattttcactttgaatctatctgcaccgtttattagccagttctacaaggaatcattgatgaaagttatgccttatgttgayatactttttggaaatgagacagaagctgccacttttgctagagagcaaggctttgagactaaagacattaaagagatagccaaaaagacacaagccctgccaaagatgaactcaaagaggcagcgaatcgtgatcttcacccaagggagagatgacactataatggctacagaaagtgaagtcactgcttttgctgtcttggatcaagaccagaaagaaattattgataccaatggagctggagatgcatttgttggaggttttctgtctcaactggtctctgacaagcctctgactgaatgtatccgtgctggccactatgcagcaagcatcataattagacggactggctgcacctttcctgagaagccagacttccactgatggaagagctgaaaacacaagcccaggagtgcagacactgccctaattgcttcctgasaattcccatattaataaagaagaaaattatctgccattttttcctactataataatgctgaatcttaatttagagggtacaagggtatggtaatgcttgtagaatctttattatctcaacaatctaaaaaatgatgtttatttccatagtttgatagtgccacttaaatgccaattaaacaagaatataacatttcaatagaaatttttatttcattttcaattactttgtaaattcgtgtgtatttagtacactgatttgtttttttacatttctgctttgaatgcagatgcaatttaatataatagattttttaatgaattaatcttaacatagtaatctttagctttttatacaaatatatttaatttaggagtatatgtgtgtctatacacacacatacataaatataccacatatacacctgatagtcaaataaggtacagaaattttatcttgtcaattatgccaaataatctctttaatgtgcactcaaacatgtaataaactttggataattaaataatgtgccaaatttaagttgtaccacaatattcaaatcatagtcttatggaactctgtaattggayacaaacaaaaacttgtcatataggaatttttttctgtcttttccctgtgtacagcaaactgaggaagaaagatcattatttaatactgggccctgaaatgacacccaatttgttaatggaattatgaagaacagcaatataatacactgaagaataacttagtatcagagaccaataaatcacttttttaaggatgacaaaatggtataattggacttctggagtcagactttatatgaccttaggtaaatcttcgaacctcagtttcctttttgtaaaatgagataataacccttacatagaaggtcattgagatgatttgagmgagattaccaagtataagatatttgttataatgccttgtaaatgctttataagtagctgctgttattatcattatgattattttctttttgaagaaaaaaagataatgtttgtaaaactgaattcaaatcataggaaaggatttggccaggcgctgcagctcatgcttgtaatcccaacactttgggaggccaaggtgggaggatcacttgagcccaggagttcaagaccagcctgggtaacaaagtgaggccccacctctacaaaaaaatttttaaattatccagccacaggctgggcacagtggcttacacctgtaattccaccactttgggatgaggcaggtatcactagaggtcaagagttcaagaccagcctggccgccatgttggtgaaactccatctctattaaaaatacaaaaattagccaggcatggtggtggatacctgtaattccagctacttgggaggctgacacaggagaattgcttgaacccaggaggcggag

SEQ ID NO: 3651 - DNA, 2354 bp, Homo sapiens
gcagaggtgggctgtagagccaaagtggggtgggagcgcgaagatggcagctgctgaggaggagccgaagcccaaaaagctgaaggtggaggcgccgcaagcgctgagagaaaatattctctttggaatgggaaatcctctgcttgacatctctgctgtagtggacaaagatttccttgataagtattctctgaaaccaaatgaccaaatcttggctgaagacaaacacaaggaactgtttgatgaacttgtgaaaaaattcaaagtcgaatatcatgctggtggctctacccagaattcaattaaagtggctcagtggatgattcaacagccacacaaagcagcaacattttttggatgcattgggatagataaatttggggagatcctgaagagaaaagctgctgaagcccatgtggatgctcattactacgagcagaatgagcagccaacaggaacttgtgctgcatgcatcactggtgacaacagrtccctcatagctaatcttgctgctgccaattgttataaaaaggaaaaacatcttgatctggagaaaaactggatgttggtagaaaaagcaagagtttgttatatagcagaagctgccacttttgctagagagcaaggctttgagactaaagacattaaagagatagccaaaaagacacaagccctgccaaagatgaactcaaagaggcagcgaatcgtgatcttcacccaagggagagatgacactataatggctacaggttttctgtctcaactggtctctgacaagcctctgactgaatgtatccgtgctggccactatgcagcaagcatcataattagacggactggctgcacctttcctgagaagccagacttccactgatggaagagctgaaaacacaagcccaggagtgcagacactgccctaattgcttcctgasaattcccatattaataaagaagaaaattatctgccattttttcctactataataatgctgaatcttaatttagagggtacaagggtatggtaatgcttgtagaatctttattatctcaacaatctaaaaaatgatgtttatttccatagtttgatagtgccacttaaatgccaattaaacaagaatataacatttcaatagaaatttttatttcattttcaattactttgtaaattcgtgtgtatttagtacactgatttgtttttttacatttctgctttgaatgcagatgcaatttaatataatagattttttaatgaattaatcttaacatagtaatctttagctttttatacaaatatatttaatttaggagtatatgtgtgtctatacacacacatacataaatataccacatatacacctgatagtcaaataaggtacagaaattttatcttgtcaattatgccaaataatctctttaatgtgcactcaaacatgtaataaactttggataattaaataatgtgccaaatttaagttgtaccacaatattcaaatcatagtcttatggaactctgtaattggayacaaacaaaaacttgtcatataggaatttttttctgtcttttccctgtgtacagcaaactgaggaagaaagatcattatttaatactgggccctgaaatgacacccaatttgttaatggaattatgaagaacagcaatataatacactgaagaataacttagtatcagagaccaataaatcacttttttaaggatgacaaaatggtataattggacttctggagtcagactttatatgaccttaggtaaatcttcgaacctcagtttcctttttgtaaaatgagataataacccttacatagaaggtcattgagatgatttgagmgagattaccaagtataagatatttgttataatgccttgtaaatgctttataagtagctgctgttattatcattatgattattttctttttgaagaaaaaaagataatgtttgtaaaactgaattcaaatcataggaaaggatttggccaggcgctgcagctcatgcttgtaatcccaacactttgggaggccaaggtgggaggatcacttgagcccaggagttcaagaccagcctgggtaacaaagtgaggccccacctctacaaaaaaatttttaaattatccagccacaggctgggcacagtggcttacacctgtaattccaccactttgggatgaggcaggtatcactagaggtcaagagttcaagaccagcctggccgccatgttggtgaaactccatctctattaaaaatacaaaaattagccaggcatggtggtggatacctgtaattccagctacttgggaggctgacacaggagaattgcttgaacccaggaggcggag

SEQ ID NO: 3652 - DNA, 1355 bp, Homo sapiens
cgggggtgggaacactagcagagccgcgttaaaggcgctccccgccccgcccgccggtccagtgctcgcagtgcgcaggcgtggggctctctccttgtcagtcggcgccgcgtgcgggctggtggctctgtggcagcggcggcggcaggcctccggcactatgagcggcttcagcaccgaggagcgcgccgcgcccttctccctggagtaccgagtcttcctcaaaaatgagaaaggacaatatatatctccatttcatgatattccaatttatgcagataaggatgtgtttcacatggtagttgaagtaccacgctggtctaatgcaaaaatggagattgctacaaaggaccctttaaaccctattaaacaagatgtgaaaaaaggaaaacttcgctatgttgcgaatttgttcccgtataaaggatatatctggaactatggtgccatccctcagacttgggaagacccagggcacaatgataaacatactggctgttgtggtgacaatgacccaattgatgtgtgtgaaattggaagcaaggtatgtgcaagaggtgaaataattggcgtgaaagttctaggcatattggctatgattgacgaaggggaaaccgactggaargtcattgccattaatgtggatgatcctgatgcagccaattataatgatatcaatgatgtcaaacggctgaaacctggctacttagaagctactgtggactggtttagaaggtataaggttcctgatggaaaaccagaaaatgagtttgcgtttaatgcagaatttaaagataaggactttgccattgatattattaaaagcacwcatgaccattggaaagcattagtgactaagaaaacgaatggaaaaggaatcagttgcatgaatacaactttgtctgagagccccttcaagtgtgatcctgatgctgccagagccattgtggatgctttaccaccaccctgtgaatctgcctgcacagtaccaacagacgtggataagtggttccatcaccagaaaaactaatgagatttctctggaatacaagctgatattgctacatcgtgttcatctggatgtattagaagtaaaagtagtagcttttcaragctttaaatttgtagaactcatctaactaaagtaaattctgctgtgactaatccaatatactcagaatgttayccatctaaagcatttttcatatctcaactaagataacttttagcacatgcttaaatatcaaagcagttgtcatttggaagtcacttgtgaatagatgtgcaaggggagcacatattggatgtatatgttaccatatgttaggaaataaaattattttgctgaaacttgg

SEQ ID NO: 3653 - DNA, 1327 bp, Homo sapiens
cgggggtgggaacactagcagagccgcgttaaaggcgctccccgccccgcccgccggtccagtgctcgcagtgcgcaggcgtggggctctctccttgtcagtcggcgccgcgtgcgggctggtggctctgtggcagcggcggcggcaggcctccggcactatgagcggcttcagcaccgaggagcgcgccgcgcccttctccctggagtaccgagtcttcctcaaaaatgagaaaggacaatatatatctccatttcatgatattccaatttatgcagataaggatgtgtttcacatggtagttgaagtaccacgctggtctaatgcaaaaatggagattgctacaaaggaccctttaaaccctattaaacaagatgtgaaaaaaggaaaacttcgctatgttgcgaatttgttcccgtataaaggatatatctggaactatggtgccatccctcagacttgggaagacccagggcacaatgataaacatactggctgttgtggtgacaatgacccaattgatgtgtgtgaaattggaagcaaggtatgtgcaagaggtgaaataattggcgtgaaagttctaggcatattggctatgattgacgaaggggaaaccgactggaargtcattgccattaatgtggatgatcctgatgcagccaattataatgatatcaatgatgtcaaacggctgaaacctggctacttagaagctactgtggactggtttagaaggtataaggttcctgatggaaaaccagaaaatgagtttgcgtttaatgcagaatttaaagataaggactttgccattgatattattaaaagcacwcatgaccattggaaagcattagtgactaagaaaacgaatggaaaaggaatcagttgcatgaatacaactttgtctgagagccccttcaagtgtgatcctgatgctgccagagccattgtggatgctttaccaccaccctgtgaatctgcctgcacagtaccaacagacgtggataagtggttccatcaccagaaaaactaatgagatttctctggaatacaagctgatattgctacatcgtgttcatctggatgtattagaagtaaaagtagtagcttttcaragctttaaatttgtagaactcatctaactaaagtaaattctgctgtgactaatccaatatactcagaatgttayccatctaaaataacttttagcacatgcttaaatatcaaagcagttgtcatttggaagtcacttgtgaatagatgtgcaaggggagcacatattggatgtatatgttaccatatgttaggaaataaaattattttgctgaaa

SEQ ID NO: 3654 - DNA, 1166 bp, Homo sapiens
cttttttactgccttgtaaatggggtagaacaaggaaaaaaggacaatttaatgatgaaaccagtacatttagttttatctttatttatgtatgaatcccgacaaagttgagataaataagaaaaattataagggaaaagccagtggttaactattataatttttcagtgagaacactgcccatattttataaatatgtgtgtatatataaaattgttatatatgcataaatcagtttttattatttcaaaaaacattcttattattctgcatgtcataaaaagtcaagaggcttgaatttttttttttttttttgagacaagtctcgctctgttgcccagactggagtgcagtggcgcaatctcagcttactgcaacctccgcctcccaggttcaagcggttctctgcctcagcctcccgagcagctgggattacaggtgcccgccaccaygcccagcttttatttttagtagagacggggtttcaccatcttggccaggctggtcttgaactcctgaccttgtgatccacccacttcagcctcccgaagtgytgggattatgggcatgagccactgcactgtccaagaggcttgaatttgttagcatctcagcagtagagcaaaccttctattgttcctatatattataaattacgtttagatcctaaaatttgggatagtcttcagattctcttaaatttttgtcagtatacctttttagctttttaaaaaatgagattagactaatagattttaatattttatattttagttaccaccaccctgtgaatctgcctgcacagtaccaacagacgtggataagtggttccatcaccagaaaaactaatgagatttctctggaatacaagctgatattgctacatcgtgttcatctggatgtattagaagtaaaagtagtagcttttcaragctttaaatttgtagaactcatctaactaaagtaaattctgctgtgactaatccaatatactcagaatgttayccatctaaagcatttttcatatctcaactaagataacttttagcacatgcttaaatatcaaagcagttgtcatttggaagtcacttgtgaatagatgtgcaaggggagcacatattggatgtatatgttaccatatgttaggaaataaaattattttgctg

SEQ ID NO: 3655 - DNA, 1315 bp, Homo sapiens
gaagcgagtaccttactagtagccactaggggtgtcagtaatatggctcaactttgttacgacggatcagaaaaatgctcacctttaagaccgcaagcagagcctgtctggggaagcaggtgacttatcaacgccttttgagataaggaataggactgcggggaggagtgtgtgagaatcaaagaaaatgagaaaggacaatatatatctccatttcatgatattccaatttatgcagataaggatgtgtttcacatggtagttgaagtaccacgctggtctaatgcaaaaatggagattgctacaaaggaccctttaaaccctattaaacaagatgtgaaaaaaggaaaacttcgctatgttgcgaatttgttcccgtataaaggatatatctggaactatggtgccatccctcagacttgggaagacccagggcacaatgataaacatactggctgttgtggtgacaatgacccaattgatgtgtgtgaaattggaagcaaggtatgtgcaagaggtgaaataattggcgtgaaagttctaggcatattggctatgattgacgaaggggaaaccgactggaargtcattgccattaatgtggatgatcctgatgcagccaattataatgatatcaatgatgtcaaacggctgaaacctggctacttagaagctactgtggactggtttagaaggtataaggttcctgatggaaaaccagaaaatgagtttgcgtttaatgcagaatttaaagataaggactttgccattgatattattaaaagcacwcatgaccattggaaagcattagtgactaagaaaacgaatggaaaaggaatcagttgcatgaatacaactttgtctgagagccccttcaagtgtgatcctgatgctgccagagccattgtggatgctttaccaccaccctgtgaatctgcctgcacagtaccaacagacgtggataagtggttccatcaccagaaaaactaatgagatttctctggaatacaagctgatattgctacatcgtgttcatctggatgtattagaagtaaaagtagtagcttttcaragctttaaatttgtagaactcatctaactaaagtaaattctgctgtgactaatccaatatactcagaatgttayccatctaaagcatttttcatatctcaactaagataacttttagcacatgcttaaatatcaaagcagttgtcatttggaagtcacttgtgaatagatgtgcaaggggagcacatattggatgtatatgttaccatatgttaggaaataaaattattttgctgaaacttgg

SEQ ID NO: 3656 - DNA, 526 bp, Homo sapiens
aggtgaggctggtctctgtgcattctgtccagactggacactaggtctccaagtagcaagttaaagaacacaccaatgcttgccttaacaaaaataatttattccacacacctcccaaggcagggggtagcgkgggaatcaagcatgtgtaaggcactrcccccgccagacccttytaacttytgcacactggaaggkraaacctggagagagaagacactcccctccctagcttytacctggcaccctccaaagatgagcattcatcttggagaccaaaataaaaaagggagcagggtgggcggagccccagcagctagtgaggagttccattccagcccacccagctgggggaccctcctctggcttcacttgccccagttgagggccaagaccaagcaggagagactgaggctccagtgagaatgaggcaggacttcaaataagctgaaaaacaggaatgtggtgctaagaggccagggactgagctgccctatgcccactgcccggggctgccctccctgca

SEQ ID NO: 3657 - DNA, 2508 bp, Homo sapiens
ttttggtaaaaagtcacacgccacacaacgtgagattttattattccacgggtgcttccttgccaatagtagacatggcagctcggctcccttcccttcgggttcgccttattgttgccaattgtaaacatggcctctaggccgtgagttctcattggcagctgctctgagtccccgcccttccccgcccctccgaacgcggcctggagttgtggagtcggatatcgcagctcccgactgagctgcgcctgcgcaactcattggcgccaagatggcgatggagatgaggcttccagtggctcgcaagcctcttagcgagagactgggccgcgacactaagaaacatctagtggtgccgggggatacaatcactacggacacaggattcatgcggggccatggaacgtatatgggagaagagaagctcattgcatctgttgctggctctgtggagagagtaaacaagttgatctgtgtgaaagctttgaaaaccagatacattggtgaagtaggagacatcgtagtgggacgaatcacagagaggagaagatctgcagaagatgagcttgcaatgagaggtttcttacaggaaggggaccttatcagtgctgaggtccaggcagtgttctctgacggagctgtctctttgcacacgaggagcctgaaatatggaaaactaggtcagggggttttggtccaggtttccccctccctggtgaaacggcagaagacscactttcatgatttgccatgtggtgcctcagtgattctcggtaacaacggcttcatctggatttacccaacacctgagcacaaagaagaggaagcagggggcttcattgcaaacctggagcctgtctctcttgctgatcgagaggtgatatcccggcttcggaactgcatcatctcgctggtaactcagaggatgatgctgtatgataccagcatcctgtactgctatgaagcatcccttccacatcagatcaaagacatcttaaagccagaaataatggaggagattgtgatggaaacacgccagaggcttttggaacargagggataaggaggtgctccagaagcacgggactgtggaccttgcaggagtgaagactgtgatgtgtggtccccatatgtggctcagcaaagactsgagagatcatccctttgtctgcattgacggccctgtgacggcctccagcccacaggcctgctttctcctgtcctaacaccaagcctgggtggcagatgaacagtgcttccttgggttgccagctgagtcccggtattagggaatagtttcagctctttcaaagtgcacagtgttacagtcgaatgggctcccatcctggaataatatggagaatcctttgtcttccactcactgtcattcacaaggcacagtgccccatgaaattgccccaatagaaaacatggcatccctgacctccaaatggtctgttttggcctccattcctatatcctttaaatgactgagaatgcagctggtaaagttggaagaataaagttaaccaagcaggccaggcacggtggctcacgcctataatcccagcacttrgggaggccaaggcgggcagatcacctgaggtcaatagttcgagaccagcctggccaacaaggtgaaaccccatctctaytaaaaatacaaaaaattagccaggtgtggtggtgtgcacctgtagtcccagctatttgggaggctgaggtgggagaatcrcttgaacctgggaggcggaggttgcagtgagctgaaatcgcgtaccacactccagcctgggtgacagagcgagactgtgtttcaaagaaaaaaaaaaacaagcagccttttgcttggttggaatmtgattttctgttgcgtgttccttgtagccatagatgtgattatgtccacaccgggctgccttaatctgtcctgcttggagagtgacttgtaagatgctgaattattcatgataatacagtgaatgttctgggtccatgtactcagataaacatgaagaaaataagcaaagaaaaatggagactgggaaagcaaagctgttttcatcctataattgaagtagtgtggagcattaacttgtggatgattcagagttaaaagataaaaagacgccagagttctcgctgaagaatgtgagaattcctgtgcattgttttttctgatgactatctaaaaatggtgccctgatgtaggtttgggggaacattcttaaaaacaagggtgctatgtgcctgtaatccagcactttgggaagctgagtgggcagatcacctgaggtcaggagttcaagaccagcccggccaatacagtgaaacctcgtctttaccaaaaatacaaaaattagccgggtgtggtggcacaagcctgtatgtagtcagctactcaggaggctgaggcatgagaatcgcttgaattcgggaggcggagttgcagtgagctgagatcgcaccattgcacttcagcctaggtgacacagtgagactgtctcg

SEQ ID NO: 3658 - DNA, 2598 bp, Homo sapiens
ttttggtaaaaagtcacacgccacacaacgtgagattttattattccacgggtgcttccttgccaatagtagacatggcagctcggctcccttcccttcgggttcgccttattgttgccaattgtaaacatggcctctaggccgtgagttctcattggcagctgctctgagtccccgcccttccccgcccctccgaacgcggcctggagttgtggagtcggatatcgcagctcccgactgagctgcgcctgcgcaactcattggcgccaagatggcgatggagatgaggcttccagtggctcgcaagcctcttagcgagagactgggccgcgacactaagaaacatctagtggtgccgggggatacaatcactacggacacaggattcatgcggggccatggaacgtatatgggagaagagaagctcattgcatctgttgctggctctgtggagagagtaaacaagttgatctgtgtgaaagctttgaaaaccagatacattggtgaagtaggagacatcgtagtgggacgaatcacagaggttcaacagaagaggtggaaggtggagaccaactccaggctggattcggtcttgctgctctcgtccatgaaccttcctggaggagagctgaggagaagatctgcagaagatgagcttgcaatgagaggtttcttacaggaaggggaccttatcagtgctgaggtccaggcagtgttctctgacggagctgtctctttgcacacgaggagcctgaaatatggaaaactaggtcagggggttttggtccaggtttccccctccctggtgaaacggcagaagacscactttcatgatttgccatgtggtgcctcagtgattctcggtaacaacggcttcatctggatttacccaacacctgagcacaaagaagaggaagcagggggcttcattgcaaacctggagcctgtctctcttgctgatcgagaggtgatatcccggcttcggaactgcatcatctcgctggtaactcagaggatgatgctgtatgataccagcatcctgtactgctatgaagcatcccttccacatcagatcaaagacatcttaaagccagaaataatggaggagattgtgatggaaacacgccagaggcttttggaacargagggataaggaggtgctccagaagcacgggactgtggaccttgcaggagtgaagactgtgatgtgtggtccccatatgtggctcagcaaagactsgagagatcatccctttgtctgcattgacggccctgtgacggcctccagcccacaggcctgctttctcctgtcctaacaccaagcctgggtggcagatgaacagtgcttccttgggttgccagctgagtcccggtattagggaatagtttcagctctttcaaagtgcacagtgttacagtcgaatgggctcccatcctggaataatatggagaatcctttgtcttccactcactgtcattcacaaggcacagtgccccatgaaattgccccaatagaaaacatggcatccctgacctccaaatggtctgttttggcctccattcctatatcctttaaatgactgagaatgcagctggtaaagttggaagaataaagttaaccaagcaggccaggcacggtggctcacgcctataatcccagcacttrgggaggccaaggcgggcagatcacctgaggtcaatagttcgagaccagcctggccaacaaggtgaaaccccatctctaytaaaaatacaaaaaattagccaggtgtggtggtgtgcacctgtagtcccagctatttgggaggctgaggtgggagaatcrcttgaacctgggaggcggaggttgcagtgagctgaaatcgcgtaccacactccagcctgggtgacagagcgagactgtgtttcaaagaaaaaaaaaaacaagcagccttttgcttggttggaatmtgattttctgttgcgtgttccttgtagccatagatgtgattatgtccacaccgggctgccttaatctgtcctgcttggagagtgacttgtaagatgctgaattattcatgataatacagtgaatgttctgggtccatgtactcagataaacatgaagaaaataagcaaagaaaaatggagactgggaaagcaaagctgttttcatcctataattgaagtagtgtggagcattaacttgtggatgattcagagttaaaagataaaaagacgccagagttctcgctgaagaatgtgagaattcctgtgcattgttttttctgatgactatctaaaaatggtgccctgatgtaggtttgggggaacattcttaaaaacaagggtgctatgtgcctgtaatccagcactttgggaagctgagtgggcagatcacctgaggtcaggagttcaagaccagcccggccaatacagtgaaacctcgtctttaccaaaaatacaaaaattagccgggtgtggtggcacaagcctgtatgtagtcagctactcaggaggctgaggcatgagaatcgcttgaattcgggaggcggagttgcagtgagctgagatcgcaccattgcacttcagcctaggtgacacagtgagactgtctcg

SEQ ID NO: 3659 - DNA, 1551 bp, Homo sapiens
ttttggtaaaaagtcacacgccacacaacgtgagattttattattccacgggtgcttccttgccaatagtagacatggcagctcggctcccttcccttcgggttcgccttattgttgccaattgtaaacatggcctctaggccgtgagttctcattggcagctgctctgagtccccgcccttccccgcccctccgaacgcggcctggagttgtggagtcggatatcgcagctcccgactgagctgcgcctgcgcaactcattggcgccaagatggcgatggagatgaggcttccagtggctcgcaagcctcttagcgagagactgggccgcgacactaagaaacatctagtggtgccgggggatacaatcactacggacacaggattcatgcggggccatggaacgtatatgggagaagagaagctcattgcatctgttgctggctctgtggagagagtaaacaagttgatctgtgtgaaagctttgaaaaccagatacattggtgaagtaggagacatcgtagtgggacgaatcacagaggttcaacagaagaggtggaaggtggagaccaactccaggctggattcggtcttgctgctctcgtccatgaaccttcctggaggagagctgaggagaagatctgcagaagatgagcttgcaatgagaggtttcttacaggaaggggaccttatcagtgctgaggtccaggcagtgttctctgacggagctgtctctttgcacacgaggagcctgaaatatggaaaaatgaagtctcactatgttgcccaggctggtcttgaactcctgacctcaagcaaccctcctgctcaagccatcttcccaccttagcctcccagagtgttgagattacaggcatgagccaccacacgctgcctattttttttatttttacgaatttttttgttgttgcccaggctcaagcgatccacccacctttgcctcccaaagtgctgggattatgtgtgtgagccacagctcctggcctctttttttgtttttcctatcccaagttgtattactagttttggggagtttgcagacaattgaatattctataggctgtgttgcagctttagatggatcgacctgtcatgtttttgaggttatccaggctgtatatctctggagagaagggaatggcaaagagtgggagtctgagtcaagtttggttttktttttttaagagacaaggtctctgtaatccaggctgcagtacactggcatgaccatggctcactatagacttgggctcagccaatcttcctgcctcagcctcctgagtagctgggtttggttttccccagggccatatgtcagcttatttaccctcctcacttggtgtctcccagcctgccagcccatgctgttcatccagtatctgctgaatggtgattacctattaagtggaactaacacaaaaktgcttatctaaaagcaattattggtgattatttccttgcagtggcccactagagggcgccattgttaagtgtaattccagtaggtgttttgtgttttttttttttaat

SEQ ID NO: 3660 - DNA, 945 bp, Homo sapiens
accatgtaaagatttcagtttattccattaaaaaaaaaaaacacaaaacacctactggaattacacttaacaatggcgccctctagtgggccactgcaaggaaataatcaccaataattgcttttagataagcamttttgtgttagttccacttaataggtaatcaccattcagcagatactggatgaacagcatgggctggcaggctgggagacaccaagtgaggagggtaaataagctgacatatggccctggggaaaaccaaacccagctactcaggaggcttgtgccaccacacccggctaatttttgtatttttggtaaagacgaggtttcactgtattggccgggctggtcttgaactcctgacctcaggtgatctgcccactcagcttcccaaagtgctggattacaggcacatagcacccttgtttttaagaatgttcccccaaacctacatcagggcaccatttttagatagtcatcagaaaaaacaatgcacaggaattctcacattcttcagcgagaactctggcgtctttttatcttttaactctgaatcatccacaagttaatgctccacactacttcaattataggatgaaaacagctttgctttcccagtctccatttttctttgcttattttcttcatgtttatctgagtacatggacccagaacattcactgtattatcatgaataattcagcatcttacaagtcactctccaagcaggacagattaaggcagcccggtgtggacataatcacatctatggctacaaggaacacgcaacagaaaatcakattccaaccaagcaaaaggctgcttgtttttttttttctttgaaacacagtctcgctctgtcacccaggcttggtgttaggacaggagaaagcaggcctgtgggctggaggccgtcacagggccgtcaatgcagacaaa

SEQ ID NO: 3661 - DNA, 1352 bp, Homo sapiens
ctggcacaggctctgctcgcaccagctcgctcctgctgccatgcccaccaccatcaagtgggagttcaaggagttggatgctcagcatcgctggcagctgytgtacttgatgatcacagttgtgttaaactgcaaaatgctgagaatgattatattaatgccagcttagttgacatagaagaggacaaaggagttacatcttaacacagggtccacttcctaacacatgctgccatttctggcttatggtttggcagcagaagaccaaagcagttgtcatgctgaaccgcattatggagaaagaattggttaaatgtgcacagtactggccaacagatgaccaagagatgctgtttaaagaaacaggattcagtgtgaagctcttgtcagaagatgtgaagtcgtattatacagtacatctaccacaattagaaaatatcaatatgagagaatctggctccttgaaccctgaccatggacctgtggtgatccaccgtagtgcaggcactggacgctccagcaccttctctstggtasacacttgtcttgttttgatggaaaaaggagatgatattaacattaaacaagtgttactgaacataagaaaattccaaatgggtcttatctcagaccccagatcaactgagattctcatacatggctataayagaaggagcaaaatgtgtaaagggagattctagtatacagaaacgatggaaagaactttctaaggaagactacctcctgcttttgatcattcaccaaacaaaataatgactgaaaaatacaataggaacagaataggtctagaagaagaaaaactgacaggtgactgacgtacaggactttcctctaaaatgcaagatacaatggaggagaacaatgagagtgttctacggaaacgtatgtgagaggacagaaaggccaccacagctcagaaggtgcagcagatgaaatagaggctaaatgagaatgaacgaaaaagaaaaaggccaagattgacagatacctaatattcatgacttgagaatattctgcagctataaatttggaaccattgatgtgcaaatcaagacctgaagcccactctggaaacttaagtgaggctcgctaaccctctagattgcctcacagttgtttgtttacaaagtaaacttgacatccagggaatgaagagcatccaccagctaagaccttgcagaacctttaactggatgttaagtgtttataatgcatgtatgaaatgtagaaagatgtacaagaaataaattaggagagattactttgtattgtactgccattcctactgtatttttatactttttggcagcattaaatatttttgttaaata

SEQ ID NO: 3662 - DNA, 1489 bp, Homo sapiens
aggctctctgcggatcgtgcagggcctgagcgtctccgctggcacaggctctgctcgcaccagctcgctcctgctgccatgcccaccaccatcaagtgggagttcaaggagttggatgctcagcatcgctggcagctgytgtacttgatgatcacagttgtgttaaactgcaaaatgctgagaatgattatattaatgccagcttagttgacatagaagaggacaaaggagttacatcttaacacagggtccacttcctaacacatgctgccatttctggcttatggtttggcagcagaagaccaaagcagttgtcatgctgaaccgcattatggagaaagaattggttaaatgtgcacagtactggccaacagatgaccaagagatgctgtttaaagaaacaggattcagtgtgaagctcttgtcagaagatgtgaagtcgtattatacagtacatctaccacaattagaaaatatcaatagtggtgaaaccagaacaatatctcactttcattatactacttggccagattttggagtccctcaatcaccagcttcatttctcaatttcttgtttaaagtgagagaatctggctccttgaaccctgaccatggacctgtggtgatccaccgtagtgcaggcactggacgctccagcaccttctctstggtasacacttgtcttgttttgatggaaaaaggagatgatattaacattaaacaagtgttactgaacataagaaaattccaaatgggtcttatctcagaccccagatcaactgagattctcatacatggctataayagaaggagcaaaatgtgtaaagggagattctagtatacagaaacgatggaaagaactttctaaggaagactacctcctgcttttgatcattcaccaaacaaaataatgactgaaaaatacaataggaacagaataggtctagaagaagaaaaactgacaggtgactgacgtacaggactttcctctaaaatgcaagatacaatggaggagaacaatgagagtgttctacggaaacgtatgtgagaggacagaaaggccaccacagctcagaaggtgcagcagatgaaatagaggctaaatgagaatgaacgaaaaagaaaaaggccaagattgacagatacctaatattcatgacttgagaatattctgcagctataaatttggaaccattgatgtgcaaatcaagacctgaagcccactctggaaacttaagtgaggctcgctaaccctctagattgcctcacagttgtttgtttacaaagtaaacttgacatccagggaatgaagagcatccaccagctaagaccttgcagaacctttaactggatgttaagtgtttataatgcatgtatgaaatgtagaaagatgtacaagaaataaattaggagagattactttgtattgtactgccattcctactgtatttttatactttttggcagcattaaatatttttgttaaata

SEQ ID NO: 3663 - DNA, 1382 bp, Homo sapiens
aggctctctgcggatcgtgcagggcctgagcgtctccgctggcacaggctctgctcgcaccagctcgctcctgctgccatgcccaccaccatcaagtgggagttcaaggagttggatgctcagcatcgctggcagctgytgtacttgatgatcacagttgtgttaaactgcaaaatgctgagaatgattatattaatgccagcttagttgacatagaagaggacaaaggagttacatcttaacacagggtccacttcctaacacatgctgccatttctggcttatggtttggcagcagaagaccaaagcagttgtcatgctgaaccgcattatggagaaagaattggttaaatgtgcacagtactggccaacagatgaccaagagatgctgtttaaagaaacaggattcagtgtgaagctcttgtcagaagatgtgaagtcgtattatacagtacatctaccacaattagaaaatatcaatagtggtgaaaccagaacaatatctcactttcattatactacttggccagattttggagtccctcaatcaccagcttcatttctcaatttcttgtttaaagtgagagaatctggctccttgaaccctgaccatggacctgtggtgatccaccgtagtgcaggcactggacgctccagcaccttctctstggtasacacttgtcttgttttgatggaaaaaggagatgatattaacattaaacaagtgttactgaacataagaaaattccaaatgggtcttatctcagaccccagatcaactgagattctcatacatggctataayagaaggagcaaaatgtgtaaagggagattctagtatacagaaacgatggaaagaactttctaaggaagactacctcctgcttttgatcattcaccaaacaaaataatgactgaaaaatacaataggaacagaataggtctagaagaagaaaaactgacaggtgactgacgtacaggactttcctctaaaatgcaagatacaatggaggagaacaatgagagtgccaagattgacagatacctaatattcatgacttgagaatattctgcagctataaatttggaaccattgatgtgcaaatcaagacctgaagcccactctggaaacttaagtgaggctcgctaaccctctagattgcctcacagttgtttgtttacaaagtaaacttgacatccagggaatgaagagcatccaccagctaagaccttgcagaacctttaactggatgttaagtgtttataatgcatgtatgaaatgtagaaagatgtacaagaaataaattaggagagattactttgtattgtactgccattcctactgtatttttatactttttggcagcattaaatatttttgt

SEQ ID NO: 3664 - DNA, 4339 bp, Homo sapiens
atgcagtacaaaccagtgtcctccagagtccgctgtgcctacggccagagcagcgacagagccttcctcaaacctgtagtgactgccacactttgcaaggacaccgtagagggggcatgtccgcgctccaacttcctcccgacgcagcctctgattggctcctgggcttataagaaacgcgtgaatgagcagctgccgcgggcagaaagttgccggaggtctccgggtggtatcsccctttcctctttgccagcccgctggcgagccgagccrgggcaagatgaggtcgtcctgtgtcctgctcaccgccctggtggcgctggccgcctattacktctacatcccgctgcctggctccgtgtccgacccctggaagctgatgctgctggacgccactttccggggtgcacagcaagtgagtaacctgatccactacctgggactgagccatcacctgctggcactgaattttatcattgtttcttttggcmaaaaaagcgcgtggtcttctgcccaagtgaaggtgaccgacacagactttgatggtgtggaagtcagagtgtttgaaggccctccgaagcccgaagagccactgaaacgcagcgtcgtttatatccacggaggaggctgggccttggcaagtgcaaaaatcaggtattatgatgagctgtgtacagcaatggctgaggaattgaatgctgtcattgtttccattgaatacaggctagttccaaaggtttattttcctgagcaaattcatgatgttgtacgggccacaaagtatttcctgaagccagaagtcttacagaagtatatggttgatccaggcagaatttgcatttctggtgacagtgctggtggaaatctggctgctgcccttggacaacagtttactcaagatgccagcctaaaaaataagctcaaactacaagctttaatttatccagttcttcaagctttagattttaacacaccatcttatcagcaaaatgtgaacaccccaatcctgccccgctatgtcatggtgaagtattgggtggactacttcaaaggcaactatgactttgtgcaggcaatgatcgttaacaatcacacttcacttgatgtggaagaggctgctgctgtcagggcccgtctaaactggacatccctcttgcctgcatccttcacaaagaactacaagcctgttgtacagaccacaggcaatgccaggattgtccaggagcttcctcagttgctggatgcccgctccgccccactcattgcagaccaggcagtgctgcagctcctcccaaagacctacattctgacgtgtgagcatgatgtcctcagagacgatggcatcatgtatgccaagcgtttggagagtgccggtgtggaggtgaccctggatcactttgargatggctttcacggatgtatgattttcactagctggcccaccaacttctcagtgggaatccggactaggaatagttacatcaagtggctagatcaaaacctgtaaaggagcaaaacttccagaagcctcgagcccctcttgacctcctacacctgctttggaaagacatgcactttttagttgactaattcttcctcccattcccctctacttgcgagttatggaatttctattccataactgaagtctttatgataacctaatttttaaaaatgaatttgactaacttaagtgcaaaacatgtaaatttggttcccagagtgggccaatctctctgttcttgttatcttagccaactatactsmtacctacagctacagaaagcaggactaggaactggaaataactttgggtcctgccttcattaggacgttctttttagaagcagttcttccagctctggatcatagagtgacctttaataagttaaaaaaacgaggactccttaattctgctagagttaaccttgagttcagagcagtattaaatgcgtgcactttcaggtcagtactggggaccaagtaccctctggtcttttgtgaatggatggttttgtttcctatgggaattttggcaaaggttttctggaaagaacaagtttctcaaaggactttcttcctctagaatgttcattttatgagatcgctatctgtaagtccagttggattacaggaatacttgaaagttactttctaccactattagaaaatatgaagtcgcatgcactggatatctatatatcattaggtttttgttgtgtttttggttatgctgtcccccttctccttggggagatatttgggagcaaacttatttagatttagagtaaacttttcattatagagcaagtaaaaacagacaaatgaaacaacctagtgtttcacataaaaatacttctgacataaagtaccaagagcagtgtgaatatacttggcatagtcaaaaaaraaaatacatttaatattagttmaaaattgttaaaaatacctttagaaggtctagtctattattgaaaactcaattttttcacttatatggctttaaaatggagctattttgctacaatataatgtattgtttatttttttaagttatttaatgttaatatacatagctagacttaaggtttttcagaaagatgtccataataaatattaaaaacaatggtatttttwaaaaaactgccttagggttttaaaaccttccctacagttataaccacgtgtaattttgtggaaatgatataacagctattaatactactataacataggcataaatattttcgtgtttatatgcatatacaagttaaaataattagaaactatgactgcgcctagtaaagtcatctaggtttatagttcagtagcttaggcaaggcacacactgctcatctccgctttttagggtcagaggaacacaagctcatgttctgagtgaagggcgtacactggcacctggtgttgcctagatcccccatctcctccttccagccaggtctggaagtttcaacagcccaagcttaacttcatgtaaagtcttcactgccagtgggaacatctttgacacaacaagacactccaattgtgatttgagttgaggatctctgcctgccttcctgccgtccttccttcttccccgatccatgctacttttaggggctgcggagagcagcagcagagctgagtaatgatacagggcaccacggagagaaagtagaaccatttcactcctgggaagatggggtatttcccacttccagcaacgaaataacaaatgaaaagttgcatacttattgatgtattgtatgagccagtagcattttatgtacaaaacagaagtcaatgcaacagtatgtatgtgtgcctgtgtgtgtataaaaataaccattgaagctaacttgctaatgtacttaggcaagccacttcccatctctgggcctcgtctttcctccctctaaaatcaaagagctgaattatgtgatccttgaggtctcttccacttataataccaactgtcttgtcagactggcaaattatattggcctctccttatgtggtggtttttttggtaggtcatagttccttatacacrgacacctgcatcatcgaaggtctttttttcctaaaaaaaaaaaatgggattttagttcttattctgtgataactatcctcctcatataatactattctttttgacaccatttgaaggaaccaatatttggaccttattttgaggttgtctgtctcgaagaaaaagaaaataaaatgtataggcagggttccttcaattggcattttccccagaattgtgagccaaagcctatagtaattgcagacagcaaatgattccggatctctaaaaggctctctcagatgaaaagggagtaaaggaaaaaagaggtcaaccactgtttctgataatgtacttgagtttcattgttcttttagtttgtattcttataaaaaatgtttacactctgcagattgattttttttttttagtactgtggctttcttttcctattttatgaaaaaaatgataatctttttgtaaaattgtctgtgaaatataaacattaatatataaagaaaaaccttgaagtgctgtatagtgaagtataaattaatgttttattgatttgtgaagaatttaagactattatataattatcttggtggatctattttatgcatgaccttttaacctttgactttgcttatttcccactacgaaggggaaggtagattttatgaatgattttaatagcaaatatattttataaagtgaaaatccagtgtggaggtagcaaagcatctatctattctgaatcatgtttggaaataaaattgctccatctgggaatgtgctttcatt

SEQ ID NO: 3665 - DNA, 1734 bp, Homo sapiens
  misc_feature (1)...(1734): n = A,T,C or G
ncggagccccggacgcggcgcagggcctatctgtggtgcaaggagttcctgcccggcgcctggcggggcctccgcgaggacgagttccacatcagtgtcatcagaggcggccttagcaacatgctgttccagtgctccctacctgacaccacagccacccttggtgatgagcctcggaaagtgctcctgcggctgtatggagcgattttgcagatgaggtcctgtaataaagagggatccgaacaagctcagaaagaaaatgaatttcaaggggctgaggccatggttctggagagcgttatgtttgccattctcgcagagaggtcrcttgggccaaaactctatggcatctttccccaaggccgactggagcagttcatcccgagccggcgattagatactgaagaattaagtttgccagatatttctgcagaaatcgccgagaaaatggctacatttcatggtatgaaaatgccattcaataaggaaccaaaatggctttttggcacaatggaaaagtatctaaaggaagtgctgagaattaaatttactgaggaatccagaattaaaaagctccacaaattgctcagttacaatctgcccttggaactggaaaacctgagatcattgcttgaatctactccatctccagttgtattttgtcataatgactgtcaagaaggtaatatcttgttgctggaaggccgagagaattctgaaaaacagaaactgatgctcattgatttcgaatacagcagttacaattacaggggattcgacattggaaatcacttctgtgagtggatgtatgattatagctatgaaaaatacccttttttcagagcaaacatccggaagtatcccaccaagaaacaacagctccattttatttccagttacttgcctgcattccaaaatgactttgaaaacctcagtactgaagaaaaatccattataaaagaagaaatgttgcttgaagttaataggtttgcccttgcatctcatttcctctggggactgtggtccattgtacaagccaagatttcatctattgaatttgggtacatggactacgcccaagcaaggtttgatgcctatttccaccagaagaggaagcttggggtgtgactgtggggaggactccatccacctcatcactggactgcatggggaggcagcagagcggggtcccctctgtgcttcgactactgctcctgtggcaggaggctttgggtggctcactactgaacacatgtgtatgatactaaagacggtattaaaatggagcgacgtttatttcatctcttgtttacgatttcactaggactcagaaacgagatcgggaagcagaaatatagtgcaatagtgcaacatctctgaatccttttaatctagagaaggcatttcatatttgggggctaaggtttccagtcagatgaggcaaacagcaagagtaagcagtgttacttgcaggtactttggttaatgttgatttaaattttcatgaatgtgctggtgaacactgtgaccaggcttttgtagatggygcagcaagtgagcagagatgtactgcaaagtcgccagtcactgctgcaaggtggcctctgcctggggcctccagaagctgctcctttaccctcttggtcccatggctgaagctggagcagcggattgctctggagcagccaaggccgccagcgtgtggagcagagctctcccctcctgctgggcgtg

SEQ ID NO: 3666 - DNA, 2709 bp, Homo sapiens
atcctggttatcataaatttgcaatttcattgaggaaagtgatataagtatttcttaatatattaatatatgaaataattttagagactttattaaatacacacagtcctctttatggtagaggaacagttcagcttgagctggtgaccggctgaactagaggggttactctgggaaagtggcgagtcggcagggcatgtctgcacagattttgtgccaggtttcctgcctgcacagcgctttcttctctgtccaagttctgtgctgaccacagctgtccacaggcatgtttacactccctgttcttgcaggttgacttgagagaaccacgtagctaaattggtgagagactcagcctgaccgcttgtctttagaaggcctgattggaagagtgcactctattgactttcctctaacaatgaaattgtgaaagaggtcctgtaataaagagggatccgaacaagctcagaaagaaaatgaatttcaaggggctgaggccatggttctggagagcgttatgtttgccattctcgcagagaggtcrcttgggccaaaactctatggcatctttccccaaggccgactggagcagttcatcccgagccggcgattagatactgaagaattaagtttgccagatatttctgcagaaatcgccgagaaaatggctacatttcatggtatgaaaatgccattcaataaggaaccaaaatggctttttggcacaatggaaaagtatctaaaggaagtgctgagaattaaatttactgaggaatccagaattaaaaagctccacaaattgctcagttacaatctgcccttggaactggaaaacctgagatcattgcttgaatctactccatctccagttgtattttgtcataatgactgtcaagaaggtaatatcttgttgctggaaggccgagagaattctgaaaaacagaaactgatgctcattgatttcgaatacagcagttacaattacaggggattcgacattggaaatcacttctgtgagtggatgtatgattatagctatgaaaaatacccttttttcagagcaaacatccggaagtatcccaccaagaaacaacagctccattttatttccagttacttgcctgcattccaaaatgactttgaaaacctcagtactgaagaaaaatccattataaaagaagaaatgttgcttgaagttaataggtttgcccttgcatctcatttcctctggggactgtggtccattgtacaagccaagatttcatctattgaatttgggtacatgtacccgaatgtggtgacctggtggcatcaggacagtgtggctcagcccaggaagccgggggagaagccgctgtcactgatgctgtggttgcctttggaggttgccctcacttccaggccagctgaccttgcctcccctgcttcagagaagtgcctgcaatcctgatggggaatgtaggcatctgcaccctcgaagtccagctctgacctcagtcccttctgacacgggacagactacgcccaagcaaggtttgatgcctatttccaccagaagaggaagcttggggtgtgactgtggggaggactccatccacctcatcactggactgcatggggaggcagcagagcggggtcccctctgtgcttcgactactgctcctgtggcaggaggctttgggtggctcactactgaacacatgtgtatgatactaaagacggtattaaaatggagcgacgtttatttcatctcttgtttacgatttcactaggactcagaaacgagatcgggaagcagaaatatagtgcaatagtgcaacatctctgaatccttttaatctagagaaggcatttcatatttgggggctaaggtttccagtcagatgaggcaaacagcaagagtaagcagtgttacttgcaggtactttggttaatgttgatttaaattttcatgaatgtgctggtgaacactgtgaccaggcttttgtagatggygatgtgttatagacggtgctcactcccaagggacagcaagtgagcagagatgtactgcaaagtcgccagtcactgctgcaaggtggcctctgcctggggcctccagaagctgctcctttaccctcttggtcccatggctgaagctggagcagcggattgctctggagcagccaaggccgccagcgtgtggagcagagctctcccctcctgctgggcgtgtgtgacactgatgagtttcactgtactgcatgtgacttctcccctgcccttcctcctgatggagtgtgcagacagccatgcgtggccacgggggcagtgtgaggacctccctgtctcccggctcccctcccaggggagccagctgcttgacctagctctttgggcctctcctgccctctgctctgcctggagtgtcggatcctgtgagtaggctgggcctcccctgggcagggttctccaagggcccggtttcccggcccttacctttcctgatgcccctgacatcatcattcttgtgggagacagcagcctgtatgtggtgtggggcgtggatcgagtgtagctgtgaaatccatatatatgaaatgtcctgcgggatacagtcttagctgacttttttttactctgaactcttatttgaattgttttttgtgcatatatttctgctaccacagagattgtactatacaaataaaaaaatwaaaacccaacctc

SEQ ID NO: 3667 - DNA, 2261 bp, Homo sapiens
  misc_feature (1)...(2261): n = A,T,C or G
ncggagccccggacgcggcgcagggcctatctgtggtgcaaggagttcctgcccggcgcctggcggggcctccgcgaggacgagttccacatcagtgtcatcagaggcggccttagcaacatgctgttccagtgctccctacctgacaccacagccacccttggtgatgagcctcggaaagtgctcctgcggctgtatggagcgattttgcagatgaggtcctgtaataaagagggatccgaacaagctcagaaagaaaatgaatttcaaggggctgaggccatggttctggagagcgttatgtttgccattctcgcagagaggtcrcttgggccaaaactctatggcatctttccccaaggccgactggagcagttcatcccgagccggcgattagatactgaagaattaagtttgccagatatttctgcagaaatcgccgagaaaatggctacatttcatggtatgaaaatgccattcaataaggaaccaaaatggctttttggcacaatggaaaagtatctaaaggaagtgctgagaattaaatttactgaggaatccagaattaaaaagctccacaaattgctcagttacaatctgcccttggaactggaaaacctgagatcattgcttgaatctactccatctccagttgtattttgtcataatgactgtcaagaaggtaatatcttgttgctggaaggccgagagaattctgaaaaacagaaactgatgctcattgatttcgaatacagcagttacaattacaggggattcgacattggaaatcacttctgtgagtggatgtatgattatagctatgaaaaatacccttttttcagagcaaacatccggaagtatcccaccaagaaacaacagctccattttatttccagttacttgcctgcattccaaaatgactttgaaaacctcagtactgaagaaaaatccattataaaagaagaaatgttgcttgaagttaataggtttgcccttgcatctcatttcctctggggactgtggtccattgtacaagccaagatttcatctattgaatttgggtacatggactacgcccaagcaaggtttgatgcctatttccaccagaagaggaagcttggggtgtgactgtggggaggactccatccacctcatcactggactgcatggggaggcagcagagcggggtcccctctgtgcttcgactactgctcctgtggcaggaggctttgggtggctcactactgaacacatgtgtatgatactaaagacggtattaaaatggagcgacgtttatttcatctcttgtttacgatttcactaggactcagaaacgagatcgggaagcagaaatatagtgcaatagtgcaacatctctgaatccttttaatctagagaaggcatttcatatttgggggctaaggtttccagtcagatgaggcaaacagcaagagtaagcagtgttacttgcaggtactttggttaatgttgatttaaattttcatgaatgtgctggtgaacactgtgaccaggcttttgtagatggygatgtgttatagacggtgctcactcccaagggacagcaagtgagcagagatgtactgcaaagtcgccagtcactgctgcaaggtggcctctgcctggggcctccagaagctgctcctttaccctcttggtcccatggctgaagctggagcagcggattgctctggagcagccaaggccgccagcgtgtggagcagagctctcccctcctgctgggcgtgtgtgacactgatgagtttcactgtactgcatgtgacttctcccctgcccttcctcctgatggagtgtgcagacagccatgcgtggccacgggggcagtgtgaggacctccctgtctcccggctcccctcccaggggagccagctgcttgacctagctctttgggcctctcctgccctctgctctgcctggagtgtcggatcctgtgagtaggctgggcctcccctgggcagggttctccaagggcccggtttcccggcccttacctttcctgatgcccctgacatcatcattcttgtgggagacagcagcctgtatgtggtgtggggcgtggatcgagtgtagctgtgaaatccatatatatgaaatgtcctgcgggatacagtcttagctgacttttttttactctgaactcttatttgaattgttttttgtgcatatatttctgctaccacagagattgtactatacaaataaaaaaatwaaaacccaacctc

SEQ ID NO: 3668 - DNA, 824 bp, Homo sapiens
gactggcagtggctgggggctccatcccacacagaggacaggggctctgcagtccttcacccccaccctaactatctaatcacgggccaccggtgtgggcatggtccagaagacctcaccgccctcccaggatggacccccttggggacacgctgcggcgactgcgggaggccttccacgcggggcgcacrcggccagctgagttccgggctgcgcagctycaaggcctgggccgcttcctgcaagaaaacaagcagcttctgcacgacgcactggcccaggacctgcacaagtcagccttcgagtcggaggtgtctgaggttgccatcagccagggcgaggtcaccctggccctcaggaacctccgggcctggatgaaggacgagcgtgtgcccaagaacctggccacgcagctggactcygccttcatccggaaggagccctttggcctggtcctcatcattgcgccctggaactatccgctgaacctgacgctggtgcccctcgtgggagccctcgctgcagggaactgtgtggtgctgaagccatcggagattagcaagaacgtcgagaagatcctggccgaggtgctgccccaatacgtggaccagagctgctttgctgtggtgctgggcgggccccaggagacggggcagctgctagagcacaggttcgactacatcttcttcacagggagccctcgtgtgggcaagattgttatgactgctgccgccaagcggcacccctcaaagcagcgcctgcctcctccctcctgggtcttccctctccctgcctcagcctcctccctcagccgctcccaacca

SEQ ID NO: 3669 - DNA, 2761 bp, Homo sapiens
gactggcagtggctgggggctccatcccacacagaggacaggggctctgcagtccttcacccccaccctaactatctaatcacgggccaccggtgtgggcatggtccagaagacctcaccgccctcccaggatggacccccttggggacacgctgcggcgactgcgggaggccttccacgcggggcgcacrcggccagctgagttccgggctgcgcagctycaaggcctgggccgcttcctgcaagaaaacaagcagcttctgcacgacgcactggcccaggacctgcacaaggccacgcagctggactcygccttcatccggaaggagccctttggcctggtcctcatcattgcgccctggaactatccgctgaacctgacgctggtgcccctcgtgggagccctcgctgcagggaactgtgtggtgctgaagccatcggagattagcaagaacgtcgagaagatcctggccgaggtgctgccccaatacgtggaccagagctgctttgctgtggtgctgggcgggccccaggagacggggcagctgctagagcacaggttcgactacatcttcttcacagggagccctcgtgtgggcaagattgttatgactgctgccgccaagcacctgacacctgtcaccctggagctggggggcaagaacccttgctacgtggacgacaactgcgacccccagaccgtggccaaccgcgtggcctggttccgctacttcaacgccggccagacctgcgtggcccccgactaygtcctatgcagccctgagatgcaggagaggctgctgcctgccctgcagagcaccatcacccgtttctatggcgacgacccccagagctccccaaacctgggccgcatcatcaaccagaaacagttccagcggctgcgggcattgctgggctgcggccgtgtggccattgggggccagagcgatgagagcgatcgctacatcgcccccacggtgctggtggatgtgcaggagatggagcctgtgatgcaggaggagatcttcgggcccatcctgcccatcgtgaacgtgcagagcttggacgaggccatcgagttcatcaaccggcgggagaagcccctggccctgtacgccttctccaacagcagccaggtggtcaagcgggtgctgacccagaccagcagygggggcttctgtgggaacgacggcttcatgcacatgaccctggccagcctgccttttggaggagtgggtgccagtgggatgggccggtaccatggcaagttctccttcgacaccttctcccaccatcgcgcctgcctcctgcgcagcccrgggatggagaagctcaacgccctccgctacccgccgcaatcgccgcgccgcctraggatgctgctggtggccatggaggcccaaggctgcagctgcacactgctctgagcccttccccaggcccaggctgtagaccaccatgacagctgtcgcctgcggctggtggagacggggcctgggctcccgggcccgaggaggaaaaggattgccaaggctccagggcacccctcaaagcagcgcctgcctcctccctcctgggtcttccctctccctgcctcagcctcctccctcagccgctcccaaccatgagagccraggtgggaggcatgggaaacagtgcagtgactcaccccctgcccccgcaccaaccacccatattcaggagaagaggacagacacggcacctctgagtcacccctctcctgtggagcgggcgtccgaggggccctggcatctgactcaggccacaccatggaatcactgcatccaaggccattcctgccctctctgagtctcagtttttccatttgttcagtggagagaattaaccattgatacctcctggctgggtgaggcggctcacacctgtaatcccagcactttgggaggccgaggcaggcggatcacctgaaatcaggagttcaagatcagcctggctaacatggcgaaaccccgtctctactaaaaatacaaaaattagcctggcgtggtggcgcatgcctgtaatcccagctactcaggaggctaaggcaggagaatcgcttgaacccgggaggtggaggttgccgtgagctgagattgcgtcactgaactccggcctgggtgacagaaggaggctctgccttaaaaaaaaaaaaaaaaaaacctcctgggactgttgcaaggatgaaatgaaggattgagggattgagggattgctgagctggagctccaggtgtcctatctttctcagtggggtggcacggagcggggccgcctccctcttctctccaggcaggtggggctgtggttatgcgatagggtctcccttccctccagcccatgccagaggagcttgtaactctttatcctcatggtgcccactacgagtcatactcttccccatgctgctcatcctcctgggccccatccactcagccaaagcagaatgcagggtttcctgcctgacaacccttctcacctcccaagtcccacttttgaacaagctgatgattctgaaactggcccaatttcctaacaagccggatgcttgagaaacctacatttggacaatgagaggctgctcctgcggcctgcgggccacctcctcttccttggctcctgctttcttttyagactatatcaacctacaactttagtcgggaagagggacaggggtggacctgagtttcgtctcctgtctctctggctgatgtcacctgaataaagccttcttccctggc

SEQ ID NO: 3670 - DNA, 2872 bp, Homo sapiens
gactggcagtggctgggggctccatcccacacagaggacaggggctctgcagtccttcacccccaccctaactatctaatcacgggccaccggtgtgggcatggtccagaagacctcaccgccctcccaggatggacccccttggggacacgctgcggcgactgcgggaggccttccacgcggggcgcacrcggccagctgagttccgggctgcgcagctycaaggcctgggccgcttcctgcaagaaaacaagcagcttctgcacgacgcactggcccaggacctgcacaagtcagccttcgagtcggaggtgtctgaggttgccatcagccagggcgaggtcaccctggccctcaggaacctccgggcctggatgaaggacgagcgtgtgcccaagaacctggccacgcagctggactcygccttcatccggaaggagccctttggcctggtcctcatcattgcgccctggaactatccgctgaacctgacgctggtgcccctcgtgggagccctcgctgcagggaactgtgtggtgctgaagccatcggagattagcaagaacgtcgagaagatcctggccgaggtgctgccccaatacgtggaccagagctgctttgctgtggtgctgggcgggccccaggagacggggcagctgctagagcacaggttcgactacatcttcttcacagggagccctcgtgtgggcaagattgttatgactgctgccgccaagcacctgacacctgtcaccctggagctggggggcaagaacccttgctacgtggacgacaactgcgacccccagaccgtggccaaccgcgtggcctggttccgctacttcaacgccggccagacctgcgtggcccccgactaygtcctatgcagccctgagatgcaggagaggctgctgcctgccctgcagagcaccatcacccgtttctatggcgacgacccccagagctccccaaacctgggccgcatcatcaaccagaaacagttccagcggctgcgggcattgctgggctgcggccgtgtggccattgggggccagagcgatgagagcgatcgctacatcgcccccacggtgctggtggatgtgcaggagatggagcctgtgatgcaggaggagatcttcgggcccatcctgcccatcgtgaacgtgcagagcttggacgaggccatcgagttcatcaaccggcgggagaagcccctggccctgtacgccttctccaacagcagccaggtggtcaagcgggtgctgacccagaccagcagygggggcttctgtgggaacgacggcttcatgcacatgaccctggccagcctgccttttggaggagtgggtgccagtgggatgggccggtaccatggcaagttctccttcgacaccttctcccaccatcgcgcctgcctcctgcgcagcccrgggatggagaagctcaacgccctccgctacccgccgcaatcgccgcgccgcctraggatgctgctggtggccatggaggcccaaggctgcagctgcacactgctctgagcccttccccaggcccaggctgtagaccaccatgacagctgtcgcctgcggctggtggagacggggcctgggctcccgggcccgaggaggaaaaggattgccaaggctccagggcacccctcaaagcagcgcctgcctcctccctcctgggtcttccctctccctgcctcagcctcctccctcagccgctcccaaccatgagagccraggtgggaggcatgggaaacagtgcagtgactcaccccctgcccccgcaccaaccacccatattcaggagaagaggacagacacggcacctctgagtcacccctctcctgtggagcgggcgtccgaggggccctggcatctgactcaggccacaccatggaatcactgcatccaaggccattcctgccctctctgagtctcagtttttccatttgttcagtggagagaattaaccattgatacctcctggctgggtgaggcggctcacacctgtaatcccagcactttgggaggccgaggcaggcggatcacctgaaatcaggagttcaagatcagcctggctaacatggcgaaaccccgtctctactaaaaatacaaaaattagcctggcgtggtggcgcatgcctgtaatcccagctactcaggaggctaaggcaggagaatcgcttgaacccgggaggtggaggttgccgtgagctgagattgcgtcactgaactccggcctgggtgacagaaggaggctctgccttaaaaaaaaaaaaaaaaaaacctcctgggactgttgcaaggatgaaatgaaggattgagggattgagggattgctgagctggagctccaggtgtcctatctttctcagtggggtggcacggagcggggccgcctccctcttctctccaggcaggtggggctgtggttatgcgatagggtctcccttccctccagcccatgccagaggagcttgtaactctttatcctcatggtgcccactacgagtcatactcttccccatgctgctcatcctcctgggccccatccactcagccaaagcagaatgcagggtttcctgcctgacaacccttctcacctcccaagtcccacttttgaacaagctgatgattctgaaactggcccaatttcctaacaagccggatgcttgagaaacctacatttggacaatgagaggctgctcctgcggcctgcgggccacctcctcttccttggctcctgctttcttttyagactatatcaacctacaactttagtcgggaagagggacaggggtggacctgagtttcgtctcctgtctctctggctgatgtcacctgaataaagccttcttccctggc

SEQ ID NO: 3671 - DNA, 2829 bp, Homo sapiens
ctggccctgcgttggacatttcttaacagcagggccaccaggcagagcgggacagccaggaggaagggcagcttggcagagcctcaggatggacccccttggggacacgctgcggcgactgcgggaggccttccacgcggggcgcacrcggccagctgagttccgggctgcgcagctycaaggcctgggccgcttcctgcaagaaaacaagcagcttctgcacgacgcactggcccaggacctgcacaagtcagccttcgagtcggaggtgtctgaggttgccatcagccagggcgaggtcaccctggccctcaggaacctccgggcctggatgaaggacgagcgtgtgcccaagaacctggccacgcagctggactcygccttcatccggaaggagccctttggcctggtcctcatcattgcgccctggaactatccgctgaacctgacgctggtgcccctcgtgggagccctcgctgcagggaactgtgtggtgctgaagccatcggagattagcaagaacgtcgagaagatcctggccgaggtgctgccccaatacgtggaccagagctgctttgctgtggtgctgggcgggccccaggagacggggcagctgctagagcacaggttcgactacatcttcttcacagggagccctcgtgtgggcaagattgttatgactgctgccgccaagcacctgacacctgtcaccctggagctggggggcaagaacccttgctacgtggacgacaactgcgacccccagaccgtggccaaccgcgtggcctggttccgctacttcaacgccggccagacctgcgtggcccccgactaygtcctatgcagccctgagatgcaggagaggctgctgcctgccctgcagagcaccatcacccgtttctatggcgacgacccccagagctccccaaacctgggccgcatcatcaaccagaaacagttccagcggctgcgggcattgctgggctgcggccgtgtggccattgggggccagagcgatgagagcgatcgctacatcgcccccacggtgctggtggatgtgcaggagatggagcctgtgatgcaggaggagatcttcgggcccatcctgcccatcgtgaacgtgcagagcttggacgaggccatcgagttcatcaaccggcgggagaagcccctggccctgtacgccttctccaacagcagccaggtggtcaagcgggtgctgacccagaccagcagygggggcttctgtgggaacgacggcttcatgcacatgaccctggccagcctgccttttggaggagtgggtgccagtgggatgggccggtaccatggcaagttctccttcgacaccttctcccaccatcgcgcctgcctcctgcgcagcccrgggatggagaagctcaacgccctccgctacccgccgcaatcgccgcgccgcctraggatgctgctggtggccatggaggcccaaggctgcagctgcacactgctctgagcccttccccaggcccaggctgtagaccaccatgacagctgtcgcctgcggctggtggagacggggcctgggctcccgggcccgaggaggaaaaggattgccaaggctccagggcacccctcaaagcagcgcctgcctcctccctcctgggtcttccctctccctgcctcagcctcctccctcagccgctcccaaccatgagagccraggtgggaggcatgggaaacagtgcagtgactcaccccctgcccccgcaccaaccacccatattcaggagaagaggacagacacggcacctctgagtcacccctctcctgtggagcgggcgtccgaggggccctggcatctgactcaggccacaccatggaatcactgcatccaaggccattcctgccctctctgagtctcagtttttccatttgttcagtggagagaattaaccattgatacctcctggctgggtgaggcggctcacacctgtaatcccagcactttgggaggccgaggcaggcggatcacctgaaatcaggagttcaagatcagcctggctaacatggcgaaaccccgtctctactaaaaatacaaaaattagcctggcgtggtggcgcatgcctgtaatcccagctactcaggaggctaaggcaggagaatcgcttgaacccgggaggtggaggttgccgtgagctgagattgcgtcactgaactccggcctgggtgacagaaggaggctctgccttaaaaaaaaaaaaaaaaaaacctcctgggactgttgcaaggatgaaatgaaggattgagggattgagggattgctgagctggagctccaggtgtcctatctttctcagtggggtggcacggagcggggccgcctccctcttctctccaggcaggtggggctgtggttatgcgatagggtctcccttccctccagcccatgccagaggagcttgtaactctttatcctcatggtgcccactacgagtcatactcttccccatgctgctcatcctcctgggccccatccactcagccaaagcagaatgcagggtttcctgcctgacaacccttctcacctcccaagtcccacttttgaacaagctgatgattctgaaactggcccaatttcctaacaagccggatgcttgagaaacctacatttggacaatgagaggctgctcctgcggcctgcgggccacctcctcttccttggctcctgctttcttttyagactatatcaacctacaactttagtcgggaagagggacaggggtggacctgagtttcgtctcctgtctctctggctgatgtcacctgaataaagccttcttccctggc

SEQ ID NO: 3672 - DNA, 531 bp, Homo sapiens
atgggccgcgcatgcacaattacgtcaccagcaagcaggtcttgcgccgggtcccgcggcgccaggaactccaggagatttcccacgttcacgaacacatctgcgtcgcccttaaaaacgaagcgcacgtcggggcagaaagctgaggcccaggctagaaagtggatctccttgagcgttaggttaaaaaaggtgtcgtcgaaggsccagagcaggatgtccgcatacgcaaggctctcggcccgcagcagggcgcgccagtgggttcgcgcgccctccccaacttcgtcggccccgcccgagcctgcgcccctgggcacgcccagcaagaacacgcggcgcaccagcgcyccctgcacgcgaccctccgcgccccacgtctggcgcacggcttggcgccgctcgaagtcctctgccaccgacttgacagcaataagcaggtccgggcggccaccgggtgcgccgtcgccgcggcacttgtgcggctggttaatgagcagtggaaaccgccgctggtccttggcgcgcaaa

SEQ ID NO: 3673 - DNA, 1679 bp, Homo sapiens
cgccctccttagggccgtggtcccgtagctaccggtcgcgtcgccgtgggcgacgtgcccgcttccaaaatggcggcggcggcggtatctggtgcgcttggccgggcgggctggaggctcctgcagctgcgatgcctgcccgtggcccgttgccgacaagccctggtgccrcgtgccttccatgcttcagctgtggggctaaggtcttcagatgagcagaagcagcagcctcccaactcattttctcagcagcattctgagacacagggggcagaaaaacctgatccagagtcttctcattcacccccsaggtatacagaccagggcggcgaggaggaggaggactatgaaagtgaggagcagttgcagcaccgcatcctgacggcagcccttgagtttgtgcccgcccacgggtggacagcagaggcgattgcagaaggagcccagtctctgggtctctccagtgcagcagccagcatgttcgggaaggatggcagtgagctaatactgcattttgtgacccagtgcaatacccggctcacacgtgtgctagaagaggagcagaagctggtacagttgggccaggcggagaagaggaagacagaccagttcctgagggatgcagtggaaaccagactgagaatgctgatcccatacattgagcactggccccgggccctcagcatcctcatgctccctcacaacatcccgtccagcctgagcctgctcaccagcatggtggatgacatgtggcattacgctggggaccagtccactgattttaactggtayacccgccgagccatgctggctgccatctacaacacaacagagctggtgatgatgcaggactcctctccagactttgaggacacttggcgcttcctggaaaaccgggttaatgatgcaatgaacatgggccacactgccaascaggtaaagtccacaggagaggcactggtgcaaggactcatgggtgcagcagtgacgctcaagaacttgacaggtctaaaccagcgtcggtgagaggaaggggtataagctacaatgcctagaagagaatgagcggacagattgaaagagctttgaaaagtataaggtgccatccacataacctggtgttcrcgagaacacactaaaggactcctgagtcactaccacagccacctggaaaccacaaggcatttgatgctaccgttctggtcagggattgggctgcttcttcagttcctaataccagaccaagcctcctgatgcctttctgcactgcaactgtgtgattgaaaaatgagatgttcatccaagcagtcaagccacagaaacccagcatgtccctgtcacaatctcatgggcaccttgatcatgtcttaaccttcccttaaccttggggctcccaagccagagtcaaggtctgacgccacctcaaggtgacagctcatctccagcacagcacaggcgtgtgcacacagaggtgttccttgmagccccctccctctcaggtgtcctgagatgctgytcctgggagccccctcagaaaactgcctcacctgagacaagtgcctgctggacagaggtgtgattccaggcctggtgtcacatgacaccagcatgcattgcaggattattagtgtattttgagtctgtaaaaataataaatatgtttgaagtagttwcccatt

SEQ ID NO: 3674 - DNA, 2552 bp, Homo sapiens
caggaggccgcagaagacgctcggcrgttctggcctccgagcagcaggcggcgctgtgagtcgtctttgcggaagccgcggaggcctcgctgactgacttccggtgttggcggtggcgccgcgcagtcaccgcggagcagacgcggaggctggtggcccctgggcgagatgccgtacgccaaccagcctaccgtgcggatcacggagctcactgacgagaatgtcaagttcatcatcgagaacaccgacctggcggtggccaattcgattcggagggtcttcatcgctgaggttcccataatagccattgactgggttcagattgatgccaattcctcagtycttcatgatgaattcattgctcacaggcttggattaattcccctcattagtgatgacattgtggacaagctgcagtactctcgggactgcacatgtgaggagttctgccccgagtgctcggtggagttcaccctcgatgtgcggtgcaatgaagaccagacgcgacatgtcacgtctcgagacctcatctccaacagcccccgggtcattccggtgacatcccggaaccgagataatgaccccaatgactacgtggagcaggatgacatcctcatcgtcaagttgagaaagggccaggagctgagacttcgagcctatgccaaaaagggctttggcaaggagcatgccaagtggaaccctactgcaggggtggcttttgaatacgatccagacaatgccctgaggcacacagtgtaccccaagcccgaggaatggccaaagagtgagtactcggagctggatgaggatgagtcgcaggctccctatgaccccaacggcaagccagaaaggttttactacaatgtggagtcctgtggctctctgcgtcctgaaaccattgtcctgtcagccctctcaggattgaagaagaaactgagtgatttacaaactcaattaagccacgagatccagagtgatgtgctaaccataaattaactgcagcttgcctgcttcagcaaaaacggagattcaggccagcagctggatatgggggtctctcttcagactcttctcgtttctgagaatctagtctactgttggttgagcttcttggcaggacatcagtaccaactagaagtgggtcatagatagattaccagggatgcagtggtgtttaggcaggataggtctttactggccctgactgctgttaataattggcagcagtgctccccagatcccagaaggtccctgctggagtgtttccagtgcacctgtagggaaccaactagacttctctcctggttagtccagctctttactctaaaccctttctgtccaaaatgagtcattttcagttgtaccttagatgtctggtgttgaggatcaagtgccatagcctttattcagggggcctataaacccttccagttcttgccccagggctggcctgctagcgcttcaaattcccaggtgtccctaatttgagaagtaaccttttggaatagcattagaccctggctgtcccctccccaccaaataaacatgatatttcattctctgtccagcagtcatgaaccccttcacctccaatgacctgatcatttagtttggtgggggtgggggtgggggtgggggtggaagcagccgcaggagcaagggcccctcccacatacacaggaggagtatttcatttctccttaatgaaggctctggccctaacccctcagcactgtctccagataggaacatgcacaaagcagttaattaggcagcctggagaaaaccagagatccagtacagaaaggaaaggatatttattgattaacagaagttgtctttttaaaagtgtttatttttggcaataaagagcacaacataatctccttcatgcgtcatcgtgccacttagctgagccagccagctctgcctccctccccaaagacctttggaccccagttcccctctacaggctagctcatccctctgggtggtcattccccgggtcacgttgagagcgaggctgactgcaccacctccctagctcaagggctcctttgggaggggccgcgtgctttatcatcctcctgccacaactcaaatagtggttatttacaagaaggtctgttcccacaaatcaggaccctaaagtattaaaaaacaaaacccaaaaaacaacaaaaaaccccacacaaccaaaagtttgacgtgaatagaaagatagcccttctgcatggtagtcaacaaataccagcactagaaaatcaattgctttaattgcattgcagcagggagcctcagcaccatgtggggaggaggaaatgggaaggtcttggtttcagagtgcttttggctggccagagggtggccaaacagggcaagggggctccctctgcttgggcattgtccacccctggtcagtgagaggggggcagcaggggtgctccccacggcagtcctgctgcggccttccctcctggcctattcctggggcaggaacaagctccagccttcctccacatggctgaggtaatcagcacccctaccccagg

SEQ ID NO: 3675 - DNA, 3740 bp, Homo sapiens
acaagttgcaggttcgaaattacaatcgtgagctcagtggcccgttgccgacaagccctggtgccrcgtgccttccatgcttcagctgtggggctaaggtcttcagatgagcagaagcagcagcctcccaactcattttctcagcagcattctgagacacagggggcagaaaaacctgatccagagtcttctcattcacccccsaggtatacagaccagggcggcgaggaggaggaggactatgaaagtgaggagcagttgcagcaccgcatcctgacggcagcccttgagtttgtgcccgcccacgggtggacagcagaggcgattgcagaaggagcccagtctctgggtctctccagtgcagcagccagcatgttcgggaaggatggcagtgagctaatactgcattttgtgacccagtgcaatacccggctcacacgtgtgctagaagaggagcagaagctggtacagttgggccaggcggagccctcagcatcctcatgctccctcacaacatcccgtccagcctgagcctgctcaccagcatggtggatgacatgtggcattacgctggggaccagtccactgattttaactggtayacccgccgagccatgctggctgccatctacaacacaacagagctggtgatgatgcaggactcctctccagactttgaggacacttggcgcttcctggaaaaccgggttaatgatgcaatgaacatgggccacactgccaascaggtaaagtccacaggagaggcactggtgcaaggactcatgggtgcagcagtgacgctcaagaacttgacaggtctaaaccagcgtcggtgagaggaaggggtataagctacaatgcctagaagagaatgagcggacagattgaaagagctttgaaaagtataaggtgccatccacataacctggtgttcrcgagaacacactaaaggactcctgagtcactaccacagccacctggaaaccacaaggcatttgatgctaccgttctggtcagggattgggctgcttcttcagttcctaataccagaccaagcctcctgatgcctttctgcactgcaactgtgtgattgaaaaatctcatgggcaccttgatcatgtcttaaccttcccttaaccttggggctcccaagccagagtcaaggtctgacgccacctcaaggtgacagctcatctccagcacagcacaggcgtgtgcacacagaggtgttccttgmagccccctccctctcaggtgtcctgagatgctgytcctgggagccccctcagaaaactgcctcacctgagacaagtgcctgctggacagagcaggaggccgcagaagacgctcggcrgttctggcctccgagcagcaggcggcgctgtgagtcgtctttgcggaagccgcggaggcctcgctgactgacttccggtgttggcggtggcgccgcgcagtcaccgcggagcagacgcggaggctggtggcccctgggcgagatgccgtacgccaaccagcctaccgtgcggatcacggagctcactgacgagaatgtcaagttcatcatcgagaacaccgacctggcggtggccaattcgattcggagggtcttcatcgctgaggttcccataatagccattgactgggttcagattgatgccaattcctcagtycttcatgatgaattcattgctcacaggcttggattaattcccctcattagtgatgacattgtggacaagctgcagtactctcgggactgcacatgtgaggagttctgccccgagtgctcggtggagttcaccctcgatgtgcggtgcaatgaagaccagacgcgacatgtcacgtctcgagacctcatctccaacagcccccgggtcattccggtgacatcccggaaccgagataatgaccccaatgactacgtggagcaggatgacatcctcatcgtcaagttgagaaagggccaggagctgagacttcgagcctatgccaaaaagggctttggcaaggagcatgccaagtggaaccctactgcaggggtggcttttgaatacgatccagacaatgccctgaggcacacagtgtaccccaagcccgaggaatggccaaagagtgagtactcggagctggatgaggatgagtcgcaggctccctatgaccccaacggcaagccagaaaggttttactacaatgtggagtcctgtggctctctgcgtcctgaaaccattgtcctgtcagccctctcaggattgaagaagaaactgagtgatttacaaactcaattaagccacgagatccagagtgatgtgctaaccataaattaactgcagcttgcctgcttcagcaaaaacggagattcaggccagcagctggatatgggggtctctcttcagactcttctcgtttctgagaatctagtctactgttggttgagcttcttggcaggacatcagtaccaactagaagtgggtcatagatagattaccagggatgcagtggtgtttaggcaggataggtctttactggccctgactgctgttaataattggcagcagtgctccccagatcccagaaggtccctgctggagtgtttccagtgcacctgtagggaaccaactagacttctctcctggttagtccagctctttactctaaaccctttctgtccaaaatgagtcattttcagttgtaccttagatgtctggtgttgaggatcaagtgccatagcctttattcagggggcctataaacccttccagttcttgccccagggctggcctgctagcgcttcaaattcccaggtgtccctaatttgagaagtaaccttttggaataccgcaggagcaagggcccctcccacatacacaggaggagtatttcatttctccttaatgaaggctctggccctaacccctcagcactgtctccagataggaacatgcacaaagcagttaattaggcagcctggagaaaaccagagatccagtacagaaaggaaaggatatttattgattaacagaagttgtctttttaaaagtgtttatttttggcaataaagagcacaacataatctccttcatgcgtcatcgtgccacttagctgagccagccagctctgcctccctccccaaagacctttggaccccagttcccctctacaggctagctcatccctctgggtggtcattccccgggtcacgttgagagcgaggctgactgcaccacctccctagctcaagggctcctttgggaggggccgcgtgctttatcatcctcctgccacaactcaaatagtggttatttacaagaaggtctgttcccacaaatcaggaccctaaagtattaaaaaacaaaacccaaaaaacaacaaaaaaccccacacaaccaaaagtttgacgtgaatagaaagatagcccttctgcatggtagtcaacaaataccagcactagaaaatcaattgctttaattgcattgcagcagggagcctcagcaccatgtggggaggaggaaatgggaaggtcttggtttcagagtgcttttggctggccagagggtggccaaacagggcaagggggctccctctgcttgggcattgtccacccctggtcagtgagaggggggcagcaggggtgctccccacggcagtcctgctgcggccttccctcctggcctattcctggggcaggaacaagctccagccttcctccacatggctgaggtaatcagcacccctaccccagg

SEQ ID NO: 3676 - DNA, 981 bp, Homo sapiens
cgccctccttagggccgtggtcccgtagctaccggtcgcgtcgccgtgggcgacgtgcccgcttccaaaatggcggcggcggcggtatctggtgcgcttggccgggcgggctggaggctcctgcagctgcgatgcctgcccgtggcccgttgccgacaagccctggtgccrcgtgccttccatgcttcagctgtggggctaaggtcttcagatgagcagaagcagcagcctcccaactcattttctcagcagcattctgagacacagggggcagaaaaacctgatccagagtcttctcattcacccccsaggtatacagaccagggcggcgaggaggaggaggactatgaaagtgaggagcagttgcagcaccgcatcctgacggcagcccttgagtttgtgcccgcccacgggtggacagcagaggcgattgcagaaggagcccagtctctgggtctctccagtgcagcagccagcatgttcgggaaggatggcagtgagctaatactgcattttgtgacccagtgcaatacccggctcacacgtgtgctagaagaggagcagaagctggtacagttgggccaggcggagaagaggaagacagaccagttcctgagggatgcagtggaaaccagactgagaatgctgatcccatacattgagcactggccccgggccctcagcatcctcatgctccctcacaacatcccgtccagcctgagcctgctcaccagcatggtggatgacatgtggcattacgctggggaccagtccactgattttaactggtayacccgccgagccatgctggctgccatctacaacacaacagagctggtgatgatgcaggactcctctccagactttgaggacacttggcgcttcctggaaaaccgggttaatgatgcaatgaacatgggccacactgccaascaggtagtgcctgctggacagaggtgtgattccaggcctggtgtcaca

SEQ ID NO: 3677 - DNA, 3880 bp, Homo sapiens
acaagttgcaggttcgaaattacaatcgtgagctcagtggcccgttgccgacaagccctggtgccrcgtgccttccatgcttcagctgtggggctaaggtcttcagatgagcagaagcagcagcctcccaactcattttctcagcagcattctgagacacagggggcagaaaaacctgatccagagtcttctcattcacccccsaggtatacagaccagggcggcgaggaggaggaggactatgaaagtgaggagcagttgcagcaccgcatcctgacggcagcccttgagtttgtgcccgcccacgggtggacagcagaggcgattgcagaaggagcccagtctctgggtctctccagtgcagcagccagcatgttcgggaaggatggcagtgagctaatactgcattttgtgacccagtgcaatacccggctcacacgtgtgctagaagaggagcagaagctggtacagttgggccaggcggagccctcagcatcctcatgctccctcacaacatcccgtccagcctgagcctgctcaccagcatggtggatgacatgtggcattacgctggggaccagtccactgattttaactggtayacccgccgagccatgctggctgccatctacaacacaacagagctggtgatgatgcaggactcctctccagactttgaggacacttggcgcttcctggaaaaccgggttaatgatgcaatgaacatgggccacactgccaascaggtaaagtccacaggagaggcactggtgcaaggactcatgggtgcagcagtgacgctcaagaacttgacaggtctaaaccagcgtcggtgagaggaaggggtataagctacaatgcctagaagagaatgagcggacagattgaaagagctttgaaaagtataaggtgccatccacataacctggtgttcrcgagaacacactaaaggactcctgagtcactaccacagccacctggaaaccacaaggcatttgatgctaccgttctggtcagggattgggctgcttcttcagttcctaataccagaccaagcctcctgatgcctttctgcactgcaactgtgtgattgaaaaatctcatgggcaccttgatcatgtcttaaccttcccttaaccttggggctcccaagccagagtcaaggtctgacgccacctcaaggtgacagctcatctccagcacagcacaggcgtgtgcacacagaggtgttccttgmagccccctccctctcaggtgtcctgagatgctgytcctgggagccccctcagaaaactgcctcacctgagacaagtgcctgctggacagagcaggaggccgcagaagacgctcggcrgttctggcctccgagcagcaggcggcgctgtgagtcgtctttgcggaagccgcggaggcctcgctgactgacttccggtgttggcggtggcgccgcgcagtcaccgcggagcagacgcggaggctggtggcccctgggcgagatgccgtacgccaaccagcctaccgtgcggatcacggagctcactgacgagaatgtcaagttcatcatcgagaacaccgacctggcggtggccaattcgattcggagggtcttcatcgctgaggttcccataatagccattgactgggttcagattgatgccaattcctcagtycttcatgatgaattcattgctcacaggcttggattaattcccctcattagtgatgacattgtggacaagctgcagtactctcgggactgcacatgtgaggagttctgccccgagtgctcggtggagttcaccctcgatgtgcggtgcaatgaagaccagacgcgacatgtcacgtctcgagacctcatctccaacagcccccgggtcattccggtgacatcccggaaccgagataatgaccccaatgactacgtggagcaggatgacatcctcatcgtcaagttgagaaagggccaggagctgagacttcgagcctatgccaaaaagggctttggcaaggagcatgccaagtggaaccctactgcaggggtggcttttgaatacgatccagacaatgccctgaggcacacagtgtaccccaagcccgaggaatggccaaagagtgagtactcggagctggatgaggatgagtcgcaggctccctatgaccccaacggcaagccagaaaggttttactacaatgtggagtcctgtggctctctgcgtcctgaaaccattgtcctgtcagccctctcaggattgaagaagaaactgagtgatttacaaactcaattaagccacgagatccagagtgatgtgctaaccataaattaactgcagcttgcctgcttcagcaaaaacggagattcaggccagcagctggatatgggggtctctcttcagactcttctcgtttctgagaatctagtctactgttggttgagcttcttggcaggacatcagtaccaactagaagtgggtcatagatagattaccagggatgcagtggtgtttaggcaggataggtctttactggccctgactgctgttaataattggcagcagtgctccccagatcccagaaggtccctgctggagtgtttccagtgcacctgtagggaaccaactagacttctctcctggttagtccagctctttactctaaaccctttctgtccaaaatgagtcattttcagttgtaccttagatgtctggtgttgaggatcaagtgccatagcctttattcagggggcctataaacccttccagttcttgccccagggctggcctgctagcgcttcaaattcccaggtgtccctaatttgagaagtaaccttttggaatagcattagaccctggctgtcccctccccaccaaataaacatgatatttcattctctgtccagcagtcatgaaccccttcacctccaatgacctgatcatttagtttggtgggggtgggggtgggggtgggggtggaagcagccgcaggagcaagggcccctcccacatacacaggaggagtatttcatttctccttaatgaaggctctggccctaacccctcagcactgtctccagataggaacatgcacaaagcagttaattaggcagcctggagaaaaccagagatccagtacagaaaggaaaggatatttattgattaacagaagttgtctttttaaaagtgtttatttttggcaataaagagcacaacataatctccttcatgcgtcatcgtgccacttagctgagccagccagctctgcctccctccccaaagacctttggaccccagttcccctctacaggctagctcatccctctgggtggtcattccccgggtcacgttgagagcgaggctgactgcaccacctccctagctcaagggctcctttgggaggggccgcgtgctttatcatcctcctgccacaactcaaatagtggttatttacaagaaggtctgttcccacaaatcaggaccctaaagtattaaaaaacaaaacccaaaaaacaacaaaaaaccccacacaaccaaaagtttgacgtgaatagaaagatagcccttctgcatggtagtcaacaaataccagcactagaaaatcaattgctttaattgcattgcagcagggagcctcagcaccatgtggggaggaggaaatgggaaggtcttggtttcagagtgcttttggctggccagagggtggccaaacagggcaagggggctccctctgcttgggcattgtccacccctggtcagtgagaggggggcagcaggggtgctccccacggcagtcctgctgcggccttccctcctggcctattcctggggcaggaacaagctccagccttcctccacatggctgaggtaatcagcacccctaccccagg

SEQ ID NO: 3678 - DNA, 3636 bp, Homo sapiens
cgccctccttagggccgtggtcccgtagctaccggtcgcgtcgccgtgggcgacgtgcccgcttccaaaatggcggcggcggcggtatctggtgcgcttggccgggcgggctggaggctcctgcagctgcgatgcctgcccgtggcccgttgccgacaagccctggtgccrcgtgccttccatgcttcagctgtggggctaaggtcttcagatgagcagaagcagcagcctcccaactcattttctcagcagcattctgagacacagggggcagaaaaacctgatccagagtcttctcattcacccccsaggtatacagaccagggcggcgaggaggaggaggactatgaaagtgaggagcagttgcagcaccgcatcctgacggcagcccttgagtttgtgcccgcccacgggtggacagcagaggcgattgcagaaggagcccagtctctgggtctctccagtgcagcagccagcatgttcgggaaggatggcagtgagctaatactgcattttgtgacccagtgcaatacccggctcacacgtgtgctagaagaggagcagaagctggtacagttgggccaggcggagaagaggaagacagaccagttcctgagggatgcagtggaaaccagactgagaatgctgatcccatacattgagcactggccccgggccctcagcatcctcatgctccctcacaacatcccgtccagcctgagcctgctcaccagcatggtggatgacatgtggcattacgctggggaccagtccactgattttaactggtayacccgccgagccatgctggctgccatctacaacacaacagagctggtgatgatgcaggactcctctccagactttgaggacacttggcgcttcctggaaaaccgggttaatgatgcaatgaacatgggccacactgccaascaggtaaagtccacaggagaggcactggtgcaaggactcatgggtgcagcagtgacgctcaagaacttgacaggtctaaaccagcgtcggtgagaggaaggggtataagctacaatgcctagaagagaatgagcggacagattgaaagagctttgaaaagtataaggtgccatccacataacctggtgttcrcgagaacacactaaaggactcctgagtcactaccacagccacctggaaaccacaaggcatttgatgctaccgttctggtcagggattgggctgcttcttcagttcctaataccagaccaagcctcctgatgcctttctgcactgcaactgtgtgattgaaaaatctcatgggcaccttgatcatgtcttaaccttcccttaaccttggggctcccaagccagagtcaaggtctgacgccacctcaaggtgacagctcatctccagcacagcacaggcgtgtgcacacagaggtgttccttgmagccccctccctctcaggtgtcctgagatgctgytcctgggagccccctcagaaaactgcctcacctgagacaagtgcctgctggacagagcaggaggccgcagaagacgctcggcrgttctggcctccgagcagcaggcggcgctgtgagtcgtctttgcggaagccgcggaggcctcgctgactgacttccggtgttggcggtggcgccgcgcagtcaccgcggagcagacgcggaggctggtggcccctgggcgagatgccgtacgccaaccagcctaccgtgcggatcacggagctcactgacgagaatgtcaagttcatcatcgagaacaccgacctggcgtaaggctaccgagggtggccaattcgattcggagggtcttcatcgctgaggttcccataatagccattgactgggttcagattgatgccaattcctcagtycttcatgatgaattcattgctcacaggcttggattaattcccctcattagtgatgacattgtggacaagctgcagtactctcgggactgcacatgtgaggagttctgccccgagtgctcggtggagttcaccctcgatgtgcggtgcaatgaagaccagacgcgacatgtcacgtctcgagacctcatctccaacagcccccgggtcattccggtgacatcccggaaccgagataatgaccccaatgactacgtggagcaggatgacatcctcatcgtcaagttgagaaagggccaggagctgagacttcgagcctatgccaaaaagggctttggcaaggagcatgccaagtggaaccctactgcaggggtggcttttgaatacgatccagacaatgccctgaggcacacagtgtaccccaagcccgaggaatggccaaagagtgagtactcggagctggatgaggatgagtcgcaggctccctatgaccccaacggcaagccagaaaggttttactacaatgtggagtcctgtggctctctgcgtcctgaaaccattgtcctgtcagccctctcaggattgaagaagaaactgagtgatttacaaactcaattaagccacgagatccagagtgatgtgctaaccataaattaactgcagcttgcctgcttcaactcttctcgtttctgagaatctagtctactgttggttgagcttcttggcaggacatcagtaccaactagaagtgggtcatagatagattaccagggatgcagtggtgtttaggcaggataggtctttactggccctgactgctgttaataattggcagcagtgctccccagatcccagaaggtccctgctggagtgtttccagtgcacctgtagggaaccaactagacttctctcctggttagtccagctctttactctaaaccctttctgtccaaaatgagtcattttcagttgtaccttagatgtctggtgttgaggatcaagtgccatagcctttattcagggggcctataaacccttccagttcttgccccagggctggcctgctagcgcttcaaattcccaggtgtccctaatttgagaagtaaccttttggaatagcattagaccctggctgtcccctccccaccaaataaacatgatatttcattctctgtccagcagtcatgaaccccttcacctccaatgacctgatcatttagtttggtgggggtgggggtgggggtgggggtggaagcagccgcaggagcaagggcccctcccacatacacaggaggagtatttcatttctccttaatgaaggctctggccctaacccctcagcactgtctccagataggaacatgcacaaagcagttaattaggcagcctggagaaaaccagagatccagtacagaaaggaaaggatatttattgattaacagaagttgtctttttaaaagtgtttatttttggcaataaagagcacaacataatctccttcatgcgtcatcgtgccacttagctgagccagccagctctgcctccctccccaaagactgcttttggctggccagagggtggccaaacagggcaagggggctccctctgcttgggcattgtccacccctggtcagtgagaggggggcagcaggggtgctccccacggcagtcctgctgcggccttccctcctggcctattcctggggcaggaacaagctccagccttcctccacatggctgaggtaatcagcacccctaccccagg

SEQ ID NO: 3679 - DNA, 3521 bp, Homo sapiens
acaagttgcaggttcgaaattacaatcgtgagctcagtggcccgttgccgacaagccctggtgccrcgtgccttccatgcttcagctgtggggctaaggtcttcagatgagcagaagcagcagcctcccaactcattttctcagcagcattctgagacacagggggcagaaaaacctgatccagagtcttctcattcacccccsaggtatacagaccagggcggcgaggaggaggaggactatgaaagtgaggagcagttgcagcaccgcatcctgacggcagcccttgagtttgtgcccgcccacgggtggacagcagaggcgattgcagaaggagcccagtctctgggtctctccagtgcagcagccagcatgttcgggaaggatggcagtgagctaatactgcattttgtgacccagtgcaatacccggctcacacgtgtgctagaagaggagcagaagctggtacagttgggccaggcggagaagaggaagacagaccagttcctgagggatgcagtggaaaccagactgagaatgctgatcccatacattgagcactggccccgggccctcagcatcctcatgctccctcacaacatcccgtccagcctgagcctgctcaccagcatggtggatgacatgtggcattacgctggggaccagtccactgatgtgatttaactggtayacccgccgagccatgctggctgccatctacaacacaacagagctggtgatgatgcaggactcctctccagactttgaggacacttggcgcttcctggaaaaccgggttaatgatgcaatgaacatgggccacactgccaascaggtaaagtccacaggagaggcactggtgcaaggactcatgggtgcagcagtgacgctcaagaacttgacaggtctaaaccagcgtcggtgagaggaaggggtataagctacaatgcctagaagagaatgagcggacagattgaaagagctttgaaaagtataaggtgccatccacataacctggtgttcrcgagaacacactaaaggactcctgagtcactaccacagccacctggaaaccacaaggcatttgatgctaccgttctggtcagggattgggctgcttcttcagttcctaataccagaccaagcctcctgatgcctttctgcactgcaactgtgtgattgaaaaatctcatgggcaccttgatcatgtcttaaccttcccttaaccttggggctcccaagccagagtcaaggtctgacgccacctcaaggtgacagctcatctccagcacagcacaggcgtgtgcacacagaggtgttccttgmagccccctccctctcaggtgtcctgagatgctgytcctgggagccccctcagaaaactgcctcacctgagacaagtgcctgctggacagagcaggaggccgcagaagacgctcggcrgttctggcctccgagcagcaggcggcgctgtgagtcgtctttgcggaagccgcggaggcctcgctgactgacttccggtgttggcggtggcgccgcgcagtcaccgcggagcagacgcggaggctggtggcccctgggcgagatgccgtacgccaaccagcctaccgtgcggatcacggagctcactgacgagaatgtcaagttcatcatcgagaacaccgacctggcggtggccaattcgattcggagggtcttcatcgctgaggttcccataatagccattgactgggttcagattgatgccaattcctcagtycttcatgatgaattcattgctcacaggcttggattaattcccctcattagtgatgacattgtggacaagctgcagtactctcgggactgcacatgtgaggagttctgccccgagtgctcggtggagttcaccctcgatgtgcggtgcaatgaagaccagacgcgacatgtcacgtctcgagacctcatctccaacagcccccgggtcattccggtgacatcccggaaccgagataatgaccccaatgactacgtggagcaggatgacatcctcatcgtcaagttgagaaagggccaggagctgagacttcgagcctatgccaaaaagggctttggcaaggagcatgccaagtggaaccctactgcaggggtggcttttgaatacgatccagacaatgccctgaggcacacagtgtaccccaagcccgaggaatggccaaagagtgagtactcggagctggatgaggatgagtcgcaggctccctatgaccccaacggcaagccagaaaggttttactacaatgtggagtcctgtggctctctgcgtcctgaaaccattgtcctgtcagccctctcaggattgaagaagaaactgagtgatttacaaactcaattaagccacgagatccagagtgatgtgctaaccataaattaactgcagcttgcctgcttcaactcttctcgtttctgagaatctagtctactgttggttgagcttcttggcaggacatcagtaccaactagaagtgggtcatagatagattaccagggatgcagtggtgtttaggcaggataggtctttactggccctgactgctgttaataattggcagcagtgctccccagatcccagaaggtccctgctggagtgtttccagtgcacctgtagggaaccaactagacttctctcctggttagtccagctctttactctaaaccctttctgtccaaaatgagtcattttcagttgtaccttagatgtctggtgttgaggatcaagtgccatagcctttattcagggggcctataaacccttccagttcttgccccagggctggcctgctagcgcttcaaattcccaggtgtccctaatttgagaagtaaccttttggaatagcattagaccctggctgtcccctccccaccaaataaacatgatatttcattctctgtccagcagtcatgaaccccttcacctccaatgacctgatcatttagtttggtgggggtgggggtgggggtgggggtggaagcagccgcaggagcaagggcccctcccacatacacaggaggagtatttcatttctccttaatgaaggctctggccctaacccctcagcactgtctccagataggaacatgcacaaagcagttaattaggcagcctggagaaaaccagagatccagtacagaaaggaaaggatatttattgattaacagaagttgtctttttaaaagtgtttatttttggcaataaagagcacaacataatctccttcatgcgtcatcgtgccacttagctgagccagccagctctgcctccctccccaaagactgcttttggctggccagagggtggccaaacagggcaagggggctccctctgcttgggcattgtccacccctggtcagtgagaggggggcagcaggggtgctccccacggcagtcctgctgcggccttccctcctggcctattcctggggcaggaacaagctccagccttcctccacatggctgaggtaatcagcacccctaccccagg

SEQ ID NO: 3680 - DNA, 2412 bp, Homo sapiens
caggaggccgcagaagacgctcggcrgttctggcctccgagcagcaggcggcgctgtgagtcgtctttgcggaagccgcggaggcctcgctgactgacttccggtgttggcggtggcgccgcgcagtcaccgcggagcagacgcggaggctggtggcccctgggcgagatgccgtacgccaaccagcctaccgtgcggatcacggagctcactgacgagaatgtcaagttcatcatcgagaacaccgacctggcggtggccaattcgattcggagggtcttcatcgctgaggttcccataatagccattgactgggttcagattgatgccaattcctcagtycttcatgatgaattcattgctcacaggcttggattaattcccctcattagtgatgacattgtggacaagctgcagtactctcgggactgcacatgtgaggagttctgccccgagtgctcggtggagttcaccctcgatgtgcggtgcaatgaagaccagacgcgacatgtcacgtctcgagacctcatctccaacagcccccgggtcattccggtgacatcccggaaccgagataatgaccccaatgactacgtggagcaggatgacatcctcatcgtcaagttgagaaagggccaggagctgagacttcgagcctatgccaaaaagggctttggcaaggagcatgccaagtggaaccctactgcaggggtggcttttgaatacgatccagacaatgccctgaggcacacagtgtaccccaagcccgaggaatggccaaagagtgagtactcggagctggatgaggatgagtcgcaggctccctatgaccccaacggcaagccagaaaggttttactacaatgtggagtcctgtggctctctgcgtcctgaaaccattgtcctgtcagccctctcaggattgaagaagaaactgagtgatttacaaactcaattaagccacgagatccagagtgatgtgctaaccataaattaactgcagcttgcctgcttcagcaaaaacggagattcaggccagcagctggatatgggggtctctcttcagactcttctcgtttctgagaatctagtctactgttggttgagcttcttggcaggacatcagtaccaactagaagtgggtcatagatagattaccagggatgcagtggtgtttaggcaggataggtctttactggccctgactgctgttaataattggcagcagtgctccccagatcccagaaggtccctgctggagtgtttccagtgcacctgtagggaaccaactagacttctctcctggttagtccagctctttactctaaaccctttctgtccaaaatgagtcattttcagttgtaccttagatgtctggtgttgaggatcaagtgccatagcctttattcagggggcctataaacccttccagttcttgccccagggctggcctgctagcgcttcaaattcccaggtgtccctaatttgagaagtaaccttttggaataccgcaggagcaagggcccctcccacatacacaggaggagtatttcatttctccttaatgaaggctctggccctaacccctcagcactgtctccagataggaacatgcacaaagcagttaattaggcagcctggagaaaaccagagatccagtacagaaaggaaaggatatttattgattaacagaagttgtctttttaaaagtgtttatttttggcaataaagagcacaacataatctccttcatgcgtcatcgtgccacttagctgagccagccagctctgcctccctccccaaagacctttggaccccagttcccctctacaggctagctcatccctctgggtggtcattccccgggtcacgttgagagcgaggctgactgcaccacctccctagctcaagggctcctttgggaggggccgcgtgctttatcatcctcctgccacaactcaaatagtggttatttacaagaaggtctgttcccacaaatcaggaccctaaagtattaaaaaacaaaacccaaaaaacaacaaaaaaccccacacaaccaaaagtttgacgtgaatagaaagatagcccttctgcatggtagtcaacaaataccagcactagaaaatcaattgctttaattgcattgcagcagggagcctcagcaccatgtggggaggaggaaatgggaaggtcttggtttcagagtgcttttggctggccagagggtggccaaacagggcaagggggctccctctgcttgggcattgtccacccctggtcagtgagaggggggcagcaggggtgctccccacggcagtcctgctgcggccttccctcctggcctattcctggggcaggaacaagctccagccttcctccacatggctgaggtaatcagcacccctaccccagg

SEQ ID NO: 3681 - DNA, 3432 bp, Homo sapiens
acaagttgcaggttcgaaattacaatcgtgagctcagtggcccgttgccgacaagccctggtgccrcgtgccttccatgcttcagctgtggggctaaggtcttcagatgagcagaagcagcagcctcccaactcattttctcagcagcattctgagacacagggggcagaaaaacctgatccagagtcttctcattcacccccsaggtatacagaccagggcggcgaggaggaggaggactatgaaagtgaggagcagttgcagcaccgcatcctgacggcagcccttgagtttgtgcccgcccacgggtggacagcagaggcgattgcagaaggagcccagtctctgggtctctccagtgcagcagccagcatgttcgggaaggatggcagtgagctaatactgcattttgtgacccagtgcaatacccggctcacacgtgtgctagaagaggagcagaagctggtacagttgggccaggcggagccctcagcatcctcatgctccctcacaacatcccgtccagcctgagcctgctcaccagcatggtggatgacatgtggcattacgctggggaccagtccactgattttaactggtayacccgccgagccatgctggctgccatctacaacacaacagagctggtgatgatgcaggactcctctccagactttgaggacacttggcgcttcctggaaaaccgggttaatgatgcaatgaacatgggccacactgccaascaggtaaagtccacaggagaggcactggtgcaaggactcatgggtgcagcagtgacgctcaagaacttgacaggtctaaaccagcgtcggtgagaggaaggggtataagctacaatgcctagaagagaatgagcggacagattgaaagagctttgaaaagtataaggtgccatccacataacctggtgttcrcgagaacacactaaaggactcctgagtcactaccacagccacctggaaaccacaaggcatttgatgctaccgttctggtcagggattgggctgcttcttcagttcctaataccagaccaagcctcctgatgcctttctgcactgcaactgtgtgattgaaaaatctcatgggcaccttgatcatgtcttaaccttcccttaaccttggggctcccaagccagagtcaaggtctgacgccacctcaaggtgacagctcatctccagcacagcacaggcgtgtgcacacagaggtgttccttgmagccccctccctctcaggtgtcctgagatgctgytcctgggagccccctcagaaaactgcctcacctgagacaagtgcctgctggacagagcaggaggccgcagaagacgctcggcrgttctggcctccgagcagcaggcggcgctgtgagtcgtctttgcggaagccgcggaggcctcgctgactgacttccggtgttggcggtggcgccgcgcagtcaccgcggagcagacgcggaggctggtggcccctgggcgagatgccgtacgccaaccagcctaccgtgcggatcacggagctcactgacgagaatgtcaagttcatcatcgagaacaccgacctggcggtggccaattcgattcggagggtcttcatcgctgaggttcccataatagccattgactgggttcagattgatgccaattcctcagtycttcatgatgaattcattgctcacaggcttggattaattcccctcattagtgatgacattgtggacaagctgcagtactctcgggactgcacatgtgaggagttctgccccgagtgctcggtggagttcaccctcgatgtgcggtgcaatgaagaccagacgcgacatgtcacgtctcgagacctcatctccaacagcccccgggtcattccggtgacatcccggaaccgagataatgaccccaatgactacgtggagcaggatgacatcctcatcgtcaagttgagaaagggccaggagctgagacttcgagcctatgccaaaaagggctttggcaaggagcatgccaagtggaaccctactgcaggggtggcttttgaatacgatccagacaatgccctgaggcacacagtgtaccccaagcccgaggaatggccaaagagtgagtactcggagctggatgaggatgagtcgcaggctccctatgaccccaacggcaagccagaaaggttttactacaatgtggagtcctgtggctctctgcgtcctgaaaccattgtcctgtcagccctctcaggattgaagaagaaactgagtgatttacaaactcaattaagccacgagatccagagtgatgtgctaaccataaattaactgcagcttgcctgcttcaactcttctcgtttctgagaatctagtctactgttggttgagcttcttggcaggacatcagtaccaactagaagtgggtcatagatagattaccagggatgcagtggtgtttaggcaggataggtctttactggccctgactgctgttaataattggcagcagtgctccccagatcccagaaggtccctgctggagtgtttccagtgcacctgtagggaaccaactagacttctctcctggttagtccagctctttactctaaaccctttctgtccaaaatgagtcattttcagttgtaccttagatgtctggtgttgaggatcaagtgccatagcctttattcagggggcctataaacccttccagttcttgccccagggctggcctgctagcgcttcaaattcccaggtgtccctaatttgagaagtaaccttttggaatagcattagaccctggctgtcccctccccaccaaataaacatgatatttcattctctgtccagcagtcatgaaccccttcacctccaatgacctgatcatttagtttggtgggggtgggggtgggggtgggggtggaagcagccgcaggagcaagggcccctcccacatacacaggaggagtatttcatttctccttaatgaaggctctggccctaacccctcagcactgtctccagataggaacatgcacaaagcagttaattaggcagcctggagaaaaccagagatccagtacagaaaggaaaggatatttattgattaacagaagttgtctttttaaaagtgtttatttttggcaataaagagcacaacataatctccttcatgcgtcatcgtgccacttagctgagccagccagctctgcctccctccccaaagactgcttttggctggccagagggtggccaaacagggcaagggggctccctctgcttgggcattgtccacccctggtcagtgagaggggggcagcaggggtgctccccacggcagtcctgctgcggccttccctcctggcctattcctggggcaggaacaagctccagccttcctccacatggctgaggtaatcagcacccctaccccagg

SEQ ID NO: 3682 - DNA, 783 bp, Homo sapiens
cccgctggcccaatggcagcgtcctacagtgtagcctccgcctcccgattgactggcctgcttggcaaggcaagtagcggcggcgcttcaagatgcgctgcctgaccacgcctatgctgctgcgggccctggcccaggctgcacgtgcaggacctcctggtggccggagcctccacagcagtgcagtggcagccacctacaagtatgtgaacatgcaggatcccgagatggacatgaagtcagtgactgaccgggcagcccgcaccctgctgtggactgagctcttccgaggcctgggcatgaccctgagctacctgttccgggaaccggccaccatcaactacccgttcgagaagggcccgctgagccctcgcttccgtggggagcatgcgctgcgccggtacccatccggggaggagcgttgcattgcctgcaagctctgcgaggccatctgccccgcccaggccatcaccatcgaggctgagccaagagctgatggcagccgccggaccacccgctatgacatcgacatgaccaagtgcatctactgcggcttctgccaggaggcctgtcccgtggatgccatcgtcgaggcacggcmccaactttgagttctccacggagacccatgaggagctgctgtacaacaaygagaagttgctcaacaacggggacaagtgggaggccgagatcgccgccaacatccaggctgactacttgtatcggtgacgccccaccggcccgcagcccctgctgcccaataaaaccactccgaccccacgg

SEQ ID NO: 3683 - DNA, 827 bp, Homo sapiens
tcacgttttggccgtgaaagtcgggcttgggcagcgtggcgtcgggggcgagtgtggtgtccccgttggcgccgccagctctgcgcctgggcttcccctcggctcactcaggatccgcggcctccgtgtccttcagatgcgctgcctgaccacgcctatgctgctgcgggccctggcccaggctgcacgtgcaggacctcctggtggccggagcctccacagcagtgcagtggcagccacctacaagtatgtgaacatgcaggatcccgagatggacatgaagtcagtgactgaccgggcagcccgcaccctgctgtggactgagctcttccgaggcctgggcatgaccctgagctacctgttccgggaaccggccaccatcaactacccgttcgagaagggcccgctgagccctcgcttccgtggggagcatgcgctgcgccggtacccatccggggaggagcgttgcattgcctgcaagctctgcgaggccatctgccccgcccaggccatcaccatcgaggctgagccaagagctgatggcagccgccggaccacccgctatgacatcgacatgaccaagtgcatctactgcggcttmtgccaggaggcctgtcccgtggatgccatcgtcgaggcacggccccaacyttgagttctccacggagacccatgaggagctgctgtacaacaaggagaagttgctcaacaacggggacaagtgggaggccgagatcgccgccaacatccaggctgactacttgtatcggtgacgccccaccggcccgcagcccctgctgcccaataaaaccactccgaccccacgg

SEQ ID NO: 3684 - DNA, 779 bp, Homo sapiens
cccgctggcccaatggcagcgtcctacagtgtagcctccgcctcccgattgactggcctgcttggcaaggcaagtagcggcggcgcttcaagatgcgctgcctgaccacgcctatgctgctgcgggccctggcccaggctgcacgtgcaggacctcctggtggccggagcctccacagcagtgcagtggcagccacctacaagtatgtgaacatgcaggatcccgagatggacatgaagtcagtgactgaccgggcagcccgcaccctgctgtggactgagctcttccgaggcctgggcatgaccctgagctacctgttccgggaaccggccaccatcaactacccgttcgagaagggcccgctgagccctcgcttccgtggggagcatgcgctgcgccggtacccatccggggaggagcgttgcattgcctgcaagctctgcgaggccatctgccccgcccaggccatcaccatcgaggctgagccaagagctgatggcagccgccggaccacccgctatgacatcgacatgaccaagtgcatctactgcggcttctgccaggaggcctgtcccgtggatgccatcgtcgagggcmccaactttgagttctccacggagacccatgaggagctgctgtacaacaaygagaagttgctcaacaacggggacaagtgggaggccgagatcgccgccaacatccaggctgactacttgtatcggtgacgccccaccggcccgcagcccctgctgcccaataaaaccactccgaccccacgg

SEQ ID NO: 3685 - DNA, 3528 bp, Homo sapiens
gtagaggggaagagattgaactttgctgacctttgatgtgaggcgctcagccagggccaaggggagagcctggcaagatttgcagcctgaagccatgggccagggggccatggtgacctgagacaagtggactctgtatagttgccccctgcttccccttctacctcccctaccctatgctaaggggactcgtctccacctcgtaaaggaaactccccaagggaatccctgtcccctattttyctatccttctacycttccaagacagtcctagcctatagaactcctacctcccatcccctgaggtggtccccattcctccctcccttcctccccccgccatgctccagttgtggaaggtggtacgcccagctcggcagctggaactgcaccgcctcatactgctgctgatcgctttcagcctgggctccatgggcttcctggcttattatgtgtccaccagccctaaggccaaggaacccttgcccctgcccttgggagactgcagcagcggtggggcagctggtcctggccctgcacggcctccagttccacctcggccccccaggcctccagagacagctcgaactgaacccgtggtccttgtgtttgtggagagtgcatactcacagctggggcaggaaattgtggccatcctggagtctagtcgttttcgttatagcactgagttggcacctggccgaggggacatgcccacattgactgataatacccatggccgctatgtcttggtcatttatgagaacctgctcaagtatgtcaacctggatgcctggagtcgggaactgctagaccggtactgcgtggagtatggtgtgggcatcattggctttttccgagcccacgagcacagcctactgagcgcccagctcaagggctttcccctttttttacactcaaacttggggctccgggactaccaagtgaatccttctgccccgctactgcatctcacacgccccagccgcctagaaccagggccactgcctggtgatgactggaccatcttccaatccaatcatagtacatatgaaccagtgcttcttgccagccttcggccagctgagcccgcagtgccaggaccagttcttcgtcgggcccggcttcccactgtggtacaggacctggggcttcatgatggcatccagcgggtgctctttggacatggcctttccttctggctccacaaacttatcttcgttgatgctgttgcatacctcactggcaagcgcctctgcctggaccttgaccgctacatcttggtagacatcgatgacatctttgtgggcaaggaagggacccgcatgaaggtggctgatgttgaggctctgttgaccacccagaacaaactcaggaccttagttcccaacttcaccttcaacttgggcttctcgggcaagttctatcatactgggacagaggaggaggatgcaggggacgacatgctgctgaagcaccgcaaagagttctggtggttyccccacatgtggagccacatgcagccacacctgttccacaatcgctccgtgctggctgaccagatgaggctcaacaaacagtttgctctggagcatgggattcccacggacctggggtatgctgtggccccccaccactcgggtgtgtaccccatccacacgcagctctatgaggcctggaaatccgtgtggggcatccaggtgaccagcactgaggagtatccccatctccgccctgcccgctaccgccgtggcttcattcacaatggcattatggtgctgccccggcagacatgtggcctcttcactcacacaatcttctataatgagtatcctggaggctctcgtgaactagaccggagcatccgaggtggagagctctttctgacagtgctgcttaatccgatcagcatctttatgacccatctgtccaattatggaaatgaccggctgggcctatacacctttgagagcttggtgcgcttcctccagtgttggacacggctgcgcctacagacccttcctcctgtcccacttgcacagaagtactttgaacttttccctcaggagcgaagccccctttggcagaatccctgtgatgacaagaggcacaaagatatctggtccaaggagaaaacctgtgatcgtctcccgaagttcctcattgtgggaccccagaaaacagggactacagctattcacttcttcctgagcctgcacccagctgtaactagcagcttccctagccccagcacatttgaggagattcagttcttcaacagccctaattaccacaagggtattgactggtacatggatttcttccctgttccttccaatgccagcactgatttcctatttgaaaaaagtgccacctactttgactctgaagttgtaccacggcggggggctgccctcctgccacgagccaagatcatcacagtgctcaccaaccctgctgacagggcctactcctggtaccagcatcagcgagcccatggagacccagttgctctgaactataccttctatcaggtgatttcagcctcctcccagacccctctggcactacgctccctgcagaaccgctgtcttgtccctggctactattctacccatctacaacgctggctgacttactacccctctggacagttgctgattgtggatgggcaagagctgcgtaccaacccagcagcctcaatggagagcatccagaagttcctgggtatcacaccctttctgaactacacacggaccctcaggtttgatgatgataagggattttggtgccagggacttgaaggtggtaagactcgctgtctaggccggagcaaaggccggaggtatccagatatggacactgagtcccgtcttttccttacggattttttccggaaccataatttggagttgtcgaagctgctgagccggcttggacagccagtgccctcgtggcttcgggaagaactgcagcattccagtctgggctgatgtcccagcctcccataccagcaaaatgccccctgcttccctaagggkcaggtccagagcagggcccacaagggggattagagtggcctggcccctccccytctacctcagtagcccccaggcctgagatggctgagaagggaagggtatccttttcccacagttctgggacaaataaaggggcttcctttggtaccccacataatagtgctaggtacctttgacccatcatcttgggaggtggggaggaatgagagggtccaggcagggtgtaggggaatgtattagtccartgagatttccctcttcatccgcagcagtgtatctattctatacctggctatgggagagaccccttgcatgggagggaccccttgctatggcccctttagccaggcagtgggatctacctgtggcccggcctccctaatgtcattcacattgaatggggatgaggtcggacagtggctcatagagccgagtatgagccctagctgtgggctagaaatgtccttaataaacatccttatttttc

SEQ ID NO: 3686 - DNA, 3964 bp, Homo sapiens
gaggagggggtgcgcttccgcgggcggggcgcggagcccgccgtctcggaggccgcggctcggcccggcactgcggagggccgcttgatttcccggaacccaggtcgcgcggctgctagggccggagccggtggatccgagcgggtgccaccagcggcggcgcgccgcctcccccggtgggagcggtggttgggccaggctgcggcagagcgttcgctcggagatggcggagcagccgcgacgcggcccgtggccccgaaagcagggaagccgggcagccccgggacgcggcggagcccggggacagcggggacgccgcccagtcctccgggtatgaagctaaaatgcagcggctaagaacgcggctctggagcttgacaggcctgacgtcgaatcccagccctcccaccaactgagctgtgtgatcctgggcaaggtagaggggaagagattgaactttgctgacctttgatgtgaggcgctcagccagggccaaggggagagcctggcaagatttgcagcctgaagccatgggccagggggccatggtgacctgagacaagtggactctgtatagttgccccctgcttccccttctacctcccctaccctatgctaaggggactcgtctccacctcgtaaaggaaactccccaagggaatccctgtcccctattttyctatccttctacycttccaagacagtcctagcctatagaactcctacctcccatcccctgaggtggtccccattcctccctcccttcctccccccgccatgctccagttgtggaaggtggtacgcccagctcggcagctggaactgcaccgcctcatactgctgctgatcgctttcagcctgggctccatgggcttcctggcttattatgtgtccaccagccctaaggccaaggaacccttgcccctgcccttgggagactgcagcagcggtggggcagctggtcctggccctgcacggcctccagttccacctcggccccccaggcctccagagacagctcgaactgaacccgtggtccttgtgtttgtggagagtgcatactcacagctggggcaggaaattgtggccatcctggagtctagtcgttttcgttatagcactgagttggcacctggccgaggggacatgcccacattgactgataatacccatggccgctatgtcttggtcatttatgagaacctgctcaagtatgtcaacctggatgcctggagtcgggaactgctagaccggtactgcgtggagtatggtgtgggcatcattggctttttccgagcccacgagcacagcctactgagcgcccagctcaagggctttcccctttttttacactcaaacttggggctccgggactaccaagtgaatccttctgccccgctactgcatctcacacgccccagccgcctagaaccagggccactgcctggtgatgactggaccatcttccaatccaatcatagtacatatgaaccagtgcttcttgccagccttcggccagctgagcccgcagtgccaggaccagttcttcgtcgggcccggcttcccactgtggtacaggacctggggcttcatgatggcatccagcgggtgctctttggacatggcctttccttctggctccacaaacttatcttcgttgatgctgttgcatacctcactggcaagcgcctctgcctggaccttgaccgctacatcttggtagacatcgatgacatctttgtgggcaaggaagggacccgcatgaaggtggctgatgttgaggctctgttgaccacccagaacaaactcaggaccttagttcccaacttcaccttcaacttgggcttctcgggcaagttctatcatactgggacagaggaggaggatgcaggggacgacatgctgctgaagcaccgcaaagagttctggtggttyccccacatgtggagccacatgcagccacacctgttccacaatcgctccgtgctggctgaccagatgaggctcaacaaacagtttgctctggagcatgggattcccacggacctggggtatgctgtggccccccaccactcgggtgtgtaccccatccacacgcagctctatgaggcctggaaatccgtgtggggcatccaggtgaccagcactgaggagtatccccatctccgccctgcccgctaccgccgtggcttcattcacaatggcattatggtgctgccccggcagacatgtggcctcttcactcacacaatcttctataatgagtatcctggaggctctcgtgaactagaccggagcatccgaggtggagagctctttctgacagtgctgcttaatccgatcagcatctttatgacccatctgtccaattatggaaatgaccggctgggcctatacacctttgagagcttggtgcgcttcctccagtgttggacacggctgcgcctacagacccttcctcctgtcccacttgcacagaagtactttgaacttttccctcaggagcgaagccccctttggcagaatccctgtgatgacaagaggcacaaagatatctggtccaaggagaaaacctgtgatcgtctcccgaagttcctcattgtgggaccccagaaaacagggactacagctattcacttcttcctgagcctgcacccagctgtaactagcagcttccctagccccagcacatttgaggagattcagttcttcaacagccctaattaccacaagggtattgactggtacatggatttcttccctgttccttccaatgccagcactgatttcctatttgaaaaaagtgccacctactttgactctgaagttgtaccacggcggggggctgccctcctgccacgagccaagatcatcacagtgctcaccaaccctgctgacagggcctactcctggtaccagcatcagcgagcccatggagacccagttgctctgaactataccttctatcaggtgatttcagcctcctcccagacccctctggcactacgctccctgcagaaccgctgtcttgtccctggctactattctacccatctacaacgctggctgacttactacccctctggacagttgctgattgtggatgggcaagagctgcgtaccaacccagcagcctcaatggagagcatccagaagttcctgggtatcacaccctttctgaactacacacggaccctcaggtttgatgatgataagggattttggtgccagggacttgaaggtggtaagactcgctgtctaggccggagcaaaggccggaggtatccagatatggacactgagtcccgtcttttccttacggattttttccggaaccataatttggagttgtcgaagctgctgagccggcttggacagccagtgccctcgtggcttcgggaagaactgcagcattccagtctgggctgatgtcccagcctcccataccagcaaaatgccccctgcttccctaagggkcaggtccagagcagggcccacaagggggattagagtggcctggcccctccccytctacctcagtagcccccaggcctgagatggctgagaagggaagggtatccttttcccacagttctgggacaaataaaggggcttcctttggtaccccacataatagtgctaggtacctttgacccatcatcttgggaggtggggaggaatgagagggtccaggcagggtgtaggggaatgtattagtccartgagatttccctcttcatccgcagcagtgtatctattctatacctggctatgggagagaccccttgcatgggagggaccccttgctatggcccctttagccaggcagtgggatctacctgtggcccggcctccctaatgtcattcacattgaatggggatgaggtcggacagtggctcatagagccgagtatgagccctagctgtgggctagaaatgtccttaataaacatccttatttttc

SEQ ID NO: 3687 - DNA, 3822 bp, Homo sapiens
gaggagggggtgcgcttccgcgggcggggcgcggagcccgccgtctcggaggccgcggctcggcccggcactgcggagggccgcttgatttcccggaacccaggtcgcgcggctgctagggccggagccggtggatccgagcgggtgccaccagcggcggcgcgccgcctcccccggtgggagcggtggttgggccaggctgcggcagagcgttcgctcggagatggcggagcagccgcgacgcggcccgtggccccgaaagcagggaagccgggcagccccgggacgcggcggagcccggggacagcggggacgccgcccagtcctccgggtatgaagctaaaatgcagcggctaagaacgcggctctggagcttgacaggcctgacgtcgaatcccagccctcccaccaactgagctgtgtgatcctgggcaaggtagaggggaagagattgaactttgctgacctttgatgtgaggcgctcagccagggccaaggggagagcctggcaagatttgcagcctgaagccatgggccagggggccatggtgacctgagacaagtggactctgtatagttgccccctgcttccccttctacctcccctaccctatgctaaggggactcgtctccacctcgtaaaggaaactccccaagggaatccctgtcccctattttyctatccttctacycttccaagacagtcctagcctatagaactcctacctcccatcccctgaggtggtccccattcctccctcccttcctccccccgccatgctccagttgtggaaggtggtacgcccagctcggcagctggaactgcaccgcctcatactgctgctgatcgctttcagcctgggctccatgggcttcctggcttattatgtgtccaccagccctaaggccaaggaacccttgcccctgcccttgggagactgcagcagcggtggggcagctggtcctggccctgcacggcctccagttccacctcggccccccaggcctccagagacagctcgaactgaacccgtggtccttgtgtttgtggagagtgcatactcacagctggggcaggaaattgtggccatcctggagtctagtcgttttcgttatagcactgagttggcacctggccgaggggacatgcccacattgactgataatacccatggccgctatgtcttggtcatttatgagaacctgctcaagtatgtcaacctggatgcctggagtcgggaactgctagaccggtactgcgtggagtatggtgtgggcatcattggctttttccgagcccacgagcacagcctactgagcgcccagctcaagggctttcccctttttttacactcaaacttggggctccgggactaccaagtgaatccttctgccccgctactgcatctcacacgccccagccgcctagaaccagggccactgcctggtgatgactggaccatcttccaatccaatcatagtacatatgaaccagtgcttcttgccagccttcggccagctgagcccgcagtgccaggaccagttcttcgtcgggcccggcttcccactgtggtacaggacctggggcttcatgatggcatccagcgggtgctctttggacatggcctttccttctggctccacaaacttatcttcgttgatgctgttgcatacctcactggcaagcgcctctgcctggaccttgaccgctacatcttggtagacatcgatgacatctttgtgggcaaggaagggacccgcatgaaggtggctgatgttgaggctctgttgaccacccagaacaaactcaggaccttagttcccaacttcaccttcaacttgggcttctcgggcaagttctatcatactgggacagaggaggaggatgcaggggacgacatgctgctgaagcaccgcaaagagttctggtggttyccccacatgtggagccacatgcagccacacctgttccacaatcgctccgtgctggctgaccagatgaggctcaacaaacagtttgctctggagcatgggattcccacggacctggggtatgctgtggccccccaccactcgggtgtgtaccccatccacacgcagctctatgaggcctggaaatccgtgtggggcatccaggtgaccagcactgaggagtatccccatctccgccctgcccgctaccgccgtggcttcattcacaatggcattatggtgctgccccggcagacatgtggcctcttcactcacacaatcttctataatgagtatcctggaggctctcgtgaactagaccggagcatccgaggtggagagctctttctgacagtgctgcttaatccgatcagcatctttatgacccatctgtccaattatggaaatgaccggctgggcctatacacctttgagagcttggtgcgcttcctccagtgttggacacggctgcgcctacagacccttcctcctgtcccacttgcacagaagtactttgaacttttccctcaggagcgaagccctggcttcagaatccctgtgatgacaagaggcacaaagatatctggtccaaggagaaaacctgtgatcgtctcccgaagttcctcattgtgggaccccagaaaacagggactacagctattcacttcttcctgagcctgcacccagctgtaactagcagcttccctagccccagcacatttgaggagattcagttcttcaacagccctaattaccacaagggtattgactggtacatggatttcttccctgttccttccaatgccagcactgatttcctatttgaaaaaagtgccacctactttgactctgaagttgtaccacggcggggggctgccctcctgccacgagccaagatcatcacagtgctcaccaaccctgctgacagggcctactcctggtaccagcatcagcgagcccatggagacccagttgctctgaactataccttctatcaggtgatttcagcctcctcccagacccctctggcactacgctccctgcagaaccgctgtcttgtccctggctactattctacccatctacaacgctggctgacttactacccctctggacagttgctgattgtggatgggcaagagctgcgtaccaacccagcagcctcaatggagagcatccagaagttcctgggtttgatgatgataagggattttggtgccagggacttgaaggtggtaagactcgctgtctaggccggagcaaaggccggaggtatccagatatggacactgaggaaacgtgggaagaataagtacgtgagagccagttgggagaaacaaagttgtgcaggccaagggcataaagcccaatctcgaaggcgcaaaggtgcaggttgcggtgaggaccctggtggccccctgaggaagatggatgtgtgaaaatggaagtgctgctgttgccccctgccttgatcagcactgtcttcgccagctcgaagtagaagtgtgcagctgcctctgatggctgattggtcttcgcccgggctcctccactggcactggcccggcgacttccactggaggatgaggagcccagggagtccgaagaagagctgctaatgctgtcactgtcctgacctcgaccccaggaggtgggggcccagccccctcgaagtggtctccggcttaaggtgggggaactatccgatgttgtttcaggggcactgctgtcaatgctggccatgcctaacccccaagagaagtcagtctcagaagtcaggagtcccagatgttaagactccaaccttcaggattatccttccctctatgctagcccacaggctatcctacc

SEQ ID NO: 3688 - DNA, 5307 bp, Homo sapiens
ttttgtctctgcagggtctgcagtaggcctccgcatggcccaccgaggtgaaccatgaccggctggccaacattcgccattgaccagccggagttgcatctcgccaggaggtgacccctcctccagctgcccccaactcgcccaccctcgcccaggaaagtgcccgcagctgccacggacaccatgtagtagggccggctgcggcgcccagtgagctgcgatggttttgtacacgaccccctttcctaacagctgtctgtccgccctgcactgtgtgtcctgggcccttatctttccatgctactggctggtggaccggctcgctgcctccttcatacccaccacctacgagaagcgccagcgggcasacgacccgtgctgcctgcagctgctctgcactgccctcttcacgcccatctacctggccctcctggtggcctcgctgccctttgcgtttctcggctttctcttctggtccccactgcagtcrgcccgccggccctacatctattcacggctggaagacaagggcctggccggtggggcagccctgctcagtgaatggaagggcacggggcctggcaaaagcttctgctttgccactgccaacstctgcctcctgcccgactcactcgccagggtcaacaacctttttaacacccaagcgcgggccaaggagatcgggcagagaatccgcaatggggccgcccggccccagatcaaaatttacatcgactcccccaccaatacctccatcagcgccgctagcttcagcagcctggtgtcaccacagggcggcgatggggtggcccgggccgtccccgggagcattaagaggacagcctctgtggagtacaagggtgacggtgggcggcaccccggtgacgaggctgccaacggcccagcctctggggaccctgtcgacagcagcagcccggaggatgcctgcatcgtgcgcatcggtggcgaggagggcggccggccacctgaagctgacgaccctgtgcctgggggccaggccaggaacggagctggcgggggcccaaggggccagacgcccaaccataatcagcaggacggggattcagggagcctgggcagcccctcggcctcccgggagtccctggtgaaggggcgagctgggccagacaccagtgccagcggggagccaggtgccaacagcaagctcctgtacaaggcctcggtggtgaagaaggcggctgcacgcaggaggcggcaccccgacgaggccttcgaccatgaggtctccgccttcttccccgccaacctggacttcctgtgcctgcaggaggtgtttgacaagcgagcagccaccaaattgaaagagcagctgcacggctacttcgagtacatcctgtacgacgtcggggtctacggctgccagggctgctgcagcttcaagtgtctcaacagcggcctcctctttgccagccgctaccccatcatggacgtggcctatcactgttaccccaacaagtgtaacgacgatgccctggcctctaagggagctctgtttctcaaggtgcaggtgggaagcacacctcaggaccaaagaatcgtcgggtacatcgcctgcacacacctgcatgccccrcaagaggacagcgccatccggtgtgggcagctggacctgcttcaggactggctggctgatttccgaaaatctacctcctcgtccagcgcagccaaccccgaggagctggtggcatttgacgtcgtctgtggagatttcaactttgataactgctcctctgacgacaagctggagcagcaacactccctgttcacccactacagggacccctgccgcctggggcctggtgaggagaagccgtgggccatcggtactctgctggacacgaacggcctgtacgatgaggatgtgtgcacccccgacaacctgcagaaggtcctggagagtgaggagggccgcagggagtacctggcgtttcccaccagcaagagctcgggccagaaggggcggaaggagctgctgaagggcaacggccggcgcatcgactacatgctgcatgcagaggaggggctgtgcccagactggaaggccgaggtggaagaattcagttttatcacccagctgtccggcctgacggaccacctgccagtagccatgcgactgatggtgtcttcgggggaggaggaggcatagaccgtccggagcagyggggcctctgccagcccttgcagctgcagcccrtccctgggccatgtcccctccatcgagtgcccggtgcttgggggaggagggcagggacagggagggagccacagtcagtgcccgggaacctggaagctgcgctgctctgcgcctctgggcctcactgtggacagaggagtcaggcccgccccaggagcctccagctgcctaaccagtgccattctttcacaacacgattttctacaaatctacagcacaaccgagtttgtaacccgtgggttagtatgaggaccgggttcgtgtrctctctgtatctcctcttaagcttcgtccaggrttctttatttttgtctgctgccaatgtcgtctcgcatgcctgcaccctcgcatgcacrctgcccgcatgccacgtgccacgctgtagccacagaccccttgctcgggcctcacccaaggccaaactccaaacacaatcagaaccagccaaagaagcacttcctgggcacggccaccagctctcccgcctccagtgtgggccggctcctgcagggtccgagggctgcatctctaccagccagcccagggctcttcccagggtctcgcattcaagggcaattacattttaaaaagaaaaacagaaaaaggttaatcacaaaaccaaccctcayttcacagggtctgtaagtcactcatagaactttgctcttcccgagacagggtcccttccccagctcaggcacaacagagtctggcaggctctggcaccctgggcctcctccgggagcctcccatytgggcagtggagccataaacggggatccgagaagagagtatccactttttttttacaggaagaagggactcacagcataaacgggggtgggggggatcctgattttgaaaataatctatttgtagcttctcttctatcaaaaccaacacatcctcttctttctgccaatcctctcccccacgggacacctctctggttcgggaccaatccctccctggggacgtgccccacctgcgtgccggctgagctcaggaacccctgcctgccccccgggtggggctgcggctctggcctcccaggcccatcctcaacagctaccccagccaacaccaaggccacaaggggaccccggcctaggaggcaggaagccaaggtrcagagagcagcctggccctcaccagtgcgcaagctggggcagcaaggctgacagttgctgcatgcccagggcagggtgtggtactggcacccaagttcagcatggcagagctggccaacagcttgtggtccccgatctgcctccagccccaagatgcctacagcccccaggccccttcggcagcactgcctctgcccacctgcctttaagagactccagggctgctcctgtcatgcagcgaaggttttgtctgtttcaaagttcgagactcaacttgagggactgtttttgacaatccccgctgacctccgctcctcgtggcgccctggccctacacccagcctggcccagggccggctttgcctggtgaggctggagggagcaccaggacctgctgtctgctgtcagcccctcctggtgctggtgccctgatgctgtgccttgtcacccattgagctgcaagagggaccaagagggggccacgcagccagccagatgcctggccctgtgctggggcagacaacrctgcagagcccagggagcctggcgctaggacgtgcgtccttgtgacactggcctgtctgaactcacctggcctgggaagcaccgtctgcccgggcccaagccctgcccctccagagtccagagccaggaaggggctgctgagggcgagcatcctgctgggctctctgcccggcccacccctccaaggggctggcctgtgagccttgactgggattcatgatgtggaggcccccaacttccagaagcagctggtactctgctcacacaagcgactgggccggccggccctggacccctagaccccgagccgcctgccgactgcctgcacagggagagcagttgaggcccgggcagggcccccacaccagaccccaacatagcttccccacccaggcaccccctcccggggcagcaggcgtgggagtcagggctgcatgctcctcccctcccacctcacaggcggccttaggcaagtcattttctgtcatcacaaggtcgcctctgcctagtcaggtcctggcgtccagagtaaggatgtgcggcccccaggcccccgcacacctccctcagcaccaagaccgggacccccccacccacgtgtctcattgtggctgcctatggactcccgggccttgtgtgcaggccaggcccttccactgattttttaaagtgaaccattgctggatctcagattctgtggcatctaaggcctagcaggggtgggcacacgggtcacccgaggcccataccaagactctgttcctgccctaggcccagtctcaaaggaagccacaaggcgcgggggccactgaggaaggaaatgttcattttcatttgtccaaaaccaccttaagttttaagtatattaatcttgatgctttttaactattgctttttaacttgctgagatttagaaatactgttataaaaacttttttaatttctgtatttttttctgtattgtatcttcatgggacattaggggttttctatggtaagcacacctatggttttggtaaaaacattatcaaatatatatccagacggttcttccctagaagaaaaacaagtctttacacctgataaaatattttgcgaagagaggtgttctttttccttactggtgctgaaaggaaggatggataacgaggagaaaataaaactgtgaggctcaaggctggtgttctccacttatttcagcgacaagctggggccaggcctcaggggcacgcctgggggcaggggagggagttcctgcccccaactgcaggacaggcactgcccaagtctgccctgaatccgaggacaccggaactctgctcatacaggcggctcggctggcctggcacaagcctcaccttctaagctgcgagccagaggccactgggttctctcacgtggtgtctgctgttacct

SEQ ID NO: 3689 - DNA, 2652 bp, Homo sapiens
gagacagtcacgttgatggtgacagcagcagtgaccgtagcagcctagaggtggccgaatgcttactctaatgggctggcccatccctgagtgtctagagttcccagcccgcttaaggaaggaaggaaaacacaggcagctctaagtgtacgacgagggaggtctcatcggcgaatttcactctgtcgccaggctggaatgcagtagggcaatctcggctcactgcaacctccacctcccgagttcaagtgatgctcctgcttcrgcctcctgagtagctgggactacagaactgcgtagcgccttatacgctgcggcaagtgtgacgtcattcgaacaaaccataggccccgcccccggactagccacgcccacaggctcctgaaaccaccaatcccagctgtgacagcgctcaggaccgatgctcataggtcccgtccctaggatccccgccccctccgcccgcgccccgcccctcgcagcccagttccggacgcgggcccagccgcgcctgcgcytccgctcgcctgtggctgcgtcgcgcgctcttcctcggagctayccaggcggctggtgtgcagcaagctccgcgccgacccckgacgcctgacgcctgacgcctgctmcccggcccsgcatgagccgctacctgctgccgctgtcggcgctgggcacggtagcaggcgccgccgtgctgctcaaggactatgtcaccggtggggcttgccccagcaaggccaccatccctgggaagacggtcatcgtgacgggygccaacacaggcatcgggaagcagaccgccttggaactggccaggagaggaggcaacatcatcctggcctgccgagacatggagaagtgtgaggcggcagcaaaggacatccgcggggagaccctcaatcaccatgtcaamrcccggcacctggacttggcttccctcaagtctatccgagagtttgcagcaaagatcattgaagaggaggagcgagtggacattctaatcaacaacgcgggtgtgatgcggtgcccccactggaccaccgaggacggcttcgagatgcagtttggcgttaaccacctgggtcactttctcttgacaaacttgctgctggacaagctgaaagcctcagccccttcgcggatcatcaacctctcgtccctggcccatgttgctgggcacatagactttgacgacttgaactggcagacgaggaagtataacaccaaagccgcctactgccagagcaagctygccatcgtcctcttcaccaaggagytgagccggcggctgcaaggctctggtgtgactgtcaacgccctgcaccccggcgtggccaggacagagctgggcagacacacgggcatccatggctccaccttctccagcaccacactcgggcccatcttctggctgctggtcaagagccccgagctggccgcccagcccagcacatacctggccgtggcggaggaactggcggatgtttccggaaagtacttcgatggactcaaacagaaggccccggcccccgaggctgaggatgaggaggtggcccggaggctttgggctgaaagtgcccgcctggtgggcttagaggctccctctgtgagggagcagccmctccccagataacctctggagcagatttgaaagccaggatggcgcctccagaccgaggacagctgtccgccatgcccgcagcttcctggcactacctgagccgggagacccaggactggcggccgccatgcccgcagtaggttctagggggcggtgctggccgcagtggactggcctgcaggtgagcactgcccygggctctggctggttccgtctgctctgctgccagcaggggagaggggccatctgatgcttcccctgggaatctaaactgggaatggccgaggaggaaggggctcygtgcacttgcaggccacgtcaggagagccagcggtgcctgtcggggagggttccaaggtgctccgtgaagagcatgggcaagttgtctgacacttggtggattcttgggtccctgtgggaccttgtgcatgcatggtcctctctgagccttggtttcttcagcagygagatgctcagaataactgctgtctcccatgatggtgtggtacagcgagctgttgtctggctatggcatggctgtgccgggggtgtttgctgagggcttcctgtgccagagcccagccagagagcaggtgcaggtgtcatccygagttcaggctctgcacggcatggagtgggaaccccaccagctgctgctacaggacctgggattgcctgggactcccaccttcctatcaattctcatggtagtccaaactgcagactctcaaacttgctcatttaaaagaaaaaaaaaagaagaaaatgtacccgagtcgtagattttatttttcctctgtgcatgggtgaatgcccatgagctgaacaaaggcaactcatggctttattccttttaggaaacaaggcatcagtttatcaccagggcaacaggccatgcaaaagttcagacttggccgggcgcggtggatcacgaggtcaggagatcgagaccatcctggctaacacaatgaaaccctgtttctactaaaaaaatacaaaaaattagctgggcatggtggtgggcgcctgta

SEQ ID NO: 3690 - DNA, 2346 bp, Homo sapiens
agtcacgttgatggtgacagcagcagtgaccgtagcagcctagaggtggccgaatgcttactctaatgggctggcccatccctgagtgtctagagttcccagcccgcttaaggaaggaaggaaaacacaggcagctctaagtgtacgacgagggaggtctcatcggcggtgaggaagcccaggcgggtccccttcccagctgaaaggggttcggaatttcactctgtcgccaggctggaatgcagtagggcaatctcggctcactgcaacctccacctcccgagttcaagtgatgctcctgcttcrgcctcctgagtagctgggactacagggactatgtcaccggtggggcttgccccagcaaggccaccatccctgggaagacggtcatcgtgacgggygccaacacaggcatcgggaagcagaccgccttggaactggccaggagaggaggcaacatcatcctggcctgccgagacatggagaagtgtgaggcggcagcaaaggacatccgcggggagaccctcaatcaccatgtcaamrcccggcacctggacttggcttccctcaagtctatccgagagtttgcagcaaagatcattgaagaggaggagcgagtggacattctaatcaacaacgcgggtgtgatgcggtgcccccactggaccaccgaggacggcttcgagatgcagtttggcgttaaccacctgggtcactttctcttgacaaacttgctgctggacaagctgaaagcctcagccccttcgcggatcatcaacctctcgtccctggcccatgttgctgggcacatagactttgacgacttgaactggcagacgaggaagtataacaccaaagccgcctactgccagagcaagctygccatcgtcctcttcaccaaggagytgagccggcggctgcaaggctctggtgtgactgtcaacgccctgcaccccggcgtggccaggacagagctgggcagacacacgggcatccatggctccaccttctccagcaccacactcgggcccatcttctggctgctggtcaagagccccgagctggccgcccagcccagcacatacctggccgtggcggaggaactggcggatgtttccggaaagtacttcgatggactcaaacagaaggccccggcccccgaggctgaggatgaggaggtggcccggaggctttgggctgaaagtgcccgcctggtgggcttagaggctccctctgtgagggagcagccmctccccagataacctctggagcagatttgaaagccaggatggcgcctccagaccgaggacagctgtccgccatgcccgcagcttcctggcactacctgagccgggagacccaggactggcggccgccatgcccgcagtaggttctagggggcggtgctggccgcagtggactggcctgcaggtgagcactgcccygggctctggctggttccgtctgctctgctgccagcaggggagaggggccatctgatgcttcccctgggaatctaaactgggaatggccgaggaggaaggggctcygtgcacttgcaggccacgtcaggagagccagcggtgcctgtcggggagggttccaaggtgctccgtgaagagcatgggcaagttgtctgacacttggtggattcttgggtccctgtgggaccttgtgcatgcatggtcctctctgagccttggtttcttcagcagygagatgctcagaataactgctgtctcccatgatggtgtggtacagcgagctgttgtctggctatggcatggctgtgccgggggtgtttgctgagggcttcctgtgccagagcccagccagagagcaggtgcaggtgtcatccygagttcaggctctgcacggcatggagtgggaaccccaccagctgctgctacaggacctgggattgcctgggactcccaccttcctatcaattctcatggtagtccaaactgcagactctcaaacttgctcatttaaaagaaaaaaaaaagaagaaaatgtacccgagtcgtagattttatttttcctctgtgcatgggtgaatgcccatgagctgaacaaaggcaactcatggctttattccttttaggaaacaaggcatcagtttatcaccagggcaacaggccatgcaaaagttcagacttggccgggcgcggtggatcacgaggtcaggagatcgagaccatcctggctaacacaatgaaaccctgtttctactaaaaaaatacaaaaaattagctgggcatggtggtgggcgcctgtaagagatgtgggtgcctgggctgtgcccagtcactgaaatggcacacctgatgctacctgttcact

SEQ ID NO: 3691 - DNA, 2758 bp, Homo sapiens
agtcacgttgatggtgacagcagcagtgaccgtagcagcctagaggtggccgaatgcttactctaatgggctggcccatccctgagtgtctagagttcccagcccgcttaaggaaggaaggaaaacacaggcagctctaagtgtacgacgagggaggtctcatcggcggtgaggaagcccaggcgggtccccttcccagctgaaaggggttcggaatttcactctgtcgccaggctggaatgcagtagggcaatctcggctcactgcaacctccacctcccgagttcaagtgatgctcctgcttcrgcctcctgagtagctgggactacagaactgcgtagcgccttatacgctgcggcaagtgtgacgtcattcgaacaaaccataggccccgcccccggactagccacgcccacaggctcctgaaaccaccaatcccagctgtgacagcgctcaggaccgatgctcataggtcccgtccctaggatccccgccccctccgcccgcgccccgcccctcgcagcccagttccggacgcgggcccagccgcgcctgcgcytccgctcgcctgtggctgcgtcgcgcgctcttcctcggagctayccaggcggctggtgtgcagcaagctccgcgccgacccckgacgcctgacgcctgacgcctgctmcccggcccsgcatgagccgctacctgctgccgctgtcggcgctgggcacggtagcaggcgccgccgtgctgctcaaggactatgtcaccggtggggcttgccccagcaaggccaccatccctgggaagacggtcatcgtgacgggygccaacacaggcatcgggaagcagaccgccttggaactggccaggagaggaggcaacatcatcctggcctgccgagacatggagaagtgtgaggcggcagcaaaggacatccgcggggagaccctcaatcaccatgtcaamrcccggcacctggacttggcttccctcaagtctatccgagagtttgcagcaaagatcattgaagaggaggagcgagtggacattctaatcaacaacgcgggtgtgatgcggtgcccccactggaccaccgaggacggcttcgagatgcagtttggcgttaaccacctgggtcactttctcttgacaaacttgctgctggacaagctgaaagcctcagccccttcgcggatcatcaacctctcgtccctggcccatgttgctgggcacatagactttgacgacttgaactggcagacgaggaagtataacaccaaagccgcctactgccagagcaagctygccatcgtcctcttcaccaaggagytgagccggcggctgcaaggctctggtgtgactgtcaacgccctgcaccccggcgtggccaggacagagctgggcagacacacgggcatccatggctccaccttctccagcaccacactcgggcccatcttctggctgctggtcaagagccccgagctggccgcccagcccagcacatacctggccgtggcggaggaactggcggatgtttccggaaagtacttcgatggactcaaacagaaggccccggcccccgaggctgaggatgaggaggtggcccggaggctttgggctgaaagtgcccgcctggtgggcttagaggctccctctgtgagggagcagccmctccccagataacctctggagcagatttgaaagccaggatggcgcctccagaccgaggacagctgtccgccatgcccgcagcttcctggcactacctgagccgggagacccaggactggcggccgccatgcccgcagtaggttctagggggcggtgctggccgcagtggactggcctgcaggtgagcactgcccygggctctggctggttccgtctgctctgctgccagcaggggagaggggccatctgatgcttcccctgggaatctaaactgggaatggccgaggaggaaggggctcygtgcacttgcaggccacgtcaggagagccagcggtgcctgtcggggagggttccaaggtgctccgtgaagagcatgggcaagttgtctgacacttggtggattcttgggtccctgtgggaccttgtgcatgcatggtcctctctgagccttggtttcttcagcagygagatgctcagaataactgctgtctcccatgatggtgtggtacagcgagctgttgtctggctatggcatggctgtgccgggggtgtttgctgagggcttcctgtgccagagcccagccagagagcaggtgcaggtgtcatccygagttcaggctctgcacggcatggagtgggaaccccaccagctgctgctacaggacctgggattgcctgggactcccaccttcctatcaattctcatggtagtccaaactgcagactctcaaacttgctcatttaaaagaaaaaaaaaagaagaaaatgtacccgagtcgtagattttatttttcctctgtgcatgggtgaatgcccatgagctgaacaaaggcaactcatggctttattccttttaggaaacaaggcatcagtttatcaccagggcaacaggccatgcaaaagttcagacttggccgggcgcggtggatcacgaggtcaggagatcgagaccatcctggctaacacaatgaaaccctgtttctactaaaaaaatacaaaaaattagctgggcatggtggtgggcgcctgtaagagatgtgggtgcctgggctgtgcccagtcactgaaatggcacacctgatgctacctgttcact

SEQ ID NO: 3692 - DNA, 2281 bp, Homo sapiens
agtcacgttgatggtgacagcagcagtgaccgtagcagcctagaggtggccgaatgcttactctaatgggctggcccatccctgagtgtctagagttcccagcccgcttaaggaaggaaggaaaacacaggcagctctaagtgtacgacgagggaggtctcatcggcggtgaggaagcccaggcgggtccccttcccagctgaaaggggttcggaatttcactctgtcgccaggctggaatgcagtagggcaatctcggctcactgcaacctccacctcccgagttcaagtgatgctcctgcttcrgcctcctgagtagctgggactacagggactatgtcaccggtggggcttgccccagcaaggccaccatccctgggaagacggtcatcgtgacgggygccaacacaggcatcgggaagcagaccgccttggaactggccaggagaggaggcaacatcatcctggcctgccgagacatggagaagtgtgaggcggcagcaaaggacatccgcggggagaccctcaatcaccatgtcaamrcccggcacctggacttggcttccctcaagtctatccgagagtttgcagcaaagatcattgaagaggaggagcgagtggacattctaatcaacaacgcgggtgtgatgcggtgcccccactggaccaccgaggacggcttcgagatgcagtttggcgttaaccacctgggtcactttctcttgacaaacttgctgctggacaagctgaaagcctcagccccttcgcggatcatcaacctctcgtccctggcccatgttgctgggcacatagactttgacgacttgaactggcagacgaggaagtataacaccaaagccgcctactgccagagcaagctygccatcgtcctcttcaccaaggagytgagccggcggctgcaaggctctggtgtgactgtcaacgccctgcaccccggcgtggccaggacagagctgggcagacacacgggcatccatggctccaccttctccagcaccacactcgggcccatcttctggctgctggtcaagagccccgagctggccgcccagcccagcacatacctggccgtggcggaggaactggcggatgtttccggaaagtacttcgatggactcaaacagaaggccccggcccccgaggctgaggatgaggaggtggcccggaggctttgggctgaaagtgcccgcctggtgggcttagaggctccctctgtgagggagcagccmctccccagataacctctggagcagatttgaaagccaggatggcgcctccagaccgaggacagctgtccgccatgcccgcagcttcctggcactacctgagccgggagacccaggactggcggccgccatgcccgcagtaggttctagggggcggtgctggccgcagtggactggcctgcaggtgagcactgcccygggctctggctggttccgtctgctctgctgccagcaggggagaggggccatctgatgcttcccctgggaatctaaactgggaatggccgaggaggaaggggctcygtgcacttgcaggccacgtcaggagagccagcggtgcctgtcggggagggttccaaggtgctccgtgaagagcatgggcaagttgtctgacacttggtggattcttgggtccctgtgggaccttgtgcatgcatggtcctctctgagccttggtttcttcagcagygagatgctcagaataactgctgtctcccatgatggtgtggtacagcgagctgttgtctggctatggcatggctgtgccgggggtgtttgctgagggcttcctgtgccagagcccagccagagagcaggtgcaggtgtcatccygagttcaggctctgcacggcatggagtgggaaccccaccagctgctgctacaggacctgggattgcctgggactcccaccttcctatcaattctcatggtagtccaaactgcagactctcaaacttgctcatttaaaagaaaaaaaaaagaagaaaatgtacccgagtcgtagattttatttttcctctgtgcatgggtgaatgcccatgagctgaacaaaggcaactcatggctttattccttttaggaaacaaggcatcagtttatcaccagggcaacaggccatgcaaaagttcagacttggccgggcgcggtggatcacgaggtcaggagatcgagaccatcctggctaacacaatgaaaccctgtttctactaaaaaaatacaaaaaattagctgggcatggtggtgggcgcctgta

SEQ ID NO: 3693 - DNA, 2717 bp, Homo sapiens
gagacagtcacgttgatggtgacagcagcagtgaccgtagcagcctagaggtggccgaatgcttactctaatgggctggcccatccctgagtgtctagagttcccagcccgcttaaggaaggaaggaaaacacaggcagctctaagtgtacgacgagggaggtctcatcggcgaatttcactctgtcgccaggctggaatgcagtagggcaatctcggctcactgcaacctccacctcccgagttcaagtgatgctcctgcttcrgcctcctgagtagctgggactacagaactgcgtagcgccttatacgctgcggcaagtgtgacgtcattcgaacaaaccataggccccgcccccggactagccacgcccacaggctcctgaaaccaccaatcccagctgtgacagcgctcaggaccgatgctcataggtcccgtccctaggatccccgccccctccgcccgcgccccgcccctcgcagcccagttccggacgcgggcccagccgcgcctgcgcytccgctcgcctgtggctgcgtcgcgcgctcttcctcggagctayccaggcggctggtgtgcagcaagctccgcgccgacccckgacgcctgacgcctgacgcctgctmcccggcccsgcatgagccgctacctgctgccgctgtcggcgctgggcacggtagcaggcgccgccgtgctgctcaaggactatgtcaccggtggggcttgccccagcaaggccaccatccctgggaagacggtcatcgtgacgggygccaacacaggcatcgggaagcagaccgccttggaactggccaggagaggaggcaacatcatcctggcctgccgagacatggagaagtgtgaggcggcagcaaaggacatccgcggggagaccctcaatcaccatgtcaamrcccggcacctggacttggcttccctcaagtctatccgagagtttgcagcaaagatcattgaagaggaggagcgagtggacattctaatcaacaacgcgggtgtgatgcggtgcccccactggaccaccgaggacggcttcgagatgcagtttggcgttaaccacctgggtcactttctcttgacaaacttgctgctggacaagctgaaagcctcagccccttcgcggatcatcaacctctcgtccctggcccatgttgctgggcacatagactttgacgacttgaactggcagacgaggaagtataacaccaaagccgcctactgccagagcaagctygccatcgtcctcttcaccaaggagytgagccggcggctgcaaggctctggtgtgactgtcaacgccctgcaccccggcgtggccaggacagagctgggcagacacacgggcatccatggctccaccttctccagcaccacactcgggcccatcttctggctgctggtcaagagccccgagctggccgcccagcccagcacatacctggccgtggcggaggaactggcggatgtttccggaaagtacttcgatggactcaaacagaaggccccggcccccgaggctgaggatgaggaggtggcccggaggctttgggctgaaagtgcccgcctggtgggcttagaggctccctctgtgagggagcagccmctccccagataacctctggagcagatttgaaagccaggatggcgcctccagaccgaggacagctgtccgccatgcccgcagcttcctggcactacctgagccgggagacccaggactggcggccgccatgcccgcagtaggttctagggggcggtgctggccgcagtggactggcctgcaggtgagcactgcccygggctctggctggttccgtctgctctgctgccagcaggggagaggggccatctgatgcttcccctgggaatctaaactgggaatggccgaggaggaaggggctcygtgcacttgcaggccacgtcaggagagccagcggtgcctgtcggggagggttccaaggtgctccgtgaagagcatgggcaagttgtctgacacttggtggattcttgggtccctgtgggaccttgtgcatgcatggtcctctctgagccttggtttcttcagcagygagatgctcagaataactgctgtctcccatgatggtgtggtacagcgagctgttgtctggctatggcatggctgtgccgggggtgtttgctgagggcttcctgtgccagagcccagccagagagcaggtgcaggtgtcatccygagttcaggctctgcacggcatggagtgggaaccccaccagctgctgctacaggacctgggattgcctgggactcccaccttcctatcaattctcatggtagtccaaactgcagactctcaaacttgctcatttaaaagaaaaaaaaaagaagaaaatgtacccgagtcgtagattttatttttcctctgtgcatgggtgaatgcccatgagctgaacaaaggcaactcatggctttattccttttaggaaacaaggcatcagtttatcaccagggcaacaggccatgcaaaagttcagacttggccgggcgcggtggatcacgaggtcaggagatcgagaccatcctggctaacacaatgaaaccctgtttctactaaaaaaatacaaaaaattagctgggcatggtggtgggcgcctgtaagagatgtgggtgcctgggctgtgcccagtcactgaaatggcacacctgatgctacctgttcact

SEQ ID NO: 3694 - DNA, 3282 bp, Homo sapiens
  misc_feature (1)...(3282): n = A,T,C or G
gtacagaatttcagagtgggatatcagatctttagtgtgaagatacatctacattaaaccaggaatcactagaactgacatttggacaagaaaatttggaaaattttaaaactgtgaaggttgatcatggaaattaaagaggaaggggcatcagaagaagggcagcactttcttcctacagcccaggccaatgatcccggggactgtcagttcacaagtatccagaagactccaaatgaaccgcagttggaattcatccttgcatgcaaggatctcgtggctcctgtccgtgatcgtaaactgaatacactggtgcagatctccgtaatccaccccgtggagcagagtctgacaagatactccagcaccgaaattgtggagggaacaagggacccactgtttttgactggtgtcacattcccatctgagtatcccatctatgaggagaccaaaataaaactaacagtctatgatgtcaaggataagtctcatgayaccgttcgaaccagtgtcctaccagaacataaggatcccccgccagaagttggscgaagtttcttgggctatgccagttttaaagtgggagagctgctgaagtcaaaggagcaattgctggtcctgagcctgagaacttcagatggtggcaaagtggttggcaccatagaagtcagtgtcgtgaagatgggggagattgaggatggggaagccgaccacatcaccacagatgtacagggacaaaagtgtgccctggtatgtgaatgtacagccccggaaagtgtgagcggaaaagataacttaccttttttgaattcagtgttaaagaacccagtatgtaaattatatagatttcccacatctgacaataagtggatgcgaattcgagagcagatgtcagagagcattctttcctttcatattcctaaggaattgatttcccttcacattaaagaagatttgtgcagaaaccaggagataaaagaacttggtgagctttctccacattgggacaatctgcgaaaaaatgtccttackcactgtgatcaaatggtgaatatgtwccaagacattctgacagaacttagcaaggaaacagggtcctctttcaaatcaagcagcagcaaaggagagaaaacattagaatttgttccaataaatctacatctgcaaagaatgcaggtacacagccctcacttgaaagatgctctctacgatgtcatcactgtgggagccccagctgcccattttcagggatttaagaatggtggtcttcggaagctactccatagatttgaaacagaaagaagaaataccggataccagtttatttactattcacctgaaaacacagccaaagcaaaggaagttctcagcaacatcaatcaactacaacctcttatagcaacccatgcagacctactgcttaattctgcaagccagcattctccagacagcttgaagaattctttaaagatgctttcagaaaaaacagagctttttgtacatgccttcaaggatcaacttgtcaggagtgctcttttagcactctacactgcaaggccaggaggcattcttaagaagccaccctctcctaagagcagcmcagaggagagcagtccccaagaccaacccccagtgatgagagggcaggactccataccacatcattcagactatgatgaggaagagtgggacagggtgtgggccaatgtggggaagagcctgaactgcattattgctatggtggacaaactgattgaaagagatggtggcagtgaaggcagtggyrgcaacaatgatggagaaaaggaaccttcattaacagatgccattccctctcacccaagagaggactggtatgaacagttgtatcccctcatccttaccctgaaggactgcatgggagaagyggtgaaccgagccaagcagtccctgacatttgtgctccttcaggaacttgcgtacagcttgccccagtgtctgatgctgacgctaagaagagacatcgwcttcagccaagcacttgctggattggtttgtggttttatcatcaaattacagacaagtctgtatgacccaggcttcctacagcagcttcacacagtggggttgatagtacaatatgaaggactgctaagtacatacagygatgaaattggaatgctagaggacatggccgttggcatttccgatttaaagaaagtygcatttaaaataattgaagccaaatccaatgatgtgttgccagttataacaggaagacgagaacattaygtggtagaggtcaagcttccagccagaatgtttgagtcactacctctncagattaaagaaggacagttgcttcatgtgtatccagtactttttaatgttggaatcaatgaacagcaaactctggctgaaaggtttggagatgtctctttgcaagaaagtattaatcaggaaaacttcgaacttctacaagaatattacaagatatttatggaaaagatgcctcctgattatatttcacattttcaggaacaaaatgatttaaaagcattgctagaaaatctccttcaaaatatccaatccaaaaaaagaaagaatgtagaaattatgtggctggctgcaacgatttgccgcaaactgaatggtattcgtttcacctgttgtaaaagtgccaaagacaggacatcgatgtcagtgacacttgaacaatgctcaatcttgagagatgagcaccagttacacaaggacttctttatccgagcgctggattgcatgagaagagaaggatgccgcatagagaatgtactgaagaatatcaaatgcagaaagtatgctttcaacatgctacagctgatggctttccccaagtactacagacctccagaggggacttatggaaaagctgacacctaagtttaccaacatgttaataaacaggaacacaaatacatttcagttggataatcttcaccttggtcttttttgtttgtttttattgtcatgaatttgtggtgggggagatgatcacagatgtttcccaaaatctaggaactacttcaattcatcatcagcatattgctctgaaagaaatccattttaaaaaatcttacatgattcagtactgtcatttctagttctaagcttctatgtgttgagcctagctgattgagattggttcacaaagtgtaaatttcattcatgagtatttaaatgtttctgaggaaacatggatcatttcaataggactaggggtgattcacagagcaccactctccaaccaaatggaagagagga

SEQ ID NO: 3695 - DNA, 3404 bp, Homo sapiens
  misc_feature (1)...(3404): n = A,T,C or G
atacaaagaaatggtgttacctggcaagaggtcttctgtcttttatgaaaaattacagagccttgaaaccagcgaaacaataatcaaagagcagttctgtcaaagaaaacaacataaatcaggtacagaatttcagagtgggatatcagatctttagtgtgaagatacatctacattaaaccaggaatcactagaactgacatttggacaagaaaatttggaaaattttaaaactgtgaaggttgatcatggaaattaaagaggaaggggcatcagaagaagggcagcactttcttcctacagcccaggccaatgatcccggggactgtcagttcacaagtatccagaagactccaaatgaaccgcagttggaattcatccttgcatgcaaggatctcgtggctcctgtccgtgatcgtaaactgaatacactggtgcagatctccgtaatccaccccgtggagcagagtctgacaagatactccagcaccgaaattgtggagggaacaagggacccactgtttttgactggtgtcacattcccatctgagtatcccatctatgaggagaccaaaataaaactaacagtctatgatgtcaaggataagtctcatgayaccgttcgaaccagtgtcctaccagaacataaggatcccccgccagaagttggscgaagtttcttgggctatgccagttttaaagtgggagagctgctgaagtcaaaggagcaattgctggtcctgagcctgagaacttcagatggtggcaaagtggttggcaccatagaagtcagtgtcgtgaagatgggggagattgaggatggggaagccgaccacatcaccacagatgtacagggacaaaagtgtgccctggtatgtgaatgtacagccccggaaagtgtgagcggaaaagataacttaccttttttgaattcagtgttaaagaacccagtatgtaaattatatagatttcccacatctgacaataagtggatgcgaattcgagagcagatgtcagagagcattctttcctttcatattcctaaggaattgatttcccttcacattaaagaagatttgtgcagaaaccaggagataaaagaacttggtgagctttctccacattgggacaatctgcgaaaaaatgtccttackcactgtgatcaaatggtgaatatgtwccaagacattctgacagaacttagcaaggaaacagggtcctctttcaaatcaagcagcagcaaaggagagaaaacattagaatttgttccaataaatctacatctgcaaagaatgcaggtacacagccctcacttgaaagatgctctctacgatgtcatcactgtgggagccccagctgcccattttcagggatttaagaatggtggtcttcggaagctactccatagatttgaaacagaaagaagaaataccggataccagtttatttactattcacctgaaaacacagccaaagcaaaggaagttctcagcaacatcaatcaactacaacctcttatagcaacccatgcagacctactgcttaattctgcaagccagcattctccagacagcttgaagaattctttaaagatgctttcagaaaaaacagagctttttgtacatgccttcaaggatcaacttgtcaggagtgctcttttagcactctacactgcaaggccaggaggcattcttaagaagccaccctctcctaagagcagcmcagaggagagcagtccccaagaccaacccccagtgatgagagggcaggactccataccacatcattcagactatgatgaggaagagtgggacagggtgtgggccaatgtggggaagagcctgaactgcattattgctatggtggacaaactgattgaaagagatggtggcagtgaaggcagtggyrgcaacaatgatggagaaaaggaaccttcattaacagatgccattccctctcacccaagagaggactggtatgaacagttgtatcccctcatccttaccctgaaggactgcatgggagaagyggtgaaccgagccaagcagtccctgacatttgtgctccttcaggaacttgcgtacagcttgccccagtgtctgatgctgacgctaagaagagacatcgwcttcagccaagcacttgctggattggtttgtggttttatcatcaaattacagacaagtctgtatgacccaggcttcctacagcagcttcacacagtggggttgatagtacaatatgaaggactgctaagtacatacagygatgaaattggaatgctagaggacatggccgttggcatttccgatttaaagaaagtygcatttaaaataattgaagccaaatccaatgatgtgttgccagttataacaggaagacgagaacattaygtggtagaggtcaagcttccagccagaatgtttgagtcactacctctncagattaaagaaggacagttgcttcatgtgtatccagtactttttaatgttggaatcaatgaacagcaaactctggctgaaaggtttggagatgtctctttgcaagaaagtattaatcaggaaaacttcgaacttctacaagaatattacaagatatttatggaaaagatgcctcctgattatatttcacattttcaggaacaaaatgatttaaaagcattgctagaaaatctccttcaaaatatccaatccaaaaaaagaaagaatgtagaaattatgtggctggctgcaacgatttgccgcaaactgaatggtattcgtttcacctgttgtaaaagtgccaaagacaggacatcgatgtcagtgacacttgaacaatgctcaatcttgagagatgagcaccagttacacaaggacttctttatccgagcgctggattgcatgagaagagaaggatgccgcatagagaatgtactgaagaatatcaaatgcagaaagtatgctttcaacatgctacagctgatggctttccccaagtactacagacctccagaggggacttatggaaaagctgacacctaagtttaccaacatgttaataaacaggaacacaaatacatttcagttggataatcttcaccttggtcttttttgtttgtttttattgtcatgaatttgtggtgggggagatgatcacagatgtttcccaaaatctaggaactacttcaattcatcatcagcatattgctctgaaagaaatccattttaaaaaatcttacatgattcagtactgtcatttctagttctaagcttctatgtgttgagcctagctgattgagattggttcacaaagtgtaaatttcattcatgagtatttaaatgtttctgaggaaacatggatcatttcaataggactaggggtgattcacagagcaccactctccaaccaaatggaagagagga

SEQ ID NO: 3696 - DNA, 4861 bp, Homo sapiens
ccgggtcactgttaagggggccgccatggcccggctgtggggcgcgctgagtctttggccactgtgggcggccgtgccgtggggcggggcggcagccgtcggtgtccgggcttgcagctccacggccgccccggacggcgtcgagggcccggcgctgcggcgctcctattggcgccacctgaggcgtctggtgctgggtcctcccgaaccgccgttctcgcacgtgtgccaagtcggggacccggtgctgcgcggcgtggcggccccggtggagcgggcgcagctaggcgggcccgagctgcagcggctgacgcaacggctggtccaggtgatgcggcggcggcgctgcgtgggcctaagcgcgccgcagctgggggtgccgcggcaggtgctggcgctggagctccccgaggcgctgtgtcgggagtgcccgccccgccagcgcgcgctccgccaaatggagcccttycccctgcgcgtgttcgtgaaccccagcctgcgagtgcttgacagccgcctggtcacctttcccgagggctgcgagagcgtcgccggcttcctggcctgcgtgccccgcttccaggcggtgcagatctcagggctggaccccaatggagaacaggtggtgtggcaggcgagcgggtgggcagcccgcatcatccagcacgagatggaccacctgcagggctgcctgtttattgacaaaatggacagcaggacgttcacaaacgtctattggatgaaggtgaatgactaaagctttgctactggggctgaggattccggataccaagacgcaaacactttcactttgagctgggcaaatcttacttggcatcaacttggatggctcgcatatgacaggaaactggattgccaaggcatggcagactgagctggagkawgatgtcagaaatgtttgccctgaaatcagttacggacaaaatgttggctacaacttgaggagaaaaatcacccccaaaggagtggacatttcctaacaattctgtatggaggaaggtggggtaattgcattcgtctgcagtagacacgagttcctcggacctgtataatctcccaaagccaaggtttggtaataatgtagtccccaaatacctgaaagctgtctttaaaaatgcaggtaagcatgtgactggccatttgtgccgagttcttatttttacggagggcttgtggccttagacgccagtttgcttatggaaatgaaasagaatagtccctgttcaaggatgtgtttcatgacagcacgagtgtaaatgagtgcccacacattttaacagccttgggcaggattttgctgctgagatccctagagcagctggttcttggctcattcttggggtagaggccgtggatcagggctgggggcaggggtgacaattgagaagtgcactgagccctttcctgttaacaattgggcatagaaagcaggattagtacttcctggttatacacttattttgtaaaaatagaattaatatcacagcaaccaatgtgtaggtttaagaaagtggccaggtgcagtggttcacgcctgtaatcccagcactttgggagggcggggcgggtggatcacgaggtcaggagctcaagaccagcctggccaagatggtgaaaccctgtctctactaaagatacaaaaattagccgggcgtggtggcgagcacctgtaatcccagctactcgtgaagccaaggcagagaattacttgaacccaggaggcggaggttacagtgagctgagatcacgccactgcactccatccagcctgggcgacagagcgagactcaaaagtatgattctggctgtagagttttctttttttctctgtctcaaaaaaaaaaagtgtcagctttgtcttgtcaagaggtgaaggaacttgttttattcttttattttttttttaagatagagacgggggtcttactatgttgcccaggctggcctcaaattcctggtctcaggcaatcctcctgcctcggcctcccaaagtgctgggatcagttgtgagccacactacccagccaaactccagttttagttaaactgtttcacctcatttttatgctgagttttgtaaagtaggtwttcttgctgaacagagtcctgaaaatcaaactatacaagtagtaggaagtccattaagctgtttagaggaaaaagtgttataaatggcagttaaatgaacccaggaaagacccatcctcctttgtggctttctctgaggccccatgaggccaagcagaagcaaactggctctaggtgcagccagactttgaaaaggaatcccggccaggcttggtggctcatgcctgtaatcccagcactttgggaggtcaaggcaggcagatcacctgaggtcaggagttcaagaccagcctgccaatggggagatttgtagaaagctcatagatgctaaaaacatgggtctttaggaaaattagaattcagctgagcctcctttcatttggacaatgttcagaagctcttacagggggctatggcaatcttttgatgcttcttatagctttctgaggttaacgcttttgtggtgggcatcggtagcaataaaatgcaaactttattgcatttccagtaaaatctctcccactttgagcaggaagcactcacaaaaaacgcatatacatgtcaacgttgtgagctcatcagagttttagaaatcaacttccacagtgaaagccaatgtaggcagaaggtttataacagaatccccaggcagagaagtgaatttcagagcatttcagggaggaaactcctctgcacatgtcagcatgtttaacrtcgatgatggcaggttgtgtgctggcagccagagtctgaggccactgtccaaagttcagcgtcagtggttcctgttgctggtcatggagagagacaactggaaagtcaggtgtcttcacgctctaactagagcacagggatggaccatagccatgctaacctttgttaacccctaggacttgtcaaggtgtttaagcagtaggaatgaggaaacaacgttctgattcaagtaaatgtaactagaagtaaaaatttaaaaacttgtaagctcactaaagtgaagctctgcagacacggttcatatcctggtggctgagggcacataaccaagaacttamacaagcacccccaagccacaaagatcccagctgctatggttgaggggtaacctgccagcactggagccaagtgttggagctactgatccaaagttagctcacttctgcagaggctctgaaccagagcaaagaaatggcccagtgcaagcccagtgtgagccaagagttggccatgtaatcagttctggcccaaccaggtttgaaaggtagaggagcagtactgggttttggagagggaaggttggaacaaagccctttgcaggctataagcttcatttactaggccaggtctttctgtgtgaatgtgctttgactttggtctgtttatatgcatggggtaaacgtgggacagcctctgcagcttcactgcctgccggacgtgggtccagggctgccagctctgggtccttggtctgttgggggtcgcaaactgaaatggccatggggctatctgggcaggcaacacagatgagtggggatgggggaccccttctgtacagagcagcctctacttagtggccgctgacaggctgccccatgaggacgcaggcccaacattacctaatttaatcttctagaagtcagaattctgaatttttatgtcaactctcgactttttttttttttttgagacagagtcttgctctgtcgcccaggctggagtgcagtggcgcgatctcggctcactgcaagctccgtcccccgggttcacgccattctcctgcctcagcctcccaagtagctgggactgcaggcgcccaccaccacgcccggctaatttttttatttttagtgagacggggtttcactgtgttagccaggatgttctcgatttcctgaccttgtgatccgcccgcgtcggcctcccaaagtgctgggattacaggcgtgagccaccgcgcccagcaactctcgacttttaaatgttagcggcccaaagtgctgggattacaggcgtgagccaccgcgccyagcaactctcgacttttaaatgttagcggcagaccaaaccaaacaaacacagctgcaggacgggtctggtacgcagggctcccactttgcagtctctgatctgtaggccgaacaacggcaagaactgtctggatcccacaaacatccccagccaaacttctgaggccttaaggggaggaggccttgcacacctgactggagaacaggcctaagaactgcagtgttctgtttcctgctctgctttagaaaagagaggagacagaaaaccagagggtcttttaattggaagcaagggtggcccttcagagtctcagttaagagtcaaggaaagatgagatcacttgggtagctcaagaagggaaaaggatttattagaycatttccaggacagggacccaggggcagtggctgggttcagtgttctcacgctcagaggaagaaaaggcagtggtgaacacccgcctgactgccttaccctgatctaaacgacaccatctcctcccccaaggaagacacagccctggatgtgaacctaggagggtgggaatggcttatgtcactcggtctttgaggcagagcttgggctggggttgcaggggcatcagccaatctgctctcaaggagcaaaacttgggcgtaaaaggaacgggcagtggggctagccggctgtctggaggtctgggtgacctggcagcacggctgcttctcccccgccaccccgccccact

SEQ ID NO: 3697 - DNA, 3914 bp, Homo sapiens
taagttcggagtcagcgccccttgtggtccggaagggaagtgacgttgttgctgggaagatggcgaccgcggcgactatcccatcggtagccacggccacrgcagcggctctcggcgaggtggaggatgaagggctcctggcgtcgctgttccgggaccgcttccccgaggcccagtggcgcgagcggcccgatgtgggccgctacctccgggagttgagcggctcggggctggagcggctgcggcgcgagcccgagcgcctggcggaggagcgggcgcagctgctgcagcagacgcgcgacttggccttcgctaactacaagaccttcatccgcggcgccgagtgcaccgagcgcatccaccgcctgtttggcgacgtggaggcgtcgctcggccgcctgctcgaccgtttgcccagcttccagcagagctgcaggaactttgtgaaggaagccgaggagatcagctccaaccgccggatgaatagcctgaccctaaaccggcacacagaaattttggaaatactggagattcctcagctcatggacacctgtgtccggaacagttattatgaagaggccctggagcttgcagcctacgtacgccgactggagaggaaatactcttccatccctgycatccagggcatcgtgaacgaagtgcgccagtccatgcagctgatgctgagccagctgatccagcaactgaggaccaacatccagcttcctgcctgcctccgtgtcattggctacctgcggcgcatggacgtcttcactgaggctgagttgagggtgaagtttcttcaggcccgagatgcttggctccggtccatcctgactgccattcctaatgatgatccctatttccatattacaaaaaccatcgaggcctcccgtgtccatctctttgatatcatcacccagtaccgtgccatcttctcagacgaggacccactgctgccccctgccatgggtgagcacactgtgaatgagagtgccatcttccatggctgggtgctacagaaggtctcacaattcctgcaggtgctggagaccgacctttaccggggcataggcggccacctggactctctgctgggccagtgcatgtactttgggctgtccttcagccgggtgggagctgatttccggggtcagttggctcctgttttccagcgggtggccatcagcactttccagaaagcaattcaggaaacagtggagaaattccaggaagaaatgaactcctacatgctcatctcggctccagccatcctgggcaccagtaacatgcctgctgctgtgccagccacccagccggggacgctgcagccacccatggtgctcctagatttcccacccctcgcctgctttctcaacaatattctggttgccttcaatgatctgcgcctctgctgccctgtggccctggcgcaggatgtgactggggccttggaagatgcccttgccaaggtaactaaaataatcctggccttccatcgcgctgaagaggctgccttcagcagcggggagcaagagctctttgtccagttctgcactgtcttcctggaagaccttgttccgtatttaaatcgctgtctccaagtcckttttccaccagctcagatagcacagactttaggcattcctcccactcagctctccaagtacggtaacctagggcatgtgaacatcggcgccattcaggagcccctcgcctttatcctgccaaagagagagacgcttttcaccctggatgaccaggcgctggggcccgagctcacagctccagcaccagagcctcccgccgaggagccacgcctggagcccgcgggcccagcctgcccggagggagggcgagcggagacgcaggccgaaccgcccagcgtggggccctagccggcgtcccctgcctccagaacgcgggctggaccccaatggagaacaggtggtgtggcaggcgagcgggtgggcagcccgcatcatccagcacgagatggaccacctgcagggctgcctgtttattgacaaaatggacagcaggacgttcacaaacgtctattggatgaaggtgaatgactaaagctttgctactggggctgaggattccggataccaagacgcaaacactttcactttgagctgggcaaatcttacttggcatcaacttggatggctcgcatatgacaggaaactggattgccaaggcatggcagactgagctggagkawgatgtcagaaatgtttgccctgaaatcagttacggacaaaatgttggctacaacttgaggagaaaaatcacccccaaaggagtggacatttcctaacaattctgtatggaggaaggtggggtaattgcattcgtctgcagtagacacgagttcctcggacctgtataatctcccaaagccaaggtttggtaataatgtagtccccaaatacctgaaagctgtctttaaaaatgcaggtaagcatgtgactggccatttgtgccgagttcttatttttacggagggcttgtggccttagacgccagtttgcttatggaaatgaaasagaatagtccctgttcaaggatgtgtttcatgacagcacgagtgtaaatgagtgcccacacattttaacagccttgggcaggattttgctgctgagatccctagagcagctggttcttggctcattcttggggtagaggccgtggatcagggctgggggcaggggtgacaattgagaagtgcactgagccctttcctgttaacaattgggcatagaaagcaggattagtacttcctggttatacacttattttgtaaaaatagaattaatatcacagcaaccaatgtgtaggtttaagaaagtggccaggtgcagtggttcacgcctgtaatcccagcactttgggagggcggggcgggtggatcacgaggtcaggagctcaagaccagcctggccaagatggtgaaaccctgtctctactaaagatacaaaaattagccgggcgtggtggcgagcacctgtaatcccagctactcgtgaagccaaggcagagaattacttgaacccaggaggcggaggttacagtgagctgagatcacgccactgcactccatccagcctgggcgacagagcgagactcaaaagtatgattctggctgtagagttttctttttttctctgtctcaaaaaaaaaaagtgtcagctttgtcttgtcaagaggtgaaggaacttgttttattcttttattttttttttaagatagagacgggggtcttactatgttgcccaggctggcctcaaattcctggtctcaggcaatcctcctgcctcggcctcccaaagtgctgggatcagttgtgagccacactacccagccaaactccagttttagttaaactgtttcacctcatttttatgctgagttttgtaaagtaggtwttcttgctgaacagagtcctgaaaatcaaactatacaagtagtaggaagtccattaagctgtttagaggaaaaagtgttataaatggcagttaaatgaacccaggaaagacccatcctcctttgtggctttctctgaggccccatgaggccaagcagaagcaaactggctctaggtgcagccagactttgaaaaggaatcccggccaggcttggtggctcatgcctgtaatcccagcactttgggaggtcaaggcaggcagatcacctgaggtcaggagttcaagaccagcctggccaacatggcgaaacactgtttctactaaaaatatgaaaattagctgggtgtgctggtaggcgcctgtaatcacagctacttgggaggctgaggcgggagaatcgctcaaacctgggaggcagaggttgcagtgggctgagatctcgccactgtactccagcctgggcgacagaccaaggctctg

SEQ ID NO: 3698 - DNA, 1892 bp, Homo sapiens
taagttcggagtcagcgccccttgtggtccggaagggaagtgacgttgttgctgggaagatggcgaccgcggcgactatcccatcggtagccacggccacrgcagcggctctcggcgaggtggaggatgaagggctcctggcgtcgctgttccgggaccgcttccccgaggcccagtggcgcgagcggcccgatgtgggccgctacctccgggagttgagcggctcggggctggagcggctgcggcgcgagcccgagcgcctggcggaggagcgggcgcagctgctgcagcagacgcgcgacttggccttcgctaactacaagaccttcatccgcggcgccgagtgcaccgagcgcatccaccgcctgtttggcgacgtggaggcgtcgctcggccgcctgctcgaccgtttgcccagcttccagcagagctgcaggaactttgtgaaggaagccgaggagatcagctccaaccgccggatgaatagcctgaccctaaaccggcacacagaaattttggaaatactggagattcctcagctcatggacacctgtgtccggaacagttattatgaagaggccctggagcttgcagcctacgtacgccgactggagaggaaatactcttccatccctgycatccagggcatcgtgaacgaagtgcgccagtccatgcagctgatgctgagccagctgatccagcaactgaggaccaacatccagcttcctgcctgcctccgtgtcattggctacctgcggcgcatggacgtcttcactgaggctgagttgagggtgaagtttcttcaggcccgagatgcttggctccggtccatcctgactgccattcctaatgatgatccctatttccatattacaaaaaccatcgaggcctcccgtgtccatctctttgatatcatcacccagtaccgtgccatcttctcagacgaggacccactgctgccccctgccatgggtgagcacactgtgaatgagagtgccatcttccatggctgggtgctacagaaggtctcacaattcctgcaggtgctggagaccgacctttaccggggcataggcggccacctggactctctgctgggccagtgcatgtactttgggctgtccttcagccgggtgggagctgatttccggggtcagttggctcctgttttccagcgggtggccatcagcactttccagaaagcaattcaggaaacagtggagaaattccaggaagaaatgaactcctacatgctcatctcggctccagccatcctgggcaccagtaacatgcctgctgctgtgccagccacccagccggggacgctgcagccacccatggtgctcctagatttcccacccctcgcctgctttctcaacaatattctggttgccttcaatgatctgcgcctctgctgccctgtggccctggcgcaggatgtgactggggccttggaagatgcccttgccaaggtaactaaaataatcctggccttccatcgcgctgaagaggctgccttcagcagcggggagcaagagctctttgtccagttctgcactgtcttcctggaagaccttgttccgtatttaaatcgctgtctccaagtcckttttccaccagctcagatagcacagactttagggcatgtgaacatcggcgccattcaggagcccctcgcctttatcctgccaaagagagagacgcttttcaccctggatgaccaggcgctggggcccgagctcacagctccagcaccagagcctcccgccgaggagccacgcctggagcccgcgggcccagcctgcccggagggagggcgagcggagacgcaggccgaaccgcccagcgtggggccctagccggcgtcccctgcctccagaacgcggtgcgtg

SEQ ID NO: 3699 - DNA, 6186 bp, Homo sapiens
taagttcggagtcagcgccccttgtggtccggaagggaagtgacgttgttgctgggaagatggcgaccgcggcgactatcccatcggtagccacggccacrgcagcggctctcggcgaggtggaggatgaagggctcctggcgtcgctgttccgggaccgcttccccgaggcccagtggcgcgagcggcccgatgtgggccgctacctccgggagttgagcggctcggggctggagcggctgcggcgcgagcccgagcgcctggcggaggagcgggcgcagctgctgcagcagacgcgcgacttggccttcgctaactacaagaccttcatccgcggcgccgagtgcaccgagcgcatccaccgcctgtttggcgacgtggaggcgtcgctcggccgcctgctcgaccgtttgcccagcttccagcagagctgcaggaactttgtgaaggaagccgaggagatcagctccaaccgccggatgaatagcctgaccctaaaccggcacacagaaattttggaaatactggagattcctcagctcatggacacctgtgtccggaacagttattatgaagaggccctggagcttgcagcctacgtacgccgactggagaggaaatactcttccatccctgycatccagggcatcgtgaacgaagtgcgccagtccatgcagctgatgctgagccagctgatccagcaactgaggaccaacatccagcttcctgcctgcctccgtgtcattggctacctgcggcgcatggacgtcttcactgaggctgagttgagggtgaagtttcttcaggcccgagatgcttggctccggtccatcctgactgccattcctaatgatgatccctatttccatattacaaaaaccatcgaggcctcccgtgtccatctctttgatatcatcacccagtaccgtgccatcttctcagacgaggacccactgctgccccctgccatgggtgagcacactgtgaatgagagtgccatcttccatggctgggtgctacagaaggtctcacaattcctgcaggtgctggagaccgacctttaccggggcataggcggccacctggactctctgctgggccagtgcatgtactttgggctgtccttcagccgggtgggagctgatttccggggtcagttggctcctgttttccagcgggtggccatcagcactttccagaaagcaattcaggaaacagtggagaaattccaggaagaaatgaactcctacatgctcatctcggctccagccatcctgggcaccagtaacatgcctgctgctgtgccagccacccagccggggacgctgcagccacccatggtgctcctagatttcccacccctcgcctgctttctcaacaatattctggttgccttcaatgatctgcgcctctgctgccctgtggccctggcgcaggatgtgactggggccttggaagatgcccttgccaaggtaactaaaataatcctggccttccatcgcgctgaagaggctgccttcagcagcggggagcaagagctctttgtccagttctgcactgtcttcctggaagaccttgttccgtatttaaatcgctgtctccaagtcckttttccaccagctcagatagcacagactttaggcattcctcccactcagctctccaagtacggtaacctagggcatgtgaacatcggcgccattcaggagcccctcgcctttatcctgccaaagagagagacgcttttcaccctggatgaccaggcgctggggcccgagctcacagctccagcaccagagcctcccgccgaggagccacgcctggagcccgcgggcccagcctgcccggagggagggcgagcggagacgcaggccgaaccgcccagcgtggggccctagccggcgtcccctgcctccagaacgcgggctggaccccaatggagaacaggtggtgtggcaggcgagcgggtgggcagcccgcatcatccagcacgagatggaccacctgcagggctgcctgtttattgacaaaatggacagcaggacgttcacaaacgtctattggatgaaggtgaatgactaaagctttgctactggggctgaggattccggataccaagacgcaaacactttcactttgagctgggcaaatcttacttggcatcaacttggatggctcgcatatgacaggaaactggattgccaaggcatggcagactgagctggagkawgatgtcagaaatgtttgccctgaaatcagttacggacaaaatgttggctacaacttgaggagaaaaatcacccccaaaggagtggacatttcctaacaattctgtatggaggaaggtggggtaattgcattcgtctgcagtagacacgagttcctcggacctgtataatctcccaaagccaaggtttggtaataatgtagtccccaaatacctgaaagctgtctttaaaaatgcaggtaagcatgtgactggccatttgtgccgagttcttatttttacggagggcttgtggccttagacgccagtttgcttatggaaatgaaasagaatagtccctgttcaaggatgtgtttcatgacagcacgagtgtaaatgagtgcccacacattttaacagccttgggcaggattttgctgctgagatccctagagcagctggttcttggctcattcttggggtagaggccgtggatcagggctgggggcaggggtgacaattgagaagtgcactgagccctttcctgttaacaattgggcatagaaagcaggattagtacttcctggttatacacttattttgtaaaaatagaattaatatcacagcaaccaatgtgtaggtttaagaaagtggccaggtgcagtggttcacgcctgtaatcccagcactttgggagggcggggcgggtggatcacgaggtcaggagctcaagaccagcctggccaagatggtgaaaccctgtctctactaaagatacaaaaattagccgggcgtggtggcgagcacctgtaatcccagctactcgtgaagccaaggcagagaattacttgaacccaggaggcggaggttacagtgagctgagatcacgccactgcactccatccagcctgggcgacagagcgagactcaaaagtatgattctggctgtagagttttctttttttctctgtctcaaaaaaaaaaagtgtcagctttgtcttgtcaagaggtgaaggaacttgttttattcttttattttttttttaagatagagacgggggtcttactatgttgcccaggctggcctcaaattcctggtctcaggcaatcctcctgcctcggcctcccaaagtgctgggatcagttgtgagccacactacccagccaaactccagttttagttaaactgtttcacctcatttttatgctgagttttgtaaagtaggtwttcttgctgaacagagtcctgaaaatcaaactatacaagtagtaggaagtccattaagctgtttagaggaaaaagtgttataaatggcagttaaatgaacccaggaaagacccatcctcctttgtggctttctctgaggccccatgaggccaagcagaagcaaactggctctaggtgcagccagactttgaaaaggaatcccggccaggcttggtggctcatgcctgtaatcccagcactttgggaggtcaaggcaggcagatcacctgaggtcaggagttcaagaccagcctgccaatggggagatttgtagaaagctcatagatgctaaaaacatgggtctttaggaaaattagaattcagctgagcctcctttcatttggacaatgttcagaagctcttacagggggctatggcaatcttttgatgcttcttatagctttctgaggttaacgcttttgtggtgggcatcggtagcaataaaatgcaaactttattgcatttccagtaaaatctctcccactttgagcaggaagcactcacaaaaaacgcatatacatgtcaacgttgtgagctcatcagagttttagaaatcaacttccacagtgaaagccaatgtaggcagaaggtttataacagaatccccaggcagagaagtgaatttcagagcatttcagggaggaaactcctctgcacatgtcagcatgtttaacrtcgatgatggcaggttgtgtgctggcagccagagtctgaggccactgtccaaagttcagcgtcagtggttcctgttgctggtcatggagagagacaactggaaagtcaggtgtcttcacgctctaactagagcacagggatggaccatagccatgctaacctttgttaacccctaggacttgtcaaggtgtttaagcagtaggaatgaggaaacaacgttctgattcaagtaaatgtaactagaagtaaaaatttaaaaacttgtaagctcactaaagtgaagctctgcagacacggttcatatcctggtggctgagggcacataaccaagaacttamacaagcacccccaagccacaaagatcccagctgctatggttgaggggtaacctgccagcactggagccaagtgttggagctactgatccaaagttagctcacttctgcagaggctctgaaccagagcaaagaaatggcccagtgcaagcccagtgtgagccaagagttggccatgtaatcagttctggcccaaccaggtttgaaaggtagaggagcagtactgggttttggagagggaaggttggaacaaagccctttgcaggctataagcttcatttactaggccaggtctttctgtgtgaatgtgctttgactttggtctgtttatatgcatggggtaaacgtgggacagcctctgcagcttcactgcctgccggacgtgggtccagggctgccagctctgggtccttggtctgttgggggtcgcaaactgaaatggccatggggctatctgggcaggcaacacagatgagtggggatgggggaccccttctgtacagagcagcctctacttagtggccgctgacaggctgccccatgaggacgcaggcccaacattacctaatttaatcttctagaagtcagaattctgaatttttatgtcaactctcgactttttttttttttttgagacagagtcttgctctgtcgcccaggctggagtgcagtggcgcgatctcggctcactgcaagctccgtcccccgggttcacgccattctcctgcctcagcctcccaagtagctgggactgcaggcgcccaccaccacgcccggctaatttttttatttttagtgagacggggtttcactgtgttagccaggatgttctcgatttcctgaccttgtgatccgcccgcgtcggcctcccaaagtgctgggattacaggcgtgagccaccgcgcccagcaactctcgacttttaaatgttagcggcccaaagtgctgggattacaggcgtgagccaccgcgccyagcaactctcgacttttaaatgttagcggcagaccaaaccaaacaaacacagctgcaggacgggtctggtacgcagggctcccactttgcagtctctgatctgtaggccgaacaacggcaagaactgtctggatcccacaaacatccccagccaaacttctgaggccttaaggggaggaggccttgcacacctgactggagaacaggcctaagaactgcagtgttctgtttcctgctctgctttagaaaagagaggagacagaaaaccagagggtcttttaattggaagcaagggtggcccttcagagtctcagttaagagtcaaggaaagatgagatcacttgggtagctcaagaagggaaaaggatttattagaycatttccaggacagggacccaggggcagtggctgggttcagtgttctcacgctcagaggaagaaaaggcagtggtgaacacccgcctgactgccttaccctgatctaaacgacaccatctcctcccccaaggaagacacagccctggatgtgaacctaggagggtgggaatggcttatgtcactcggtctttgaggcagagcttgggctggggttgcaggggcatcagccaatctgctctcaaggagcaaaacttgggcgtaaaaggaacgggcagtggggctagccggctgtctggaggtctgggtgacctggcagcacggctgcttctcccccgccaccccgccccact

SEQ ID NO: 3700 - DNA, 2589 bp, Homo sapiens
ccgggtcactgttaagggggccgccatggcccggctgtggggcgcgctgagtctttggccactgtgggcggccgtgccgtggggcggggcggcagccgtcggtgtccgggcttgcagctccacggccgccccggacggcgtcgagggcccggcgctgcggcgctcctattggcgccacctgaggcgtctggtgctgggtcctcccgaaccgccgttctcgcacgtgtgccaagtcggggacccggtgctgcgcggcgtggcggccccggtggagcgggcgcagctaggcgggcccgagctgcagcggctgacgcaacggctggtccaggtgatgcggcggcggcgctgcgtgggcctaagcgcgccgcagctgggggtgccgcggcaggtgctggcgctggagctccccgaggcgctgtgtcgggagtgcccgccccgccagcgcgcgctccgccaaatggagcccttycccctgcgcgtgttcgtgaaccccagcctgcgagtgcttgacagccgcctggtcacctttcccgagggctgcgagagcgtcgccggcttcctggcctgcgtgccccgcttccaggcggtgcagatctcagggctggaccccaatggagaacaggtggtgtggcaggcgagcgggtgggcagcccgcatcatccagcacgagatggaccacctgcagggctgcctgtttattgacaaaatggacagcaggacgttcacaaacgtctattggatgaaggtgaatgactaaagctttgctactggggctgaggattccggataccaagacgcaaacactttcactttgagctgggcaaatcttacttggcatcaacttggatggctcgcatatgacaggaaactggattgccaaggcatggcagactgagctggagkawgatgtcagaaatgtttgccctgaaatcagttacggacaaaatgttggctacaacttgaggagaaaaatcacccccaaaggagtggacatttcctaacaattctgtatggaggaaggtggggtaattgcattcgtctgcagtagacacgagttcctcggacctgtataatctcccaaagccaaggtttggtaataatgtagtccccaaatacctgaaagctgtctttaaaaatgcaggtaagcatgtgactggccatttgtgccgagttcttatttttacggagggcttgtggccttagacgccagtttgcttatggaaatgaaasagaatagtccctgttcaaggatgtgtttcatgacagcacgagtgtaaatgagtgcccacacattttaacagccttgggcaggattttgctgctgagatccctagagcagctggttcttggctcattcttggggtagaggccgtggatcagggctgggggcaggggtgacaattgagaagtgcactgagccctttcctgttaacaattgggcatagaaagcaggattagtacttcctggttatacacttattttgtaaaaatagaattaatatcacagcaaccaatgtgtaggtttaagaaagtggccaggtgcagtggttcacgcctgtaatcccagcactttgggagggcggggcgggtggatcacgaggtcaggagctcaagaccagcctggccaagatggtgaaaccctgtctctactaaagatacaaaaattagccgggcgtggtggcgagcacctgtaatcccagctactcgtgaagccaaggcagagaattacttgaacccaggaggcggaggttacagtgagctgagatcacgccactgcactccatccagcctgggcgacagagcgagactcaaaagtatgattctggctgtagagttttctttttttctctgtctcaaaaaaaaaaagtgtcagctttgtcttgtcaagaggtgaaggaacttgttttattcttttattttttttttaagatagagacgggggtcttactatgttgcccaggctggcctcaaattcctggtctcaggcaatcctcctgcctcggcctcccaaagtgctgggatcagttgtgagccacactacccagccaaactccagttttagttaaactgtttcacctcatttttatgctgagttttgtaaagtaggtwttcttgctgaacagagtcctgaaaatcaaactatacaagtagtaggaagtccattaagctgtttagaggaaaaagtgttataaatggcagttaaatgaacccaggaaagacccatcctcctttgtggctttctctgaggccccatgaggccaagcagaagcaaactggctctaggtgcagccagactttgaaaaggaatcccggccaggcttggtggctcatgcctgtaatcccagcactttgggaggtcaaggcaggcagatcacctgaggtcaggagttcaagaccagcctggccaacatggcgaaacactgtttctactaaaaatatgaaaattagctgggtgtgctggtaggcgcctgtaatcacagctacttgggaggctgaggcgggagaatcgctcaaacctgggaggcagaggttgcagtgggctgagatctcgccactgtactccagcctgggcgacagaccaaggctctg

SEQ ID NO: 3701 - DNA, 5471 bp, Homo sapiens
gaatttagatagaaacttagcaatgctttttgacagcaggtaacttggtgagtctggaagccaggtgagactgctaacctgtctgaaggtgagtgtgtcatttgagaaagaaagaaggaaaaggaacattaaatgacttaggttcctgttctactggtctcatcttagtcattatctcatttactttatacagccacctgggaggtaagtgttatttttaccattaggtagaagaggaaaaggaggttaagtaagctgcccaagacctccagttagwatgcastggagctaagacctgaacctaaacccatatggtttccatcccatgctctcttcttattaaacctatgctaactctcaccaaacttttaagcataagtgcaaaccataatcttctgagtccatgtcatacatccttatattttactcttttctctaaatctcctctcctggctttcctgcagtcactgtgctttgcaggccagctgcctctaggactcttagaatacaatggtgcttttgtacaaccttgattttgagcatgtggttcctcctttgactcagctgaaaaatttctaaagcagttaactatatgttactggattatacttagatttctactacaacattattttgtcaaaactcgtactctcacgtgtgagaagcattgtgtcaaacaaaatggagtacattttttcaataacaacttcttagagcaaacctgtactgagaagaaagtatagttgccaaatgtatgtggtgatcagaaatctggaagaacccttattaatgtcttgtattacttgaaaatgctgataaaatatgttagcctgcttataatcatttttatttttggagagttgttttttacaatagcagtaacttgaaccataaaatactttgtttcaataacatggtatgaataatgcccaaagtttaagagttagtattcatcaagtgatggtgaataaatctatgaccgaggtagaattctgggctcaataaaatctacctctgctattatgtatttcaaaatgagaaaacactcaactagatttggtgaaaactaaactcctgtttagtttaatagttaagagagtctccattgatgaggtgcattctggattatccatttgtttttatatcttttattttcctattctcacttcccatgacaygatatacattacaattgtttttagaaaaataaagtttaccatctcatgattcatttagatcctggctatacamgttatttctcatgttgatttaaaactaatttttrtatacttcttataacaacacactgtcttattggatcttcaggaaacagacgtggtaccagacaccaggcttttagacaaatttagtcagattacacctcggctctttatgccactagatgagaccatccaaaatccaccaatggaaactttgtacattatcgactttttcattgcattggcaatttgcaacacagtagtggtttctgctcctaaccaaccccgacaaaagatcagacacccttcactgggggggttgcccattaagtctttggaagagattaaaagtcttttccagagatggtctgtccgaagatcaagttctccatcgcttaacagtgggaaagagccatcttctggagttccaaacgcctttgtgagcagactccctctctttagtcgaatgaaaccagcttcacctgtggaggaagaggtctcccaggtgtgtgagagcccccagtgctccagtagctcagcttgctgcacagaaacagagaaacaacacggtgatgcaggcctcctgaatggcaaggcagagtccctccctggacagmcattggcctgcarcctgtgttatgaggccgagagcccagacgaagcggccttagtgtatgccgccagggcttaccaatgcactttacggtctcggacaccagagcaggtcatggtggactttgctgctttgggaccattaacatttcaactcctacacatmctgccctttgactcagtaagaaaaagaatgtctgttgtggtccgacaccctctttccaatcaagttgtggtgtatacgaaaggcgctgattctgtgatcatggagttactgtcggtggcttccccagatggagcaagtctggagaaacaacagatgatagtaagggagaaaacccagaagcacttggatgactatgccaaacaaggccttcgtactttatgtatagcaaagaaggtcatgagtgacactgaatatgcagagtggctgaggaatcattttttagctgaaaccagcattgacaacagggaagaattactacttgaatctgccatgaggttggagaacaaacttacattacttggtgctactggcattgaagaccgtctgcaggagggagtccctgaatctatagaagctcttcacaaagcgggcatcaagatctggatgctgacaggggacaagcaggagacagctgtcaacatagcttatgcatgcaaactaytggagccagatgacaagctttttatcctcaatacccaaagtaaagatgcctgtgggatgctgatgarcacaattttgaaagaacttcagaagaaaactcaagccctgccagagcaagtgtcattaagtgaagatttacttcagcctcctgtcccccgggactcagggttacgagctggactcattatcactgggaagaccctggagtttgccctgcaagaaagtctgcaaaagcagttcctggaactgacatcttggtgtcaagctgtggtctgctgccgagccacaccgctgcagaaaagtgaagtggtgaaattggtccgcagccatctccaggtgatgacccttgctattggtgatggtgccaatgatgttagcatgatacaagtggcagacattgggataggggtctcaggtcaagaaggcatgcaggctgtgatggccagtgactttgccgtttctcagttcaaacatctcagcaagctccttcttgtccatggacactggtgttatacacggctttccaacatgattctctattttttctataagaatgtggcctatgtgaacctccttttctggtaccagttcttttgtggattttcaggaacatccatgactgattactgggttttgatcttcttcaacctcctcttcacatctgcccctcctgtcatttatggtgttttggagaaagatgtgtctgcagagaccctcatgcaactgcctgaactttacaraagtggtcagaaatcagaggcatacttaccccataccttctggatcaccttattggatgctttttatcaaagcctggtctgcttctttgtgccttattttacctaccagggctcagatactgacatctttgcatttggaaaccccctgaacacagccgctctgttcatcrttctcctccatctggtcattgaaagcaagagtttgacttggattcacttgctggtcatcattggtagcatcttgtcttattttttatttgccatagtttttggagccatgtgtgtaacttgcaacccaccatccaacccttactggattatgcaggagcacatgctggatccagtattctacttagtttgtatcctcacgacrtccattgctcttctgcccaggtttgtatacagagttcttcagggatccctgtttccatctccaattctgagagctaagcactttgacagactaactccagaggagaggactaaagctctcaagaagtggagaggggctggaaagatgaatcaagtgacatcaaagtatgctaaccaatcagctggcaagtcaggaagaagacccatgcctggcccttctgctgtatttgcaatgaagtcagcaasttcctgtgstattgagcaaggaaacttatctctgtgtgaaactgctttagatcaaggctactctgaaactaaggcctttgagatggctggaccctccaaaggtaaagaaagctagataccctccttggagttgcaagtattctttcaaggttggaagagggattttgaagaggtatctctccaagcaagaatgacttgtttttccataagggacatgagcattttactaggcttggaagagctgacatratgagcattattgtatgtttgtatatacatttgtgatagagggctagagtttgacctagagagagtttaaggaagtgaaatatttaattcagaaccaaatgcttttgtaaaactttttggattttgtaaaagcattttcattctcttagaaattcaagtattttcaaggggagtcatttgagatatatttattttactaggagatcttatattctagggaaatgctttaaatggtcaggctccartcggaatttttttaagaaaaaagtagtttttaatacattggttaggactcagaggaaatacggaaaaaacattgtagatggttaatttacagataaaatcccaagagccttttaaacaacaaggtacctaaaatagggtataattatactgcttaaaatacagttagtgcctattaatagctttttatttcctatgggragatgcttttggtcttctggctgaagatgtaggcatacctctcactcatttcaatgttttcctgaggtggagccttcattggaaaggggaaagagggattctagggtttcatcagggaccaggaatgcattcctctgtcaggttccaatcaagagaagaccttttatgagatctgcctctgtatagatgttgtcagttaggaaactgaagccataggtcaggcagacrtcagctcagcctgtgrcccattgggtgatttcctgtattttaaaactgacagtagcctgatcaaagtgatacaatcaatttcaaaacaatcttccagagaccacttgaaggttcatagtttttacaataccctgagacttttcaggtgttggagcctctaaaatatgagatataaacagaaactaatacaagttgttctctggaggtttctatgaggttcttagaaaaatttggttttaaaatcatttgaggacaggaatgtctatagcaagtttactcctattgcgaatcatgtatgctggctttagttgtaacaaacgattttattctaagtaaggccaggtgctactataaaatcatatattcctgttgaagttcttttgaagtcctatctctatttattatatttgaaagttgtcagccaccagtcatccagaatttccttcctgaatctccatgctcatatgcaatgtctacatcaaggtcttcttaatgactattattctcagggtttagttttctaccttctgcctactattttggtctgacatttttgtagccttctgttattaytggaaatagtctcttacataagctgatttcgagaactttcaaaatctcacatagctaatggaagttgctttctgctttcttatgactgtttttataaataaactgtttcataaataatgt

SEQ ID NO: 3702 - DNA, 4280 bp, Homo sapiens
tgcaggacagttcataatgggcctttgggaartaagccctcaaatcatcttgctgggagctcttttactctaggaagtggagaaggagccagtgaagtgcctcattccagacaggctgctttcagtagccccattgaaacagacgtggtaccagacaccaggcttttagacaaatttagtcagattacacctcggctctttatgccactagatgagaccatccaaaatccaccaatggaaactttgtacattatcgactttttcattgcattggcaatttgcaacacagtagtggtttctgctcctaaccaaccccgacaaaagatcagacacccttcactgggggggttgcccattaagtctttggaagagattaaaagtcttttccagagatggtctgtccgaagatcaagttctccatcgcttaacagtgggaaagagccatcttctggagttccaaacgcctttgtgagcagactccctctctttagtcgaatgaaaccagcttcacctgtggaggaagaggtctcccaggtgtgtgagagcccccagtgctccagtagctcagcttgctgcacagaaacagagaaacaacacggtgatgcaggcctcctgaatggcaaggcagagtccctccctggacagmcattggcctgcarcctgtgttatgaggccgagagcccagacgaagcggccttagtgtatgccgccagggcttaccaatgcactttacggtctcggacaccagagcaggtcatggtggactttgctgctttgggaccattaacatttcaactcctacacatmctgccctttgactcagtaagaaaaagaatgtctgttgtggtccgacaccctctttccaatcaagttgtggtgtatacgaaaggcgctgattctgtgatcatggagttactgtcggtggcttccccagatggagcaagtctggagaaacaacagatgatagtaagggagaaaacccagaagcacttggatgactatgccaaacaaggccttcgtactttatgtatagcaaagaaggtcatgagtgacactgaatatgcagagtggctgaggaatcattttttagctgaaaccagcattgacaacagggaagaattactacttgaatctgccatgaggttggagaacaaacttacattacttggtgctactggcattgaagaccgtctgcaggagggagtccctgaatctatagaagctcttcacaaagcgggcatcaagatctggatgctgacaggggacaagcaggagacagctgtcaacatagcttatgcatgcaaactaytggagccagatgacaagctttttatcctcaatacccaaagtaaagatgcctgtgggatgctgatgarcacaattttgaaagaacttcagaagaaaactcaagccctgccagagcaagtgtcattaagtgaagatttacttcagcctcctgtcccccgggactcagggttacgagctggactcattatcactgggaagaccctggagtttgccctgcaagaaagtctgcaaaagcagttcctggaactgacatcttggtgtcaagctgtggtctgctgccgagccacaccgctgcagaaaagtgaagtggtgaaattggtccgcagccatctccaggtgatgacccttgctattggtgatggtgccaatgatgttagcatgatacaagtggcagacattgggataggggtctcaggtcaagaaggcatgcaggctgtgatggccagtgactttgccgtttctcagttcaaacatctcagcaagctccttcttgtccatggacactggtgttatacacggctttccaacatgattctctattttttctataagaatgtggcctatgtgaacctccttttctggtaccagttcttttgtggattttcaggaacatccatgactgattactgggttttgatcttcttcaacctcctcttcacatctgcccctcctgtcatttatggtgttttggagaaagatgtgtctgcagagaccctcatgcaactgcctgaactttacaraagtggtcagaaatcagaggcatacttaccccataccttctggatcaccttattggatgctttttatcaaagcctggtctgcttctttgtgccttattttacctaccagggctcagatactgacatctttgcatttggaaaccccctgaacacagccgctctgttcatcrttctcctccatctggtcattgaaagcaagagtttgacttggattcacttgctggtcatcattggtagcatcttgtcttattttttatttgccatagtttttggagccatgtgtgtaacttgcaacccaccatccaacccttactggattatgcaggagcacatgctggatccagtattctacttagtttgtatcctcacgacrtccattgctcttctgcccaggtttgtatacagagttcttcagggatccctgtttccatctccaattctgagagctaagcactttgacagactaactccagaggagaggactaaagctctcaagaagtggagaggggctggaaagatgaatcaagtgacatcaaagtatgctaaccaatcagctggcaagtcaggaagaagacccatgcctggcccttctgctgtatttgcaatgaagtcagcaasttcctgtgstattgagcaaggaaacttatctctgtgtgaaactgctttagatcaaggctactctgaaactaaggcctttgagatggctggaccctccaaaggtaaagaaagctagataccctccttggagttgcaagtattctttcaaggttggaagagggattttgaagaggtatctctccaagcaagaatgacttgtttttccataagggacatgagcattttactaggcttggaagagctgacatratgagcattattgtatgtttgtatatacatttgtgatagagggctagagtttgacctagagagagtttaaggaagtgaaatatttaattcagaaccaaatgcttttgtaaaactttttggattttgtaaaagcattttcattctcttagaaattcaagtattttcaaggggagtcatttgagatatatttattttactaggagatcttatattctagggaaatgctttaaatggtcaggctccartcggaatttttttaagaaaaaagtagtttttaatacattggttaggactcagaggaaatacggaaaaaacattgtagatggttaatttacagataaaatcccaagagccttttaaacaacaaggtacctaaaatagggtataattatactgcttaaaatacagttagtgcctattaatagctttttatttcctatgggragatgcttttggtcttctggctgaagatgtaggcatacctctcactcatttcaatgttttcctgaggtggagccttcattggaaaggggaaagagggattctagggtttcatcagggaccaggaatgcattcctctgtcaggttccaatcaagagaagaccttttatgagatctgcctctgtatagatgttgtcagttaggaaactgaagccataggtcaggcagacrtcagctcagcctgtgrcccattgggtgatttcctgtattttaaaactgacagtagcctgatcaaagtgatacaatcaatttcaaaacaatcttccagagaccacttgaaggttcatagtttttacaataccctgagacttttcaggtgttggagcctctaaaatatgagatataaacagaaactaatacaagttgttctctggaggtttctatgaggttcttagaaaaatttggttttaaaatcatttgaggacaggaatgtctatagcaagtttactcctattgcgaatcatgtatgctggctttagttgtaacaaacgattttattctaagtaaggccaggtgctactataaaatcatatattcctgttgaagttcttttgaagtcctatctctatttattatatttgaaagttgtcagccaccagtcatccagaatttccttcctgaatctccatgctcatatgcaatgtctacatcaaggtcttcttaatgactattattctcagggtttagttttctaccttctgcctactattttggtctgacatttttgtagccttctgttattaytggaaatagtctcttacataagctgatttcgagaactttcaaaatctcacatagctaatggaagttgctttctgctttcttatgactgtttttataaataaactgtttcataaataatgt

SEQ ID NO: 3703 - DNA, 5291 bp, Homo sapiens
gaaccaaaccgtcaaccgcgagcaacctgtacttgggaggtgaaagtcagaggaaggcaccggattgttgttccccacatccagcccttcaaggatgagtatgagaagttctccggagcctatgtgaacaatcgaatacgaacaacaaagtacacacttctgaattttgtgccaagaaatttatttgaacaatttcacagagctgccaatttatatttcctgttcctagttgtcctgaactgggtacctttggtagaagccttccaaaaggaaatcaccatgttgcctctggtggtggtccttacaattatcgcaattaaagatggcctggaagattatcggaaatacaaaattgacaaacagatcaataatttaataactaaagtttatagtagaggaaaacaaaaacgtataagccattgtcaacccaggagccgacaaagcaaaagcttctgtaactcatgtataagtggaattaaaagaattaaacttcagggccgggcgtggaggctgaggcaggagaatcgcttgaacccaggagggggaggttgcagtgagccgagatcgcaccactgcactccagccactgcattccatcctgggcgacagagtgagactctatctcaaaaaaaaaaaaaaaaggaggagaatattcttttttggaaagagaaaaaatacattgaccgatgctggaaagacgttactgttggggactttattcgcctctcctgcaacgaggtcatccctgcagacatggtactactcttttccactgatccagatggaatctgtcacattgagacttctggtcttgatggagagagcaatttaaaacagaggcaggtggttcggggatatgcagaacagagatttgaaaactttcttgtgaaatgcctttttactccaagtcaaaaacattcaagggccatgagatttatttttatatccccacttttgctgtttaaaagtgaatttatatgctgtctttcttatagagaacattccaacaaagaacgcgtgggtctcagtaaagaaaatttgttgcttagaggatgcaccattagaaacacagaggctgttgtgggcattgtggtttatgcaggccatgaaaccaaagcaatgctgaacaacagtgggccacggtataagcgcagcaaattagaaagaagagcaaacayagatgtcctctggtgtgtcatgcttctggtcataatgtgcttaactggcrcagtaggtaggtatgaaaagatgcattttttcaatgttcccgagcctgatggacatatcatatcaccactgttggcaggattttatatgttttggaccatgatcattttgttacaggtcttgattcctatttctctctatgtttccatcgaaattgtgaagcttggacaaatatatttcattcaaagtgatgtggatttctacaatgaaaaaatggattctattgttcagtgccgagccctgaacatcgccgaggatctgggacagattcagtacctcttttccgataagacaggaaccctcactgagaataagatggtttttcgaagatgtagtgtggcaggatttgattactgccatgaagaaaatggtgagactgctaacctgtctgaagcttcacctgtggaggaagaggtctcccaggtgtgtgagagcccccagtgctccagtagctcagcttgctgcacagaaacagagaaacaacacggtgatgcaggcctcctgaatggcaaggcagagtccctccctggacagmcattggcctgcarcctgtgttatgaggccgagagcccagacgaagcggccttagtgtatgccgccagggcttaccaatgcactttacggtctcggacaccagagcaggtcatggtggactttgctgctttgggaccattaacatttcaactcctacacatmctgccctttgactcagtaagaaaaagaatgtctgttgtggtccgacaccctctttccaatcaagttgtggtgtatacgaaaggcgctgattctgtgatcatggagttactgtcggtggcttccccagtaagggagaaaacccagaagcacttggatgactatgccaaacaaggccttcgtactttatgtatagcaaagaaggtcatgagtgacactgaatatgcagagtggctgaggaatcattttttagctgaaaccagcattgacaacagggaagaattactacttgaatctgccatgaggttggagaacaaacttacattacttggtgctactggcattgaagaccgtctgcaggagggagtccctgaatctatagaagctcttcacaaagcgggcatcaagatctggatgctgacaggggacaagcaggagacagctgtcaacatagcttatgcatgcaaactaytggagccagatgacaagctttttatcctcaatacccaaaagcaagtgtcattaagtgaagatttacttcagcctcctgtcccccgggactcagggttacgagctggactcattatcactgggaagaccctggagtttgccctgcaagaaagtctgcaaaagcagttcctggaactgacatcttggtgtcaagctgtggtctgctgccgagccacaccgctgcagaaaagtgaagtggtgaaattggtccgcagccatctccaggtgatgacccttgctattggtgatggtgccaatgatgttagcatgatacaagtggcagacattgggataggggtctcaggtcaagaaggcatgcaggctgtgatggccagtgactttgccgtttctcagttcaaacatctcagcaagctccttcttgtccatggacactggtgttatacacggctttccaacatgattctctattttttctataagaatgtggcctatgtgaacctccttttctggtaccagttcttttgtggattttcaggaacatccatgactgattactgggttttgatcttcttcaacctcctcttcacatctgcccctcctgtcatttatggtgttttggagaaagatgtgtctgcagagaccctcatgcaactgcctgaactttacaraagtggtcagaaatcagaggcatacttaccccataccttctggatcaccttattggatgctttttatcaaagcctggtctgcttctttgtgccttattttacctaccagggctcagatactgacatctttgcatttggaaaccccctgaacacagccgctctgttcatcrttctcctccatctggtcattgaaagcaagagtttgacttggattcacttgctggtcatcattggtagcatcttgtcttattttttatttgccatagtttttggagccatgtgtgtaacttgcaacccaccatccaacccttactggattatgcaggagcacatgctggatccagtattctacttagtttgtatcctcacgacrtccattgctcttctgcccaggtttgtatacagagttcttcagggatccctgtttccatctccaattctgagagctaagcactttgacagactaactccagaggagaggactaaagctctcaagaagtggagaggggctggaaagatgaatcaagtgacatcaaagtatgctaaccaatcagctggcaagtcaggaagaagacccatgcctggcccttctgctgtatttgcaatgaagtcagcaasttcctgtgstattgagcaaggaaacttatctctgtgtgaaactgctttagatcaaggctactctgaaactaaggcctttgagatggctggaccctccaaaggtaaagaaagctagataccctccttggagttgcaagtattctttcaaggttggaagagggattttgaagaggtatctctccaagcaagaatgacttgtttttccataagggacatgagcattttactaggcttggaagagctgacatratgagcattattgtatgtttgtatatacatttgtgatagagggctagagtttgacctagagagagtttaaggaagtgaaatatttaattcagaaccaaatgcttttgtaaaactttttggattttgtaaaagcattttcattctcttagaaattcaagtattttcaaggggagtcatttgagatatatttattttactaggagatcttatattctagggaaatgctttaaatggtcaggctccartcggaatttttttaagaaaaaagtagtttttaatacattggttaggactcagaggaaatacggaaaaaacattgtagatggttaatttacagataaaatcccaagagccttttaaacaacaaggtacctaaaatagggtataattatactgcttaaaatacagttagtgcctattaatagctttttatttcctatgggragatgcttttggtcttctggctgaagatgtaggcatacctctcactcatttcaatgttttcctgaggtggagccttcattggaaaggggaaagagggattctagggtttcatcagggaccaggaatgcattcctctgtcaggttccaatcaagagaagaccttttatgagatctgcctctgtatagatgttgtcagttaggaaactgaagccataggtcaggcagacrtcagctcagcctgtgrcccattgggtgatttcctgtattttaaaactgacagtagcctgatcaaagtgatacaatcaatttcaaaacaatcttccagagaccacttgaaggttcatagtttttacaataccctgagacttttcaggtgttggagcctctaaaatatgagatataaacagaaactaatacaagttgttctctggaggtttctatgaggttcttagaaaaatttggttttaaaatcatttgaggacaggaatgtctatagcaagtttactcctattgcgaatcatgtatgctggctttagttgtaacaaacgattttattctaagtaaggccaggtgctactataaaatcatatattcctgttgaagttcttttgaagtcctatctctatttattatatttgaaagttgtcagccaccagtcatccagaatttccttcctgaatctccatgctcatatgcaatgtctacatcaaggtcttcttaatgactattattctcagggtttagttttctaccttctgcctactattttggtctgacatttttgtagccttctgttattaytggaaatagtctcttacataagctgatttcgagaactttcaaaatctcacatagctaatggaagttgctttctgctttcttatgactgtttttataaataaactgtttcataaataatgt

SEQ ID NO: 3704 - DNA, 2061 bp, Homo sapiens
ctctaaatctcctctcctggctttcctgcagtcactgtgctttgcaggccagctgcctctaggactcttagaatacaatggtgcttttgtacaaccttgattttgagcatgtggttcctcctttgactcagctgaaaaatttctaaagcagttaactatatgttactggattatacttagatttctactacaacattattttgtcaaaactcgtactctcacgtgtgagaagcattgtgtcaaacaaaatggagtacattttttcaataacaacttcttagagcaaacctgtactgagaagaaagtatagttgccaaatgtatgtggtgatcagaaatctggaagaacccttattaatgtcttgtattacttgaaaatgctgataaaatatgttagcctgcttataatcatttttatttttggagagttgttttttacaatagcagtaacttgaaccataaaatactttgtttcaataacatggtatgaataatgcccaaagtttaagagttagtattcatcaagtgatggtgaataaatctatgaccgaggtagaattctgggctcaataaaatctacctctgctattatgtatttcaaaatgagaaaacactcaactagatttggtgaaaactaaactcctgtttagtttaatagttaagagagtctccattgatgaggtgcattctggattatccatttgtttttatatcttttattttcctattctcacttcccatgacaygatatacattacaattgtttttagaaaaataaagtttaccatctcatgattcatttagatcctggctatacamgttatttctcatgttgatttaaaactaatttttrtatacttcttataacaacacactgtcttattggatcttcaggaaacagacgtggtaccagacaccaggcttttagacaaatttagtcagattacacctcggctctttatgccactagatgagaccatccaaaatccaccaatggaaactttgtacattatcgactttttcattgcattggcaatttgcaacacagtagtggtttctgctcctaaccaaccccgacaaaaggtgagtaagttctctaatgcaaacaagggtcactttccagaagagaattttgggtttaaatgtatctgtactgagcttgatatatggataaaaatgataaataatagtagctgtataacactgattcagcatttgttctgtgctctgcacttaccatggtctatgtcatgggtccccaacccccttggttgcagaccagtaacagtctgtggcctgttaggaaccagtctgaccagcaaggaggggagggagagggccagtgagcattactgcctgagccccgcctcctgtcagatcaggggcagcattagattctcataggaacgcgaaccctattatgaactgcatatgcaagggatctaggttggtgccctccgtatgagaatctaatacccagagaatctaatacctgatgatctgaggtcccacccaacccgtctatggaaaattgtcttcacaaaactggtccctggtgccaaaaaggttgaggaccgctggtctaagtgatttattggtattaacaagwtgaatcctcctaacaatcctatgagttagatgctattaccctactattctccattttacagatgaggctaagtaatttacccagggtcacaaaactggtttgttggggaggtgggatttgaacctaggaaatacagctcggtgctactatattatttgcctctaagagggtagtgatgagagcaattcattttgctttagtttatgtgccaaattgaagctttctttgagacttctgagacctccaacatcgtatgtattatatcaggcaaaatataccgtattggattcaatatcatgtttaataatatttttttcttcctttttttttttcttggagacagtcttaccctgtctcccaggctggagcgcagtggcgtgatctcagctcactgcaccctccacctcccaggttcaagcaattcttctgcctcagcctcctgagtagctggga

SEQ ID NO: 3705 - DNA, 755 bp, Homo sapiens
ttaaaaaaaacaaaaacaggctttgcagacgccacagccactggcaggagccctgtactatcagccatggttaaccccaccatgttctttgacatcgccgcgagcccttagactgtgtctccttcgagctgtttgcagacaaagtttcaaagrcagcagaaaactttcgtgctctgagcactggagagaaaggatttggttgtaagggttcctgctttcacagaattattccagggtttatgtgtcagggtggtgacttcacatgccataatggcactggtggcaagtccatctactgggagaaatttgatgatgagaacttcatcctaaagcatacaggtcctggcatcttatccatggcaaatgctggacccaacacaaatggttcccagtttttcatctgyactgccaagactaagtggttggatggcaagcatgtggcctttggcaaggtgaaagaaggcatgaatattgtggaggccatggagggtccaggaatggcaagaccagcaagaagatcaccattgctgactgtggacaactctaataagtttgacttgtgttttatcttaacctccagaccattccttctgtaactcaggagagcatccttccacccaatttgctcgcagtatcctagaatctttgtgctctcactgcagttccctttgggtgccatgttttccttgttcccttccatgcccagctggattgcagagttaagtttatgattatgaaataaaaactaaatgcca

SEQ ID NO: 3706 - DNA, 4594 bp, Homo sapiens
tggaaatctccgttattttccagcacccaacagtagcgtaatgggagtaacggacttaacctcatttctctttcagagcatttagccttcatatgcccttccctgcatgcttcccccaggccgtcaagacttgtactgaacattggtaaaaaattatatgagggtaaaacaaaagaagtctacgaattgttagacagtccaggaaaagtcctcctgcagtccaaggaccagattacagcaggaaatgcagctagaaaaaaccacctggaaggaaaagctgcaatctcaaataaaatcaccagttgtatttttcagttattacaggaagcaggtattaaaactgccttcaccagaaaatgtggggagacagctttcattgcaccgcagtgtgaaatgattccaattgaatgggtttgcagaagaatagcaactggttcttttctcaaaagaaatcctggtgtcaaggaaggatataagttttacccacctaaagtggagttgtttttcaaggatgatgccaataatgacccacagtggtctgaggaacagctgattgctgcaaaattttgctttgctggacttcttataggccagactgaagtggatatcatgagtcatgctacacaggctatatttgaaatactggagaaatcctggttgccccagaattgtacactggttgatatgaagattgaatttggtgttgatgtaaccaccaamgaaattgttcttgctgatgttattgacaatgattcctggagactctggccatcaggagatcgaagccaacagaaagacaaacagtcttatcgggacctcaaagaagtaactcctgaagggctccaaatggtaaagaaaaactttgagtgggttgcagagagagtagaggtaaaccttctataggttgtagtgttgatgggctctacttctgatcttggtcactgtgaaaaaatcaagaaggcctgtggaaattttggcattccatgtgaacttcgagtaacatctgcgcataaaggaccagatgaaactctgaggattaaagctgagtatgaaggggatggcattcctactgtatttgtggcagtggcaggcagaagtaatggtttgggaccagtgatgtctgggaacactgcatatccagttatcagctgtcctcccctcacaccagactggggagttcaggatgtgtggtcttctcttcgactacccagtgacggagtcgggctctcttgcccaggctggagtgcaatggcgcaatctcagcttactgcagcctccgcctcccaggttcaagcggttctcgtgcctcaacctcctgagtacctgggattataggtcttggctgttcaaccgtactttctccagaaggatcagctcaatttgctgctcagatatttgggttaagcaaccatttggtatggagcaaactgcgagcaagcattttgaacacatggatttccttgaagcaggctgacaagaaaatcagagaatgtaatttataagaaagaatgccattgaattttttaggggaaaaactacaaatttctaatttagctgaaggaaaatcaagcaagatgaaaaggtaattttaaattagagaacacaaataaaatgtattagtgaataaatgcttctctagatccatattaataaacatgagcatctaacccctcctttcttaggctagacaccaagatatttcagccagcctttatcattcctcttactttatcctttttccttaagtattggtggtcactactattgagtttcttccttaacactgattaaatgatcttaactccctcagctaaaactggcattactgactcccagctatatttctccagacttgcatttttttttttttttttgagacagggtctcactgtcgcccaggctggagtgcagtggcgtgatctcagttcactgctgctttccctcctgggctcaagcagttctcccacctcagcctctcgactaacagggactataatcttgcagcaccatgccgagctaattttattttttgtagagatgagctctcactatgtcacccaggttcgtctcaaactcctgaaccctagtaattctcctatctcagcctcccaaagtgctagggttacagacatgagccactgtgcctgtctagacttgtactttcaactgtccatttctccctgtctgtcccatgggcactcatraaaaaacagaatgctcccaactttattcatcttccaagcctgtagctcttggtatactcactgttgcaagtcagaagcttgatttcatcattgatgtttttctcacgtttcacatctcactcatcaccaagtcatgttggtgttaatttctgattaacccttgaatttaccgtcttctcatcctctgtacaaaagcctcaagtgagggtcaaattcaacattatcctgatctagacagcccccattctcaatccacccttttccaagttgattgcccaaggacttctaacaataaactctcttttgcaccacagacttctttgaaaatatacatgctgttgaccctctctgtagaaaaccgcacacataaaacttaccaacagatttcattggttcttgggttctcccgaagcctatccatggtttatagattaagaattgatgaggtagctgggcacagtggctcacacctacgatcacagcacttcgggaggctgaagcaagcagatcacttgaggtcaggagtttgagaccagcctggccaacatggtgaaaccctgtctctactaaaaatacaaaaagtagccagycgtgatgacaggcacctgtartcccagctactcgggaggctgaggcatgagaattgcttgarcccgggaggcggaggttgcagtgagcctrgatcatgccactgcactccaacctgggcagcagagcaagactctgtctcaaaaggggaaaaaaaaaattgctgatgtgacccatgaagggaactcattttcctcgtaattttggactgccacacattggtacctttagttctctgaaggcccacgtttttatcattaagacctatttgttagctagtagagctttatgttcgctgtccatgaaaccttctgtaaccacagtgactacaagtagttctttctctattgaattattaggtccagaatagaagatgtcattgtacactttatttccctcacactgtgttaygctctgatgtgctatgcttagctatctgtcagagattagtaaattataaaactcatgtgtactacttaagtttatatcttatgctagtttataagaacaattaaaaggacttagaagattaactttggtttcatggtctctgaagtcactgactgctatttcagcttgtttacccttacctagcattaagactccatctacttctgtgcagtatatgaaaatttttaaactttcatttagactggtggataggactgaccattacaaattgtcgttatcaattttttttcctttttttttttaagagccaagttctcactgtctcccaggctggagtgcagtggcatgattatggctccctgcagccttgaactcctggactcaagctgcagcctctcgagtagctgggtgcatgtgctaccacacccaattatgaatttcatcattagtttcttagtagagtccacatgtcctcagtagtaagttcatcagtgctaaatatttgaaggtatttctactgttttgtaaaagtaacttaagcctacctggtctgctatcttttgagtatttatactttctacgggcttgtaggtaaacataaaaagagaaaaaatatcccaataatacagtttttaaccttttatgataaagacatgcttagaattgctgttaagctttctgagatttaaccactgaaactaagtaaaagacaaagcacttaggtaaagcttcattcagtatccattcacccaatactggtttgattctagggcctaggaaaataggactgagcaaagcccttgtccagatggaacttatgttttagaggggaaaacaaaccataaaaaggtaaacagtataaaatcaggaaaggataaatgtatatgaagaatcaaaatgaggacggtgatggggataagaggggaaggtttttgaggagagcagagcaatgatgtaaaagcaagacacacagatagggaaatagctttccatactaagggaatgggaaataaagctgagttttgccttgaggacctccaaacatgagaattgctagagctctgtgaacaaggatgagagtggaagacaatataagcaaaggctacatcacttagggcctataggccacactgaagtgtgacaggaaaaactcagtttgagcagaggcttgacatacttaacatatttaaaggttctctggctgttgtgtggacaagaggagaagcagagattagttaagaggctattgtagcccaggtgagggatgatgtatgatcttcaacatgtctaatttttttgtgcctcaatttcatgaaatgaaaatgcgactaataccacctcataaagttgtgagaattacatgagtcaatatatgtaaggcccatcatggc

SEQ ID NO: 3707 - DNA, 4551 bp, Homo sapiens
cggacttaacctcatttctctttcagagcatttagccttcatatgcccttccctgcatgcttcccccaggccgtcaagacttggtacgctccaacttctgagtcgctcccgcagccgagaaggggccgggagttctgcctcgcttcccggcgcggtcgcagccctcagcccacttaggataatggcgacagctgaggtactgaacattggtaaaaaattatatgagggtaaaacaaaagaagtctacgaattgttagacagtccaggaaaagtcctcctgcagtccaaggaccagattacagcaggaaatgcagctagaaaaaaccacctggaaggaaaagctgcaatctcaaataaaatcaccagttgtatttttcagttattacaggaagcaggtattaaaactgccttcaccagaaaatgtggggagacagctttcattgcaccgcagtgtgaaatgattccaattgaatgggtttgcagaagaatagcaactggttcttttctcaaaagaaatcctggtgtcaaggaaggatataagttttacccacctaaagtggagttgtttttcaaggatgatgccaataatgacccacagtggtctgaggaacagctgattgctgcaaaattttgctttgctggacttcttataggccagactgaagtggatatcatgagtcatgctacacaggctatatttgaaatactggagaaatcctggttgccccagaattgtacactggttgatatgaagattgaatttggtgttgatgtaaccaccaamgaaattgttcttgctgatgttattgacaatgattcctggagactctggccatcaggagatcgaagccaacagaaagacaaacagtcttatcgggacctcaaagaagtaactcctgaagggctccaaatggtaaagaaaaactttgagtgggttgcagagagagtagagttgcttttgaaatcagaaagtcagtgcagggttgtagtgttgatgggctctacttctgatcttggtcactgtgaaaaaatcaagaaggcctgtggaaattttggcattccatgtgaacttcgagtaacatctgcgcataaaggaccagatgaaactctgaggattaaagctgagtatgaaggggatggcattcctactgtatttgtggcagtggcaggcagaagtaatggtttgggaccagtgatgtctgggaacactgcatatccagttatcagctgtcctcccctcacaccagactggggagttcaggatgtgtggtcttctcttcgactacccagtggtcttggctgttcaaccgtactttctccagaaggatcagctcaatttgctgctcagatatttgggttaagcaaccatttggtatggagcaaactgcgagcaagcattttgaacacatggatttccttgaagcaggctgacaagaaaatcagagaatgtaatttataagaaagaatgccattgaattttttaggggaaaaactacaaatttctaatttagctgaaggaaaatcaagcaagatgaaaaggtaattttaaattagagaacacaaataaaatgtattagtgaataaatgcttctctagatccatattaataaacatgagcatctaacccctcctttcttaggctagacaccaagatatttcagccagcctttatcattcctcttactttatcctttttccttaagtattggtggtcactactattgagtttcttccttaacactgattaaatgatcttaactccctcagctaaaactggcattactgactcccagctatatttctccagacttgcatttttttttttttttttgagacagggtctcactgtcgcccaggctggagtgcagtggcgtgatctcagttcactgctgctttccctcctgggctcaagcagttctcccacctcagcctctcgactaacagggactataatcttgcagcaccatgccgagctaattttattttttgtagagatgagctctcactatgtcacccaggttcgtctcaaactcctgaaccctagtaattctcctatctcagcctcccaaagtgctagggttacagacatgagccactgtgcctgtctagacttgtactttcaactgtccatttctccctgtctgtcccatgggcactcatraaaaaacagaatgctcccaactttattcatcttccaagcctgtagctcttggtatactcactgttgcaagtcagaagcttgatttcatcattgatgtttttctcacgtttcacatctcactcatcaccaagtcatgttggtgttaatttctgattaacccttgaatttaccgtcttctcatcctctgtacaaaagcctcaagtgagggtcaaattcaacattatcctgatctagacagcccccattctcaatccacccttttccaagttgattgcccaaggacttctaacaataaactctcttttgcaccacagacttctttgaaaatatacatgctgttgaccctctctgtagaaaaccgcacacataaaacttaccaacagatttcattggttcttgggttctcccgaagcctatccatggtttatagattaagaattgatgaggtagctgggcacagtggctcacacctacgatcacagcacttcgggaggctgaagcaagcagatcacttgaggtcaggagtttgagaccagcctggccaacatggtgaaaccctgtctctactaaaaatacaaaaagtagccagycgtgatgacaggcacctgtartcccagctactcgggaggctgaggcatgagaattgcttgarcccgggaggcggaggttgcagtgagcctrgatcatgccactgcactccaacctgggcagcagagcaagactctgtctcaaaaggggaaaaaaaaaattgctgatgtgacccatgaagggaactcattttcctcgtaattttggactgccacacattggtacctttagttctctgaaggcccacgtttttatcattaagacctatttgttagctagtagagctttatgttcgctgtccatgaaaccttctgtaaccacagtgactacaagtagttctttctctattgaattattaggtccagaatagaagatgtcattgtacactttatttccctcacactgtgttaygctctgatgtgctatgcttagctatctgtcagagattagtaaattataaaactcatgtgtactacttaagtttatatcttatgctagtttataagaacaattaaaaggacttagaagattaactttggtttcatggtctctgaagtcactgactgctatttcagcttgtttacccttacctagcattaagactccatctacttctgtgcagtatatgaaaatttttaaactttcatttagactggtggataggactgaccattacaaattgtcgttatcaattttttttcctttttttttttaagagccaagttctcactgtctcccaggctggagtgcagtggcatgattatggctccctgcagccttgaactcctggactcaagctgcagcctctcgagtagctgggtgcatgtgctaccacacccaattatgaatttcatcattagtttcttagtagagtccacatgtcctcagtagtaagttcatcagtgctaaatatttgaaggtatttctactgttttgtaaaagtaacttaagcctacctggtctgctatcttttgagtatttatactttctacgggcttgtaggtaaacataaaaagagaaaaaatatcccaataatacagtttttaaccttttatgataaagacatgcttagaattgctgttaagctttctgagatttaaccactgaaactaagtaaaagacaaagcacttaggtaaagcttcattcagtatccattcacccaatactggtttgattctagggcctaggaaaataggactgagcaaagcccttgtccagatggaacttatgttttagaggggaaaacaaaccataaaaaggtaaacagtataaaatcaggaaaggataaatgtatatgaagaatcaaaatgaggacggtgatggggataagaggggaaggtttttgaggagagcagagcaatgatgtaaaagcaagacacacagatagggaaatagctttccatactaagggaatgggaaataaagctgagttttgccttgaggacctccaaacatgagaattgctagagctctgtgaacaaggatgagagtggaagacaatataagcaaaggctacatcacttagggcctataggccacactgaagtgtgacaggaaaaactcagtttgagcagaggcttgacatacttaacatatttaaaggttctctggctgttgtgtggacaagaggagaagcagagattagttaagaggctattgtagcccaggtgagggatgatgtatgatcttcaacatgtctaatttttttgtgcctcaatttcatgaaatgaaaatgcgactaataccacctcataaagttgtgagaattacatgagtcaatatatgtaaggcccatcatggc

SEQ ID NO: 3708 - DNA, 4575 bp, Homo sapiens
gaaagctgtatttgctgcacgtggaaatctccgttattttccagcacccaacagtagcgtaatgggagtaacggacttaacctcatttctctttcagagcatttagccttcatatgcccttccctgcatgcttcccccaggccgtcaagacttgagttctgcctcgcttcccggcgcggtcgcagccctcagcccacttaggataatggcgacagctgaggtactgaacattggtaaaaaattatatgagggtaaaacaaaagaagtctacgaattgttagacagtccaggaaaagtcctcctgcagtccaaggaccagattacagcaggaaatgcagctagaaaaaaccacctggaaggaaaagctgcaatctcaaataaaatcaccagttgtatttttcagttattacaggaagcaggtattaaaactgccttcaccagaaaatgtggggagacagctttcattgcaccgcagtgtgaaatgattccaattgaatgggtttgcagaagaatagcaactggttcttttctcaaaagaaatcctggtgtcaaggaaggatataagttttacccacctaaagtggagttgtttttcaaggatgatgccaataatgacccacagtggtctgaggaacagctgattgctgcaaaattttgctttgctggacttcttataggccagactgaagtggatatcatgagtcatgctacacaggctatatttgaaatactggagaaatcctggttgccccagaattgtacactggttgatatgaagattgaatttggtgttgatgtaaccaccaamgaaattgttcttgctgatgttattgacaatgattcctggagactctggccatcaggagatcgaagccaacagaaagacaaacagtcttatcgggacctcaaagaagtaactcctgaagggctccaaatggtaaagaaaaactttgagtgggttgcagagagagtagagttgcttttgaaatcagaaagtcagtgcagggttgtagtgttgatgggctctacttctgatcttggtcactgtgaaaaaatcaagaaggcctgtggaaattttggcattccatgtgaacttcgagtaacatctgcgcataaaggaccagatgaaactctgaggattaaagctgagtatgaaggggatggcattcctactgtatttgtggcagtggcaggcagaagtaatggtttgggaccagtgatgtctgggaacactgcatatccagttatcagctgtcctcccctcacaccagactggggagttcaggatgtgtggtcttctcttcgactacccagtggtcttggctgttcaaccgtactttctccagaaggatcagctcaatttgctgctcagatatttgggttaagcaaccatttggtatggagcaaactgcgagcaagcattttgaacacatggatttccttgaagcaggctgacaagaaaatcagagaatgtaatttataagaaagaatgccattgaattttttaggggaaaaactacaaatttctaatttagctgaaggaaaatcaagcaagatgaaaaggtaattttaaattagagaacacaaataaaatgtattagtgaataaatgcttctctagatccatattaataaacatgagcatctaacccctcctttcttaggctagacaccaagatatttcagccagcctttatcattcctcttactttatcctttttccttaagtattggtggtcactactattgagtttcttccttaacactgattaaatgatcttaactccctcagctaaaactggcattactgactcccagctatatttctccagacttgcatttttttttttttttttgagacagggtctcactgtcgcccaggctggagtgcagtggcgtgatctcagttcactgctgctttccctcctgggctcaagcagttctcccacctcagcctctcgactaacagggactataatcttgcagcaccatgccgagctaattttattttttgtagagatgagctctcactatgtcacccaggttcgtctcaaactcctgaaccctagtaattctcctatctcagcctcccaaagtgctagggttacagacatgagccactgtgcctgtctagacttgtactttcaactgtccatttctccctgtctgtcccatgggcactcatraaaaaacagaatgctcccaactttattcatcttccaagcctgtagctcttggtatactcactgttgcaagtcagaagcttgatttcatcattgatgtttttctcacgtttcacatctcactcatcaccaagtcatgttggtgttaatttctgattaacccttgaatttaccgtcttctcatcctctgtacaaaagcctcaagtgagggtcaaattcaacattatcctgatctagacagcccccattctcaatccacccttttccaagttgattgcccaaggacttctaacaataaactctcttttgcaccacagacttctttgaaaatatacatgctgttgaccctctctgtagaaaaccgcacacataaaacttaccaacagatttcattggttcttgggttctcccgaagcctatccatggtttatagattaagaattgatgaggtagctgggcacagtggctcacacctacgatcacagcacttcgggaggctgaagcaagcagatcacttgaggtcaggagtttgagaccagcctggccaacatggtgaaaccctgtctctactaaaaatacaaaaagtagccagycgtgatgacaggcacctgtartcccagctactcgggaggctgaggcatgagaattgcttgarcccgggaggcggaggttgcagtgagcctrgatcatgccactgcactccaacctgggcagcagagcaagactctgtctcaaaaggggaaaaaaaaaattgctgatgtgacccatgaagggaactcattttcctcgtaattttggactgccacacattggtacctttagttctctgaaggcccacgtttttatcattaagacctatttgttagctagtagagctttatgttcgctgtccatgaaaccttctgtaaccacagtgactacaagtagttctttctctattgaattattaggtccagaatagaagatgtcattgtacactttatttccctcacactgtgttaygctctgatgtgctatgcttagctatctgtcagagattagtaaattataaaactcatgtgtactacttaagtttatatcttatgctagtttataagaacaattaaaaggacttagaagattaactttggtttcatggtctctgaagtcactgactgctatttcagcttgtttacccttacctagcattaagactccatctacttctgtgcagtatatgaaaatttttaaactttcatttagactggtggataggactgaccattacaaattgtcgttatcaattttttttcctttttttttttaagagccaagttctcactgtctcccaggctggagtgcagtggcatgattatggctccctgcagccttgaactcctggactcaagctgcagcctctcgagtagctgggtgcatgtgctaccacacccaattatgaatttcatcattagtttcttagtagagtccacatgtcctcagtagtaagttcatcagtgctaaatatttgaaggtatttctactgttttgtaaaagtaacttaagcctacctggtctgctatcttttgagtatttatactttctacgggcttgtaggtaaacataaaaagagaaaaaatatcccaataatacagtttttaaccttttatgataaagacatgcttagaattgctgttaagctttctgagatttaaccactgaaactaagtaaaagacaaagcacttaggtaaagcttcattcagtatccattcacccaatactggtttgattctagggcctaggaaaataggactgagcaaagcccttgtccagatggaacttatgttttagaggggaaaacaaaccataaaaaggtaaacagtataaaatcaggaaaggataaatgtatatgaagaatcaaaatgaggacggtgatggggataagaggggaaggtttttgaggagagcagagcaatgatgtaaaagcaagacacacagatagggaaatagctttccatactaagggaatgggaaataaagctgagttttgccttgaggacctccaaacatgagaattgctagagctctgtgaacaaggatgagagtggaagacaatataagcaaaggctacatcacttagggcctataggccacactgaagtgtgacaggaaaaactcagtttgagcagaggcttgacatacttaacatatttaaaggttctctggctgttgtgtggacaagaggagaagcagagattagttaagaggctattgtagcccaggtgagggatgatgtatgatcttcaacatgtctaatttttttgtgcctcaatttcatgaaatgaaaatgcgactaataccacctcataaagttgtgagaattacatgagtcaatatatgtaaggcccatcatggc

SEQ ID NO: 3709 - DNA, 4487 bp, Homo sapiens
tggaaatctccgttattttccagcacccaacagtagcgtaatgggagtaacggacttaacctcatttctctttcagagcatttagccttcatatgcccttccctgcatgcttcccccaggccgtcaagacttgtactgaacattggtaaaaaattatatgagggtaaaacaaaagaagtctacgaattgttagacagtccaggaaaagtcctcctgcagtccaaggaccagattacagcaggaaatgcagctagaaaaaaccacctggaaggaaaagctgcaatctcaaataaaatcaccagttgtatttttcagttattacaggaagcaggtattaaaactgccttcaccagaaaatgtggggagacagctttcattgcaccgcagtgtgaaatgattccaattgaatgggtttgcagaagaatagcaactggttcttttctcaaaagaaatcctggtgtcaaggaaggatataagttttacccacctaaagtggagttgtttttcaaggatgatgccaataatgacccacagtggtctgaggaacagctgattgctgcaaaattttgctttgctggacttcttataggccagactgaagtggatatcatgagtcatgctacacaggctatatttgaaatactggagaaatcctggttgccccagaattgtacactggttgatatgaagattgaatttggtgttgatgtaaccaccaamgaaattgttcttgctgatgttattgacaatgattcctggagactctggccatcaggagatcgaagccaacagaaagacaaacagtcttatcgggacctcaaagaagtaactcctgaagggctccaaatggtaaagaaaaactttgagtgggttgcagagagagtagagttgcttttgaaatcagaaagtcagtgcagggttgtagtgttgatgggctctacttctgatcttggtcactgtgaaaaaatcaagaaggcctgtggaaattttggcattccatgtgaacttcgagtaacatctgcgcataaaggaccagatgaaactctgaggattaaagctgagtatgaaggggatggcattcctactgtatttgtggcagtggcaggcagaagtaatggtttgggaccagtgatgtctgggaacactgcatatccagttatcagctgtcctcccctcacaccagactggggagttcaggatgtgtggtcttctcttcgactacccagtggtcttggctgttcaaccgtactttctccagaaggatcagctcaatttgctgctcagatatttgggttaagcaaccatttggtatggagcaaactgcgagcaagcattttgaacacatggatttccttgaagcaggctgacaagaaaatcagagaatgtaatttataagaaagaatgccattgaattttttaggggaaaaactacaaatttctaatttagctgaaggaaaatcaagcaagatgaaaaggtaattttaaattagagaacacaaataaaatgtattagtgaataaatgcttctctagatccatattaataaacatgagcatctaacccctcctttcttaggctagacaccaagatatttcagccagcctttatcattcctcttactttatcctttttccttaagtattggtggtcactactattgagtttcttccttaacactgattaaatgatcttaactccctcagctaaaactggcattactgactcccagctatatttctccagacttgcatttttttttttttttttgagacagggtctcactgtcgcccaggctggagtgcagtggcgtgatctcagttcactgctgctttccctcctgggctcaagcagttctcccacctcagcctctcgactaacagggactataatcttgcagcaccatgccgagctaattttattttttgtagagatgagctctcactatgtcacccaggttcgtctcaaactcctgaaccctagtaattctcctatctcagcctcccaaagtgctagggttacagacatgagccactgtgcctgtctagacttgtactttcaactgtccatttctccctgtctgtcccatgggcactcatraaaaaacagaatgctcccaactttattcatcttccaagcctgtagctcttggtatactcactgttgcaagtcagaagcttgatttcatcattgatgtttttctcacgtttcacatctcactcatcaccaagtcatgttggtgttaatttctgattaacccttgaatttaccgtcttctcatcctctgtacaaaagcctcaagtgagggtcaaattcaacattatcctgatctagacagcccccattctcaatccacccttttccaagttgattgcccaaggacttctaacaataaactctcttttgcaccacagacttctttgaaaatatacatgctgttgaccctctctgtagaaaaccgcacacataaaacttaccaacagatttcattggttcttgggttctcccgaagcctatccatggtttatagattaagaattgatgaggtagctgggcacagtggctcacacctacgatcacagcacttcgggaggctgaagcaagcagatcacttgaggtcaggagtttgagaccagcctggccaacatggtgaaaccctgtctctactaaaaatacaaaaagtagccagycgtgatgacaggcacctgtartcccagctactcgggaggctgaggcatgagaattgcttgarcccgggaggcggaggttgcagtgagcctrgatcatgccactgcactccaacctgggcagcagagcaagactctgtctcaaaaggggaaaaaaaaaattgctgatgtgacccatgaagggaactcattttcctcgtaattttggactgccacacattggtacctttagttctctgaaggcccacgtttttatcattaagacctatttgttagctagtagagctttatgttcgctgtccatgaaaccttctgtaaccacagtgactacaagtagttctttctctattgaattattaggtccagaatagaagatgtcattgtacactttatttccctcacactgtgttaygctctgatgtgctatgcttagctatctgtcagagattagtaaattataaaactcatgtgtactacttaagtttatatcttatgctagtttataagaacaattaaaaggacttagaagattaactttggtttcatggtctctgaagtcactgactgctatttcagcttgtttacccttacctagcattaagactccatctacttctgtgcagtatatgaaaatttttaaactttcatttagactggtggataggactgaccattacaaattgtcgttatcaattttttttcctttttttttttaagagccaagttctcactgtctcccaggctggagtgcagtggcatgattatggctccctgcagccttgaactcctggactcaagctgcagcctctcgagtagctgggtgcatgtgctaccacacccaattatgaatttcatcattagtttcttagtagagtccacatgtcctcagtagtaagttcatcagtgctaaatatttgaaggtatttctactgttttgtaaaagtaacttaagcctacctggtctgctatcttttgagtatttatactttctacgggcttgtaggtaaacataaaaagagaaaaaatatcccaataatacagtttttaaccttttatgataaagacatgcttagaattgctgttaagctttctgagatttaaccactgaaactaagtaaaagacaaagcacttaggtaaagcttcattcagtatccattcacccaatactggtttgattctagggcctaggaaaataggactgagcaaagcccttgtccagatggaacttatgttttagaggggaaaacaaaccataaaaaggtaaacagtataaaatcaggaaaggataaatgtatatgaagaatcaaaatgaggacggtgatggggataagaggggaaggtttttgaggagagcagagcaatgatgtaaaagcaagacacacagatagggaaatagctttccatactaagggaatgggaaataaagctgagttttgccttgaggacctccaaacatgagaattgctagagctctgtgaacaaggatgagagtggaagacaatataagcaaaggctacatcacttagggcctataggccacactgaagtgtgacaggaaaaactcagtttgagcagaggcttgacatacttaacatatttaaaggttctctggctgttgtgtggacaagaggagaagcagagattagttaagaggctattgtagcccaggtgagggatgatgtatgatcttcaacatgtctaatttttttgtgcctcaatttcatgaaatgaaaatgcgactaataccacctcataaagttgtgagaattacatgagtcaatatatgtaaggcccatcatggc

SEQ ID NO: 3710 - DNA, 2755 bp, Homo sapiens
tggaaatctccgttattttccagcacccaacagtagcgtaatgggagtaacggacttaacctcatttctctttcagagcatttagccttcatatgcccttccctgcatgcttcccccaggccgtcaagacttgtactgaacattggtaaaaaattatatgagggtaaaacaaaagaagtctacgaattgttagacagtccaggaaaagtcctcctgcagtccaaggaccagattacagcaggaaatgcagctagaaaaaaccacctggaaggaaaagctgcaatctcaaataaaatcaccagttgtatttttcagttattacaggaagcaggtattaaaactgccttcaccagaaaatgtggggagacagctttcattgcaccgcagtgtgaaatgattccaattgaatgggtttgcagaagaatagcaactggttcttttctcaaaagaaatcctggtgtcaaggaaggatataagttttacccacctaaagtggagttgtttttcaaggatgatgccaataatgacccacagtggtctgaggaacagctgattgctgcaaaattttgctttgctggacttcttataggccagactgaagtggatatcatgagtcatgctacacaggctatatttgaaatactggagaaatcctggttgccccagaattgtacactggttgatatgaagattgaatttggtgttgatgtaaccaccaamgaaattgttcttgctgatgttattgacaatgattcctggagactctggccatcaggagatcgaagccaacagaaagacaaacagtcttatcgggacctcaaagaagtaactcctgaagggctccaaatggtaaagaaaaactttgagtgggttgcagagagagtagagttgcttttgaaatcagaaagtcagtgcagggttgtagtgttgatgggctctacttctgatcttggtcactgtgaaaaaatcaagaaggcctgtggaaattttggcattccatgtgaacttcgagtaacatctgcgcataaaggaccagatgaaactctgaggattaaagctgagtatgaaggggatggcattcctactgtatttgtggcagtggcaggcagaagtaatggtttgggaccagtgatgtctgggaacactgcatatccagttatcagctgtcctcccctcacaccagactggggagttcaggatgtgtggtcttctcttcgactacccagtggtcttggctgttcaaccgtactttctccagaaggatcagctcaatttgctgctcagatatttgggttaagcaaccatttggtatggagcaaactgcgagcaagcattttgaacacatggatttccttgaagcaggctgacaagaaaatcagagaatgtaatttataagaaagaatgccattgaattttttaggggaaaaactacaaatttctaatttagctgaaggaaaatcaagcaagatgaaaaggtaattttaaattagagaacacaaataaaatgtattagtgaataaatgcttctctagatccatattaataaacatgagcatctaacccctcctttcttaggctagacaccaagatatttcagccagcctttatcattcctcttactttatcctttttccttaagtattggtggtcactactattgagtttcttccttaacactgattaaatgatcttaactccctcagctaaaactggcattactgactcccagctatatttctccagacttgcatttttttttttttttttgagacagggtctcactgtcgcccaggctggagtgcagtcagctactcgggaggctgaggcatgagaattgcttgarcccgggaggcggaggttgcagtgagcctrgatcatgccactgcactccaacctgggcagcagagcaagactctgtctcaaaaggggaaaaaaaaaattgctgatgtgacccatgaagggaactcattttcctcgtaattttggactgccacacattggtacctttagttctctgaaggcccacgtttttatcattaagacctatttgttagctagtagagctttatgttcgctgtccatgaaaccttctgtaaccacagtgactacaagtagttctttctctattgaattattaggtccagaatagaagatgtcattgtacactttatttccctcacactgtgttaygctctgatgtgctatgcttagctatctgtcagagattagtaaattataaaactcatgtgtactacttaagtttatatcttatgctagtttataagaacaattaaaaggacttagaagattaactttggtttcatggtctctgaagtcactgactgctatttcagcttgtttacccttacctagcattaagactccatctacttctgtgcagtatatgaaaatttttaaactttcatttagactggtggataggactgaccattacaaattgtcgttatcaattttttttcctttttttttttaagagccaagttctcactgtctcccaggctggagtgcagtggcatgattatggctccctgcagccttgaactcctggactcaagctgcagcctctcgagtagctgggtgcatgtgctaccacacccaattatgaatttcatcattagtttcttagtagagtccacatgtcctcagtagtaagttcatcagtgctaaatatttgaaggtatttctactgttttgtaaaagtaacttaagcctacctggtctgctatcttttgag

SEQ ID NO: 3711 - DNA, 3769 bp, Homo sapiens
cccgcgagcgtccatccatctgtccggctggcggtccagcgaaaggggctccaggctggacgcagccgccacccgggggaccgaggccaggagaggggccgagagcgcggctgacccttgcgggccggggcaggggacggtggccgcggccatgcagtcctgtgccagggcgttggggctgctcctgggccgcggggtcgggggcggccgccgcctggctgggggatcggggctgtgctgggcgccgtggggccgggacagcagcagtggcggcggggacagcgccgcggctggggcctcgcgcctcctggagcgccttctgcccagacacgacgacttcgctcggaggcacatcggccctggggacaaagaccagagagagatgctgcagatcttggggctggcgagcattgatgaattgatcgagaagacggtccctgccaacatccatttgaaaagacccttgaaaatggaagaccctgtttgtgaaaatgaaatccttgcaactctgcatgccatttcaagcaaaaaccagatctggagatcctatattggcatgggctattgtaactgctcagtgccacagacgattttgcggaacttactggagaactcaggatggatcacccagtatactccataccagcctgaggtgtctcaggggaggctggagagtttactcaactaccagaccatggtgtgtgacatcacaggcctggacatggccagtgcatccctgctggatgagggactgcggctgcagaggcgctgcagctgtgctacagacacaagaggaggaaatttttygttgacccccrttgccacccacagacaatagctgttgtccagactcgagccaaatatactggagtcctcattgagctgaagttaccctgtgaaatggacttcagtggaaaagatgtcagcggagtgttgttccagtacccagacacggaggggaaggtggaagactttacggaactcgtggagagagctcatcagagtgggagcctggcctgctgtgtgtgctactgaccttttagctttgtgcatcttgaggccaccgggagaatttggggtagacatcgccttgggcagctcccagagatttggagtgccactgggctatgggggaccccacgcagcattttttgccgtccgagaaagcttggtgagaatgatgcctggaagaatggtgggggcaacaagagacgccactgggaaagaagtgtattgtcttgctcttcaaaccagggagcaacacactgagagagacatggctaccagcaacatctgtacagctcaggccctcttggcgaatatggcagccatgtttgcaatctaccatggttcccatgggctggagcatattgctaggagagtacataatgccactttgattttgccagaaggtctcaagcgagcagggcatcaactccagcatgacgtgttctttgataccttgaagattcagtgtggctgctcagtgaaggaggtcttgggcagggccgctcagcggcagatcaattttcggctttttgaggatggcacacttggtatttctcttgatgaaacagtcaatgaaaaagatctggacgatttgttgcggatctttgtttgtgagtcatctgcagaactggttgctgaaagcatgggagaggagtgcagaggtattccagggtctgtgttcaagagsaccagcccgttcctcacccatcaagtgttcaacagctaccactctgaaacaaatattgtccggtatatgaagaaactggaaaataaagacatttcccttgttcacagcatgattccactgggatcctgcaccatgaaactgaacakttcgtctgaactcgcacctatcacatggaaagaatttgcaaacatccacccctttgtgcctctggaccaagctcaaggatatcagcagcttttctgagagcttgagaaggatttgtgtgaactcacaggttatgaccaggtctgtttccagccaaacaggggagcccagggagaatatgctggactggccactatccgagcctacttaaaccagaaaggagaggggcacagaacggtttgcctcattctgaaatcaacacatgggaccaacccaacaagtgcccacatggcaggcatgaagattcagcctgtggaggtggataaatgtgggaatatcaatgcagttcacctcaaggccatggtggataagcacaaggagaacctagcagccatcatgattacatacccatccaccaatggggtgtttgaagagaacatcagtgacgtgtgtgacctcatccmtcaacatggaggataggtctayctagacggggcaaatatgaaygctcaggtgggaatcwgtcgccctggagactttgggtctgatgtctcgcacctaaatcttcacaagaccttctgcattccccacagaggaggtggtcctggcatggggcccattggmgtaagaaataccttgccccgtttttgcccaatcatcccatcatttcactaaagcggaatgaggatgcctgtcctgtgggaaccgtcagtgcggccccatggggctccagttccatcttgcccatttcctgggcttatatcaagatgatgggaggcaagggccttaaacaagccacggaaactgcgatattaaatgccaactacatggccaagcgattagaaaaacactacagaattcttttcaggggtgcaagaggttatgtgggtcatgaatttattttggacacgagacccttcaaaaagtctgcaaatattgaggcagtggatgtggccaagagactccaggattatggatttcacgcccctatcatgccctggcctgtggcagggaccctcatggttgagcccactgagtcggaggacaaggcagagctggacagattctgtgatgccatgatcagcattcggcaggaarttgctgacattgaggagggccgcatcgaccccagggtcaatccgctgaagatgtctccacactccctgacctgcgttatatcttcccactgggaccggccttatattccagagaggtggcagcattcccactccccttcrtgaaaccagagaacaaattctggccagtgattgcccggattgatgacatatatggagatcagcacctggtttgtacctgcccacccatggaagtttatgagttgccattttctgaacaaaagagggcctcttcttagtcctctctccctaagtttaaaggactgatttggtgcctctccccagagcatttgataagcaagaaagatttcatctcccaccccagcctcaagtaggagttttatatactgtgtatatctctgtaatctctgtcgaggtaaatgtaaatacagtacctggagggagtcgaagctgatggttggaagacagatttgctttggtattctgcttacatgtgtgccagttgcctggattgggagccattttgtgttttgcatagaaagttttaggaactttaacttttaatgtggcaagtttgcagactttatagaagctatccaggagacttaatagacatttttttgttccaaaagagtccatgtggactgtgccatctgtgggaaatcccaggacaaatgtttacattttgtataccctgaagaactctttttcctctaatatgcctaatctgtaatcacatttctgagtgttytcctctttttctgtgtgaggttttttttatctgcatttattagtattctaataaaagcattttgattggaaaacaaaacac

SEQ ID NO: 3712 - DNA, 3653 bp, Homo sapiens
tcgggaaggaagagyctgtcgcgagcgcsagcttctgagctcgacgggccgagctggcagctggttggtgcttacaccttggcygcagcggcaggtccttccacgtgctttcggcggcgacatggagctggaggagttggggatccgagaggaatgtggcgtgttcgggtgcatcgcctcaggagagtggcccacgcagctggatgtaccgcatgtgatcactctgggactcgtggggggtcaggagagtgctggtattgtgactagtgatgggagttcsgtgccaacattcaaatcacacaagggaatgggtcttgtaaatcacgtctttactgaagacaatttgaaaaaattatatgtttcaaatcttggaattggacacaccaggtatgccaccacaggaaaatgtgaactagaaaattgtcagcccttcgttgttgaaacacttcatgggaagatagctgtggcacataatggcgaattggtaaatgctgctcgattaaggaaaaagcttctgcgtcatggtattggtctgtctacaagttctgatagtgaaatgattacccagttactggcgtatacccctcctcaggaacaagatgacaccccagactgggtagccaggattaaaaacttgatgaaggaagcacccacagcatactccctgcttataatgcacagagatgttatttatgcagtacgagatccttatggaaatcgtcccttatgcattggtcgtcttattccagtgtctgatataaatgacaaagagaaaaaaacatcagaaacdgaaggatgggtggtgtcttcagaatcttgtagcttcttatctattggtgcaagatattaccgtgaagtcttgcctggagaaattgtggaaatatccagacacaatgtccaaactcttgatattatatcaaggtctgaaggaaacccagtggctttttgtatctttgaatatgtttattttgcaagaccagacagtatgttcgaagaccaaatggtttatacagtaagataccgttgtggccagcagctagcgattgaagcacctgtggatgcagatttggttagcactgttccagaatctgctacgcctgctgctcttgcttacgcaggaaagtgtggacttccrtatgtggaggtgctgtgtaaaaaccggtatgtagggagaaccttcattcagccaaacatgaggttaagacaacttggtgttgcaaaaaaatttggagtattgtcagacaactttaaaggcaaaagaattgttcttgtagatgattcaattgtcagaggcaataccatctcacctataataaaactgctcaaagaatctggtgcaaaagaggtacacattcgagtagcttcaccaccaattaaatatccatgcttcatgggaataaacattcctacaaaagaagagctcattgccaataaaccagaatttgatcaccttgcagaatatctaggagcaaacagtgttgtgtatctgtcagtagaaggactggtttcatctgtrcaagaagggatamagtttaaaaaacagaaagagaaaaagcacgatattatgatcyaagaaaatggaaatggtctggaatgttttgaaaagagtggtcattgtacagcttgtctcactggaaaatatcctgtagaattagaatggtagctggtagggttggatgtgtgtagtttcaagatagaaagttggtcaagaagttatagtggtcacacctcatctatttactgttactcagttggtacaatgtaaaatgccaygcttatgtttataagttttgagattttttttttttctgaaaaggataccaaagtgcgataactgaacatttccaattgcatataatacaacaatatgtggtgttcttttttttacacaagcattggctagcctttttaacctggtcagagaaggcaggtggtcactgacatttcccaagtccatgctttaaagggtttgcaagaagttagggttaaggagaggtgatgccaacaagacaggtgagttaaatataccatttcacacaaagtttgaatagaatacattatacctcataggtgtctagcctctacagttctggctgtagttatgaccttggcttccctgtctaactgtagacaaatctttaaaaaaaaawaaaaatctggtgcctcagtttccccacatgtgcaatgggatacttattaaataattaataagaatgtgaataagtgtcatacttttgtgatttgagccatcatttcacttctgattttaagacaactcatgattgttagctttcagaaagctaatgattgttaactttttgaaattagtttacaattaattaagatttcattatgatggaaggagacataattggcagatctttgccatctctctttgagatgtcctaaaaagggttgtaaaaatctgtgaaaaagtttttcctacatttgactagaaaatgtgatccatagtatttagtgccctgatactataagctcagcaagtaacctggtacatttgaaataaaaaccaaatttttagattcaaacaatccctttatccttaatttaattaattatcatatgctttttttaatgaagtgcttgatcacttgcaaacatatatacatgtagatgtacatatacatgtacacatacacataaatattattgcaattaagtgatcaagtacagacacaataggggccagttttgtttaaggatcaaagagacaaccactttggggaattagtatcaacttacaatccaagtccaagtatcatcttataatcacttttttctactatattaagatctaatgaatttgatttcttttttgaagttttttcttgtaacatctgagattagaagtttaagatsacttgaccccaaacctttgtttatgtaagaawttttaaacataaaagtgtttgtttctgttatgttaccataatttgatgtatatagtgtccagatccatttagaaatttaatatttattaataactgaaactgtttgtcttcctttggtatatagtctcgcatattatattatagcaggccaagataaaattttgacagctctttaagcccacatgcagcagtgggtcagataaccctgtggcagtgacacgggcaaattggcatttgaataaagccctgggaccacctcaacatgcgtagcctcttgtcttaaatgtactccccatggcagcatggaggaggcaagacctgtgggtcaattttgaactggccttactttgatttttaaaacaagagactcagggaaagtactaaaccaaaatctctgattttactttgcgttttctgtagtttttgttttactgagatgcttttgtaaaggaaaataatactgtgacagtttagtaattctacagattcttaatatttctccatcatggccttttacttcacaattttctgaagtctgaattcaattacaattttttttttaccaatttaatctcaaatgttgtttaactgctttaaattcatatacgtagagtattataaactgsagagatgaaaaatgtgttttcacgggatttatattgtgaactaaactaagcctactttttgtgacttatttgtgatgccttgttgataaatatgtgtaataagtatgtttaaata

SEQ ID NO: 3713 - DNA, 3682 bp, Homo sapiens
agtagctggggccrccctcgggaaggaagagyctgtcgcgagcgcsagcttctgagctcgacgggccgagctggcagctggttggtgcttacaccttggcygcagcggcaggtccttccacgtgctttcggcggcgacatggagctggaggagttggggatccgagaggaatgtggcgtgttcgggtgcatcgcctcaggagagtggcccacgcagctggatgtaccgcatgtgatcactctgggactcgtggggctgcagcaccggggtcaggagagtgctggtattgtgactagtgatgggagttcsgtgccaacattcaaatcacacaagggaatgggtcttgtaaatcacgtctttactgaagacaatttgaaaaaattatatgtttcaaatcttggaattggacacaccaggtatgccaccacaggaaaatgtgaactagaaaattgtcagcccttcgttgttgaaacacttcatgggaagatagctgtggcacataatggcgaattggtaaatgctgctcgattaaggaaaaagcttctgcgtcatggtattggtctgtctacaagttctgatagtgaaatgattacccagttactggcgtatacccctcctcaggaacaagatgacaccccagactgggtagccaggattaaaaacttgatgaaggaagcacccacagcatactccctgcttataatgcacagagatgttatttatgcagtacgagatccttatggaaatcgtcccttatgcattggtcgtcttattccagtgtctgatataaatgacaaagagaaaaaaacatcagaaacdgaaggatgggtggtgtcttcagaatcttgtagcttcttatctattggtgcaagatattaccgtgaagtcttgcctggagaaattgtggaaatatccagacacaatgtccaaactcttgatattatatcaaggtctgaaggaaacccagtggctttttgtatctttgaatatgtttattttgcaagaccagacagtatgttcgaagaccaaatggtttatacagtaagataccgttgtggccagcagctagcgattgaagcacctgtggatgcagatttggttagcactgttccagaatctgctacgcctgctgctcttgcttacgcaggaaagtgtggacttccrtatgtggaggtgctgtgtaaaaaccggtatgtagggagaaccttcattcagccaaacatgaggttaagacaacttggtgttgcaaaaaaatttggagtattgtcagacaactttaaaggcaaaagaattgttcttgtagatgattcaattgtcagaggcaataccatctcacctataataaaactgctcaaagaatctggtgcaaaagaggtacacattcgagtagcttcaccaccaattaaatatccatgcttcatgggaataaacattcctacaaaagaagagctcattgccaataaaccagaatttgatcaccttgcagaatatctaggagcaaacagtgttgtgtatctgtcagtagaaggactggtttcatctgtrcaagaagggatamagtttaaaaaacagaaagagaaaaagcacgatattatgatcyaagaaaatggaaatggtctggaatgttttgaaaagagtggtcattgtacagcttgtctcactggaaaatatcctgtagaattagaatggtagctggtagggttggatgtgtgtagtttcaagatagaaagttggtcaagaagttatagtggtcacacctcatctatttactgttactcagttggtacaatgtaaaatgccaygcttatgtttataagttttgagattttttttttttctgaaaaggataccaaagtgcgataactgaacatttccaattgcatataatacaacaatatgtggtgttcttttttttacacaagcattggctagcctttttaacctggtcagagaaggcaggtggtcactgacatttcccaagtccatgctttaaagggtttgcaagaagttagggttaaggagaggtgatgccaacaagacaggtgagttaaatataccatttcacacaaagtttgaatagaatacattatacctcataggtgtctagcctctacagttctggctgtagttatgaccttggcttccctgtctaactgtagacaaatctttaaaaaaaaawaaaaatctggtgcctcagtttccccacatgtgcaatgggatacttattaaataattaataagaatgtgaataagtgtcatacttttgtgatttgagccatcatttcacttctgattttaagacaactcatgattgttagctttcagaaagctaatgattgttaactttttgaaattagtttacaattaattaagatttcattatgatggaaggagacataattggcagatctttgccatctctctttgagatgtcctaaaaagggttgtaaaaatctgtgaaaaagtttttcctacatttgactagaaaatgtgatccatagtatttagtgccctgatactataagctcagcaagtaacctggtacatttgaaataaaaaccaaatttttagattcaaacaatccctttatccttaatttaattaattatcatatgctttttttaatgaagtgcttgatcacttgcaaacatatatacatgtagatgtacatatacatgtacacatacacataaatattattgcaattaagtgatcaagtacagacacaataggggccagttttgtttaaggatcaaagagacaaccactttggggaattagtatcaacttacaatccaagtccaagtatcatcttataatcacttttttctactatattaagatctaatgaatttgatttcttttttgaagttttttcttgtaacatctgagattagaagtttaagatsacttgaccccaaacctttgtttatgtaagaawttttaaacataaaagtgtttgtttctgttatgttaccataatttgatgtatatagtgtccagatccatttagaaatttaatatttattaataactgaaactgtttgtcttcctttggtatatagtctcgcatattatattatagcaggccaagataaaattttgacagctctttaagcccacatgcagcagtgggtcagataaccctgtggcagtgacacgggcaaattggcatttgaataaagccctgggaccacctcaacatgcgtagcctcttgtcttaaatgtactccccatggcagcatggaggaggcaagacctgtgggtcaattttgaactggccttactttgatttttaaaacaagagactcagggaaagtactaaaccaaaatctctgattttactttgcgttttctgtagtttttgttttactgagatgcttttgtaaaggaaaataatactgtgacagtttagtaattctacagattcttaatatttctccatcatggccttttacttcacaattttctgaagtctgaattcaattacaattttttttttaccaatttaatctcaaatgttgtttaactgctttaaattcatatacgtagagtattataaactgsagagatgaaaaatgtgttttcacgggatttatattgtgaactaaactaagcctactttttgtgacttatttgtgatgccttgttgataaatatgtgtaataagtatgtttaaata

SEQ ID NO: 3714 - DNA, 1833 bp, Homo sapiens
ggatggctctgaaatggacttcagttcttctgctgatacatctcggttgttactttagctctgggagttgtggaaaggtgctggtgtggaccggtgaatacagccattggatgaatatgaagacaatcctgaaagagcttgttcagagaggtcatgaggtgactgtactggcatcttcagcttccattctttttgatcccaatgacgcattcactcttaaactcgaagtttatcctacatctttaactaaaactgaatttgagaatatcatcatgcaacaggttaagagatggtcagacattcaaaaagatagcttttggttatatttttcacaagaacaagaaatcctgtgggaatttcatgacatatttagaaacttctgtaaagatgtagtttcaaataagaaagttatgaaaaaactacaagagtcaagatttgacatcatttttgcagatgctttttttccttgtggtgagctgctggctgcactacttaacataccgtttgtgtacagtctctgcttcactcctggctacacaattgaaaggcacagtggaggactgattttccctccttcctacatacctgttgttatgtcaaaattaagtgatcaaatgactttcatggagagggtaaaaaacatgatctatgtgctttattttgacttttggttccaaatgtgtgatatgaagaagtgggatcagttttacagtgaagttttaggaagacccactaccttatttgagacaatggggaaagctgacatatggcttatgcgaaactcctggagttttcaatttcctcatccattcttaccaaacattgattttgttggaggactccactgcaaacctgccaaacccctacctaaggaaatggaggaatttgtacagagctctggtgaaaatggtgttgtggtgttttctctggggtcagtgataagtaacatgacagcagaaagggccaacgtaattgcaacagcccttgccaagatcccacaaaaggttctgtggagatttgatgggaataaaccagatgccttaggtctcaatactcggctgtataagtggataccccagaatgaccttctaggtcwtccaaaaaccagagcttttataactcatggtggagccaatggcatctatgaggcaatctaccatgggatccctatggtgggcattccattgttttgggatcaacctgataacattgctcacatgaaggccaagggagcagctgttagactggacttccacacaatgtcgagtacagacctgctgaatgcactgaagacagtaattaatgatccttcatataaagagaatgttatgaaattatcaagaattcaacatgatcaaccagtaaagcccctggatcgagcagtcttctggattgaatttgtgatgtgccacaaaggagccaaacaccttcgagttgcagcccgtgacctcacctggttccagtaccactctttggatgtgattgggtttctgctggcctgtgtggcaactgtgatatttgtcgtcacaaagttttgtctgttttgtttctggaagtttgctagaaaagggaagaagggaaaaagagattagttatgtctgacatttgaagctggaaaaccagatagatgggttgacatcagtttattccagcaagaaagaaaagattgttatgcaagatttctttcttcctgtgacaaaaaaaaaaacttttcaaaatctaccttgtcaagtaaaaatttgtttttcagagatttaccacccaggtaatggttagaaatattctgtggcaatgaagaaaacactagggaaaataaaaaataatataaagcca

SEQ ID NO: 3715 - DNA, 1481 bp, Homo sapiens
ggatggctctgaaatggacttcagttcttctgctgatacatctcggttgttactttagctctgggagttgtggaaaggtgctggtgtggaccggtgaatacagccattggatgaatatgaagacaatcctgaaagagcttgttcagagaggtcatgaggtgactgtactggcatcttcagcttccattctttttgatcccaatgacgcattcactcttaaactcgaagtttatcctacatctttaactaaaactgaatttgagaatatcatcatgcaacaggttaagagatggtcagacattcaaaaagatagcttttggttccaaatgtgtgatatgaagaagtgggatcagttttacagtgaagttttaggaagacccactaccttatttgagacaatggggaaagctgacatatggcttatgcgaaactcctggagttttcaatttcctcatccattcttaccaaacattgattttgttggaggactccactgcaaacctgccaaacccctacctaaggaaatggaggaatttgtacagagctctggtgaaaatggtgttgtggtgttttctctggggtcagtgataagtaacatgacagcagaaagggccaacgtaattgcaacagcccttgccaagatcccacaaaaggttctgtggagatttgatgggaataaaccagatgccttaggtctcaatactcggctgtataagtggataccccagaatgaccttctaggtcwtccaaaaaccagagcttttataactcatggtggagccaatggcatctatgaggcaatctaccatgggatccctatggtgggcattccattgttttgggatcaacctgataacattgctcacatgaaggccaagggagcagctgttagactggacttccacacaatgtcgagtacagacctgctgaatgcactgaagacagtaattaatgatccttcatataaagagaatgttatgaaattatcaagaattcaacatgatcaaccagtaaagcccctggatcgagcagtcttctggattgaatttgtgatgtgccacaaaggagccaaacaccttcgagttgcagcccgtgacctcacctggttccagtaccactctttggatgtgattgggtttctgctggcctgtgtggcaactgtgatatttgtcgtcacaaagttttgtctgttttgtttctggaagtttgctagaaaagggaagaagggaaaaagagattagttatgtctgacatttgaagctggaaaaccagatagatgggttgacatcagtttattccagcaagaaagaaaagattgttatgcaagatttctttcttcctgtgacaaaaaaaaaaacttttcaaaatctaccttgtcaagtaaaaatttgtttttcagagatttaccacccaggtaatggttagaaatattctgtggcaatgaagaaaacactagggaaaataaaaaataatataaagcc

SEQ ID NO: 3716 - DNA, 1648 bp, Homo sapiens
ggatggctctgaaatggacttcagttcttctgctgatacatctcggttgttactttagctctgggagttgtggaaaggtgctggtgtggaccggtgaatacagccattggatgaatatgaagacaatcctgaaagagcttgttcagagaggtcatgaggtgactgtactggcatcttcagcttccattctttttgatcccaatgacgcattcactcttaaactcgaagtttatcctacatctttaactaaaactgaatttgagaatatcatcatgcaacaggttaagagatggtcagacattcaaaaagatagcttttggttatatttttcacaagaacaagaaatcctgtgggaatttcatgacatatttagaaacttctgtaaagatgtagtttcaaataagaaagttatgaaaaaactacaagagtcaagatttgacatcatttttgcagatgctttttttccttgtggtgagctgctggctgcactacttaacataccgtttgtgtacagtctctgcttcactcctggctacacaattgaaaggcacagtggaggactgattttccctccttcctacatacctgttgttatgtcaaaattaagtgatcaaatgactttcatggagagggtaaaaaacatgatctatgtgctttattttgacttttggttccaaatgtgtgatatgaagaagtgggatcagttttacagtgaagttttaggaagacccactaccttatttgagacaatggggaaagctgacatatggcttatgcgaaactcctggagttttcaatttcctcatccattcttaccaaacattgattttgttggaggactccactgcaaacctgccaaacccctacctaaggaaatggaggaatttgtacagagctctggtgaaaatggtgttgtggtgttttctctggggtcagtgataagtaacatgacagcagaaagggccaacgtaattgcaacagcccttgccaagatcccacaaaaggttctgtggagatttgatgggaataaaccagatgccttaggtctcaatactcggctgtataagtggataccccagaatgaccttctaggtcwtccaaaaaccagagcttttataactcatggtggagccaatggcatctatgaggcaatctaccatgggatccctatggtgggcattccattgttttgggatcaacctgataacattgctcacatgaaggccaagggagcagctgttagactggacttccacacaatgtcgagtacagacctgctgaatgcactgaagacagtaattaatgatccttcgtgagtagaacagtatttttcactaggtggtatttgtagatagcttctcttttcaatagtgagcatgagtttcatcctttttataagagagtaatcttgaaagaatttaaatgatttaaccaatctgaaatctgctttgttttttatctgttatttaaaaattgtgcttgaatcccatacatctaatgagtaaccagttagtgaarcaattttctaaacaaaaataattttaaaatgtcatagataatataaaaaatacatttcttaaaattttaacataacgaatccatagtagaaaggaagaataaacttgaaatattataaaatgttttaatt

SEQ ID NO: 3717 - DNA, 2258 bp, Homo sapiens
ggaacttgcctcatgtgtgtgtatgtgtgtgtgtgtgattgtgggtgtgggtagtttaacctttttatatcttagctgcctgtaaactcagtgattgctacgttcagatcaaaccttgaacttttttttttctggtgccaggagccttcctgtgctccccattgcctgccagaaccaccaccgtttcccatggttactctacagcagcttcactgcctgaaaatgaaaactgaacaaagggattaaattgtgagaacaactgtcaatctattatatatttgtacaatctggtattaaaatgctttccccaaaagatattctgcgaaaagatctgaagttggtccatggttatcccatgacctgtgcttttgcaagcaactgggaaaaaattgaacagttccatagcagaccagatgacattgtgatagccacttatcctaaatcaggtactacttgggttagtgaaattatagacatgattctaaatgatggagatattgaaaaatgtaagcgaggttttattactgaaaaagttccaatgttggaaatgactctccctggattaagaacatcaggtatagaacaattggagaagaatccatcaccccggattgtgaaaacacrtctaccgactgatcttcttcctaaatctttctgggaaaacaattgcaagatgatttatctggctcgtaatgccaaggatgtttcagtctcatattaccattttgacttaatgaataatttacagccttttcctggtacctgggaagaatatctggagaaattcttaactggaaaagtggcctatggttcctggtttactcatgttaaaaactggtggaagaaaaaggaagaacacccaatactttttttgtactatgaagatatgaaagagaatccaaaggaggaaatcaagaagatcattagatttctagagaagaacctgaatgatgagatcttggataggatcatccatcacacctcatttgaagtgatgaaggacaatcctttggtaaattatacacatctaccaactacagtgatggatcatagcaaatccccttttatgcgtaaagggayggctggtgactggaagaattacttcaccgtggcccaaaatgagaaatttgatgctatttatgagacagaaatgtccaaaactgcacttcaattccgcacagagatttaaagtgtctaaatcacamatctgaagaaataagagattgtctgtagttgattgaaacgagggcagttatgaattgatttgggcaatcaaatgaatttataaaggagaataatatgcttttaatatgttgattcttttcaatgttattaatcagatcccagttttgttcckttgattctgagtttccaaattctctaaggctaawgttcattgttaactttttgtaacaaaggaacaatgtaaccacaggctcttcctgcctttttctacactagtactgataagaaagaagggatttattttacttaatctcccatatattatgatttagaattaagttcccctccctagtaccatggtccaagaaatgctgttttcataatgagactatatttcctaactctgccccaatttccctttgccgaaaatttgacccaggacactgtgttccactgctgtctaccgagtttcaagttgttctctgagtcatagctcatcttcctgcagtgcctctatttggataacaaagttcatgtccccgatcatgtagttcagattttggaaatmttttttctatatcatacctaatgtctaagtctccgaaaggcaaacgcctacaatagtctctgtaggattggttacctgggaactggagctctgttctgaaaagcagccctgagggctgtgacctacttcttatggggagtcctctttttcccaacagacccgtttgaacttcagagaaatcacctactgctgtgttctggtcaccatttgggaacttcagttacttaatcttatatttggatagatttggataccttaatagcacctttaatatcctagacatgatcataacctctgcaaaatatttcccaatctggtgcccaaggaagactctctaggctgaatctccactctgccctcttgacccaatgttccttctacttattattacatgcttatatctatttgtgtggtctctgatctatgttttcttggaacatttatatatatatatatatatatatatatatatatatatatatatatatatgtacattttattatt

SEQ ID NO: 3718 - DNA, 2004 bp, Homo sapiens
aacaactgtcaatctattatatatttgtacaatctggtattaaaatgctttccccaaaagatattctgcgaaaagatctgaagttggtccatggttatcccatgacctgtgcttttgcaagcaactgggaaaaaattgaacagttccatagcagaccagatgacattgtgatagccacttatcctaaatcaggtactacttgggttagtgaaattatagacatgattctaaatgatggagatattgaaaaatgtaagcgaggttttattactgaaaaagttccaatgttggaaatgactctccctggattaagaacatcaggtatagaacaattggagaagaatccatcaccccggattgtgaaaacacrtctaccgactgatcttcttcctaaatctttctgggaaaacaattgcaagatgatttatctggctcgtaatgccaaggatgtttcagtctcatattaccattttgacttaatgaataatttacagccttttcctggtacctgggaagaatatctggagaaattcttaactggaaaagtggcctatggttcctggtttactcatgttaaaaactggtggaagaaaaaggaagaacacccaatactttttttgtactatgaagatatgaaagagaatccaaaggaggaaatcaagaagatcattagatttctagagaagaacctgaatgatgagatcttggataggatcatccatcacacctcatttgaagtgatgaaggacaatcctttggtaaattatacacatctaccaactacagtgatggatcatagcaaatccccttttatgcgtaaagggayggctggtgactggaagaattacttcaccgtggcccaaaatgagaaatttgatgctatttatgagacagaaatgtccaaaactgcacttcaattccgcacagagatttaaagtgtctaaatcacamatctgaagaaataagagattgtctgtagttgattgaaacgagggcagttatgaattgatttgggcaatcaaatgaatttataaaggagaataatatgcttttaatatgttgattcttttcaatgttattaatcagatcccagttttgttcckttgattctgagtttccaaattctctaaggctaawgttcattgttaactttttgtaacaaaggaacaatgtaaccacaggctcttcctgcctttttctacactagtactgataagaaagaagggatttattttacttaatctcccatatattatgatttagaattaagttcccctccctagtaccatggtccaagaaatgctgttttcataatgagactatatttcctaactctgccccaatttccctttgccgaaaatttgacccaggacactgtgttccactgctgtctaccgagtttcaagttgttctctgagtcatagctcatcttcctgcagtgcctctatttggataacaaagttcatgtccccgatcatgtagttcagattttggaaatmttttttctatatcatacctaatgtctaagtctccgaaaggcaaacgcctacaatagtctctgtaggattggttacctgggaactggagctctgttctgaaaagcagccctgagggctgtgacctacttcttatggggagtcctctttttcccaacagacccgtttgaacttcagagaaatcacctactgctgtgttctggtcaccatttgggaacttcagttacttaatcttatatttggatagatttggataccttaatagcacctttaatatcctagacatgatcataacctctgcaaaatatttcccaatctggtgcccaaggaagactctctaggctgaatctccactctgccctcttgacccaatgttccttctacttattattacatgcttatatctatttgtgtggtctctgatctatgttttcttggaacatttatatatatatatatatatatatatatatatatatatatatatatatatgtacattttattatt

SEQ ID NO: 3719 - DNA, 2099 bp, Homo sapiens
caagrttataaaaattactttatttcaaatgtgaaaatataaaaaccacttacatataaaatttaagagtattgaaagatctaaaatttaattttcagctttagctccttacaaatatacttaaattgaatgaaattgaatggaattaacctaagtgtccatcaactgataagtggataaagaaaatgtggtatatatgtaccatggactattactcagccataaagaagaataatgtattttgcagcaacttggacggaactgggggctgttatcctaagggaagtaactcaggaatggaaaaccaaatactgcatgttctcacttataagtggaagcttagctgtaggtacacaagaacatacacagtggtataagggatgttggagactcagaagggaagagggcggaaggagggtaatggatgaaaaattacctattgggtacaatgtacatcactcaggtgacaagtacattaaaagccgagtcttcaccactacacaattcacccctgtaagcaaaaagtgtgtacccctaaagctattaaaataaaaaattttaaagatactatatccataacaggcatacatttgaagaatattaatccttaagaggggaaaataattacattttttcactggtaaaaagcgcagaactgcagtgttcagtttgtagactgaccaacaccctctccattccaaagggttactcagagacaattataggaacctcgttgttgttggcagtgactggtgaaatggccacattacccatttctgaacaataagacatgaggagacatgaggagaggtttgctgtgagaagctctgaaaaagagttattcaagtctatgaaggagactcaaaaaatggctcattttcttcctctggttgctatgaggtttgaaggggcccatgaaacagctacagccatcatgctaccagagtctgagaatgaagccagcgctaaagatggcagagcagagagctgggaagaacccagatccctggtgacgtactgaagtgctggagcctggcctgtttgaacgtctagttatgtgggaatatacatttccttattgcttaagccatttgaattaggagtttctgttacttgcagccaaaagcttcccaactgaaacaaggaagaaaggtagagaaaaagcaagcattaacagacagttataaggtattgggtgttttctaaaatttatcctcttgacaaatcaatttcatttatagtaattttaagtttacagaatctcctcgcctctgaattgtcattaaccattttttatactatcatatctaacaatctgtcctctcacatattattgctgacaaagaaaaccgaaagaagaaaatcagcaaaatctagctgtcttttaaggtgcaaatagatagtttctcttttacaaccagtttcacggtaacggcagtatgctttttctgatgggtgcctgtagagatggcacatgaaggaaagaattctaaaatcttctaatacattttgaaagataaatatacagctaagcaccttcttaaaactcataatatatccttcgcttccttgcttcctgaccatattaggagcattcatatacatttttaataacttgtttttttgagatggaatctctctctgtcacccaggctggagtgcagtggcacaatctcggctcactgcaacctctgcctcctgggttcaagtaattctcctgccccagcctcccaagtagctgggactacaggaccacacccagctaatttttgtattttttagtagagatggggtttcaccatgttggccaggctggtctcaaattcctcacgtcaggtgatccatctgcctcggcctcccaaagtgctaggattacaggcgggtggatcacttgaggacaggagttcgaggacaggagttcgagaccagcttggccaatatggcgaaactccatctctacaaaaaatatagaaagtagctgggcgtggtggcacacgcctataatcccagctactcaggaagctgaggcaggagaattgcttaaagttgcagtgagccaagatcgcaccatggcactccagcctgggtgacagagagag

SEQ ID NO: 3720 - DNA, 3698 bp, Homo sapiens
gtgcttccggtccgcgagccctgagagctaacttggggtcttttcccaaggtggatgtagaagcgggctccggcgtcccactctcccttccatatgggcttagcgtctgggtcactgagaacgacgtctgaatagggccctgggtccttgccatggatgaatgtggttcccgcatccgccggcgggtgtctctccccaaaaggaaccgtccaagcttggggtgtatttttggcgctcccaccgcggccgagctcgagcccggagatgaggggaaagaggaggaggaaatggtggctgagaacaggaggcggaaaaccgcgggcgtactgccggttgaggtacagccccttctactctcagattccccggaatgtctcgtccttggaggtggtgatacaaacccggacctcctacgtcacatgcccactgacagaggggtgggagaccagcctaatgacagtgaagtggacatgtttggtgactatgatagctttactgaaaactcctttatagctcaagttgacgacctggaacaaaaatatatgcaactccctgaacataagaaacatgctacagactttgccactgaaaatctttgctcggaaagtatcaaaaacaaactcagcattactaccataggcaaccttactgaattacaaactgataagcacacagagaaccagagtggatatgaaggtgtcactattgaacctggagctgatcttttgtatgatgtaccttcctcacaggctatatactttgaaaatttgcagaactcttcaaatgatttgggtgatcattctatgaaagaaagggattggaagtcatcctctcacaacactgtgaatgaggaactgccccataattgcatagagcaaccccagcaaaatgatgagtcctcttccaaagtcagaactagttcagatatgaacaggagaaaaagtattaaagatcatctaaaaaatgccatgactggaaatgcgaaggcccagacaccaatattttctagaagtaaacagctcaaagacactctcctatctgaggaaattaatgttgctaagaaaacarttgagtcatcatcaaatgaccttggtcctttttattcattacccagcaaaatatgtgtcattttagaccaagaagggacagttgctgccatactggagggtcagccccatcaaccttccacttcagaagacaatcaggttggagaagcagaactacaggaaacaaagtctaataaaagactctacaagaatccaaattgtgaggttcatggcttaagagctaatgaatggcaacatacttgtttaacaytgaattctgtgcaagaaagaaaaaatttaatatattccttgccaacaagtggtggaaaaaccctcgtggctgagattttaatgctgcaagaactgctttgctgtcggaaagatgttttaatgattcttccatatgtggcaattgtccaagaaaagatttcaggtttgtcaagttttggtatagaactcggtttctttgttgaagaatatgctggaagcaaaggaagatttcctccaactaaaagaagggaaaagaaatcactctatattgccactattgaaaaaggacatagcttggtgaactccttgattgaaactggaagaattgacagtctgggtctggttgttgtagacgagttgcacatgattggtgaaggaagccgtggagctacactggaaatgaccctagcaaaaatcctctacactagcaaaacgactcaaattatyggtatgagtgcaacattaaacaatgttgaagacctacaaaagtttcttcaagcagaatattataccagtcaatttagaccagttgagttaaaagaatatctgaaaataaatgatacaatatatgaagttgacagcaaagctgagaatggcatgactttttcacgtcttcttaattataagtattctgataccctaaaaaagatggatcctgatcacttggtagcattggtgacagaagttattcccaattattcctgcttagttttttgtcctagtaagaagaactgtgaaaatgtagcagaaatgatatgcaaatttttaagcaaggaatatctgaaacataaggagaaagaaaaatgtgaggtgattaagaacttgaagaatattggcaatggcaacctgtgtcctgttttaaagcgcactatcccatttggagttgcctatcaccacagtggcttaacaagtgatgaaaggaaactcttggaggaggcctactccacaggagtgctctgtctttttacctgcacatctaccctagcggcaggtgtcaacctaccagctcgaagagttattttaagagctccctatgttgctaaggaatttttaaagaggaatcaatataaacagatgattggcagagctggtcgtgctggaatagatactattggggagagtatcctcatattgcaagaaaaagacaaacaacaggtattggagttaataactaaaccattggaaaactgttacagccatcttgttcaggaattcaccaagggaatccaaacattatttctctctttgattggtttgaagattgcaacgaatcttgatgacatctatcatttcatgaatggtacattttttggtgttcagcaaaaggttttattgaaagaaaaaagtctctgggaaataactgttgaatcacttagatacctgacagaaaaaggactcctacaaaaagacactatttataagtctgaagaagaggtccaatataattttcatattacaaagttgggacgtgcttcatttaagggaactatagatttagcttattgtgacattctgtacagagacttgaagaaaggtcttgaaggacttgtgcttgaaagccttcttcatctaatctacctaacaaccccctatgatctggtttcacagtgtaaccctgattggatgatatacttcaggcagtttagccaactcagtccagcagaacaaaatgtagctgccattcttggagtctctgaaagctttattgggaagaaagcatcaggccaagccatcggaaagaaggtggacaagaacgttgtcaacaggctatatctgtcttttgttctttataccttgctcaaagagaccaacatttggactgtatctgaaaaatttaatatgcctcgaggatatatacaaaatcttctcactggaactgcctcattctcatcttgtgtgttacatttctgtgaggagcttgaggagttttgggtttacagagcccttttggtagaacttaccaagaagctgacttactgtgtaaaggcagaattaatccctctcatggaagttactggagttttagagggtcgagcaaaacagttatacagtgcaggttacaaaagtctaatgcacttagctaatgcaaatcctgaagtgctcgtaaggacaattgatcatttatcaagacgccaagccaagcaaattgtttcatcagcaaagatgctgttgcatgaaaaagcagaagccctgcaagaagaggtagaagagttactaagattgccttctgatttccctggtgctgtggcttcttccactgacaaagcatgaagctatctgatgagaattttcatatatgaattatttattgtacatgtgtgttattaaagataacttatactttataaatgaaaaaatacatttcagttatacattaagaac

SEQ ID NO: 3721 - DNA, 1673 bp, Homo sapiens
gtgcttccggtccgcgagccctgagagctaacttggggtcttttcccaaggtggatgtagaagcgggctccggcgtcccactctcccttccatatgggcttagcgtctgggtcactgagaacgacgtctgaatagggccctgggtccttgccatggatgaatgtggttcccgcatccgccggcgggtgtctctccccaaaaggaaccgtccaagcttggggtgtatttttggcgctcccaccgcggccgagctcgagcccggagatgaggggaaagaggaggaggaaatggtggctgagaacaggaggcggaaaaccgcgggcgtactgccggttgaggtacagccccttctactctcagattccccggaatgtctcgtccttggaggtggtgatacaaacccggacctcctacgtcacatgcccactgacagaggggtgggagaccagcctaatgacagtgaagtggacatgtttggtgactatgatagctttactgaaaactcctttatagctcaagttgacgacctggaacaaaaatatatgcaactccctgaacataagaaacatgctacagactttgccactgaaaatctttgctcggaaagtatcaaaaacaaactcagcattactaccataggcaaccttactgaattacaaactgataagcacacagagaaccagagtggatatgaaggtgtcactattgaacctggagctgatcttttgtatgatgtaccttcctcacaggctatatactttgaaaatttgcagaactcttcaaatgatttgggtgatcattctatgaaagaaagggattggaagtcatcctctcacaacactgtgaatgaggaactgccccataattgcatagagcaaccccagcaaaatgatgagtcctcttccaaagtcagaactagttcagatatgaacaggagaaaaagtattaaagatcatctaaaaaatgccatgactggaaatgcgaaggcccagacaccaatattttctagaagtaaacagctcaaagacactctcctatctgaggaaattaatgttgctaagaaaacarttgagtcatcatcaaatgaccttggtcctttttattcattacccagcaaaatatgtgtcattttagaccaagaagggacagttgctgccatactggagggtcagccccatcaaccttccacttcagaagacaatcaggttggagaagcagaactacaggaaacaaagtctaataaaagactctacaagaatccaaattgtgaggttcatggcttaagagctaatgaatggcaacatacttgtttaacaytgaattctgtgcaagaaagaaaaaatttaatatattccttgccaacaagtggtggaaaaaccctcgtggctgagattttaatgctgcaagaactgctttgctgtcggaaagatgttttaatgattcttccatatgtggcaattgtccaagaaaagatttcaggtttgtcaagttttggtatagaactcggtttctttgttgaagaatatgctggaagcaaaggaagatttcctccaactaaaagaagggaaaagaaatcactctatattgccactattgaaaaaggacatagcttggtgaactccttgattgaaactggaagaattgacagtctgggtctggttgttgtagacgag

SEQ ID NO: 3722 - DNA, 3078 bp, Homo sapiens
gtgcttccggtccgcgagccctgagagctaacttggggtcttttcccaaggtggatgtagaagcgggctccggcgtcccactctcccttccatatgggcttagcgtctgggtcactgagaacgacgtctgaatagggccctgggtccttgccatggatgaatgtggttcccgcatccgccggcgggtgtctctccccaaaaggaaccgtccaagcttggggtgtatttttggcgctcccaccgcggccgagctcgagcccggagatgaggggaaagaggaggaggaaatggtggctgagaacaggaggcggaaaaccgcgggcgtactgccggttgaggtacagccccttctactctcagattccccggaatgtctcgtccttggaggtggtgatacaaacccggacctcctacgtcacatgcccactgacagaggggtgggagaccagcctaatgacagtgaagtggacatgtttggtgactatgatagctttactgaaaactcctttatagctcaagttgacgacctggaacaaaaatatatgcaactccctgaacataagaaacatgctacagactttgccactgaaaatctttgctcggaaagtatcaaaaacaaactcagcattactaccataggcaaccttactgaattacaaactgataagcacacagagaaccagagtggatatgaaggtgtcactattgaacctggagctgatcttttgtatgatgtaccttcctcacaggctatatactttgaaaatttgcagaactcttcaaatgatttgggtgatcattctatgaaagaaagggattggaagtcatcctctcacaacactgtgaatgaggaactgccccataattgcatagagcaaccccagcaaaatgatgagtcctcttccaaagtcagaactagttcagatatgaacaggagaaaaagtattaaagatcatctaaaaaatgccatgactggaaatgcgaaggcccagacaccaatattttctagaagtaaacagctcaaagacactctcctatctgaggaaattaatgttgctaagaaaacarttgagtcatcatcaaatgaccttggtcctttttattcattacccagcaaagtgagagacctttatgcccaattcaagggaattgaaaaattatatgaatggcaacatacttgtttaacaytgaattctgtgcaagaaagaaaaaatttaatatattccttgccaacaagtggtggaaaaaccctcgtggctgagattttaatgctgcaagaactgctttgctgtcggaaagatgttttaatgattcttccatatgtggcaattgtccaagaaaaggtgtgtgtgtgtttgtcaagttttggtatagaactcggtttctttgttgaagaatatgctggaagcaaaggaagatttcctccaactaaaagaagggaaaagaaatcactctatattgccactattgaaaaaggacatagcttggtgaactccttgattgaaactggaagaattgacagtctgggtctggttgttgtagacgagttgcacatgattggtgaaggaagccgtggagctacactggaaatgaccctagcaaaaatcctctacactagcaaaacgactcaaattatyggtatgagtgcaacattaaacaatgttgaagacctacaaaagtttcttcaagcagaatattataccagtcaatttagaccagtaggtttcatgtttactaaccactttgttcctacatcttgttgttttgcagtattctgataccctaaaaaagatggatcctgatcacttggtagcattggtgacagaagttattcccaattattcctgcttagttttttgtcctagtaagaagaactgtgaaaatgtagcagaaatgatatgcaaatttttaagcaaggaatatctgaaacataaggagaaagaaaaatgtgaggtgattaagaacttgaagaatattggcaatggcaacctgtgtcctgttttaaagcgcactatcccatttggagttgcctatcaccacagtggcttaacaagtgatgaaaggaaactcttggaggaggcctactccacaggagtgctctgtctttttacctgcacatctaccctagcggcaggtgtcaacctaccagctcgaagagttattttaagagctccctatgttgctaaggaatttttaaagaggaatcaatataaacagatgattggcagagctggtcgtgctggaatagatactattggggagagtatcctcatattgcaagaaaaagacaaacaacaggtattggagttaataactaaaccattggaaaactgttacagccatcttgttcaggaattcaccaagggaatccaaacattatttctctctttgattggtttgaagattgcaacgaatcttgatgacatctatcatttcatgaatggtacattttttggtgttcagcaaaaggttttattgaaagaaaaaagtctctgggaaataactgttgaatcacttagatacctgacagaaaaaggactcctacaaaaagacactatttataagtctgaagaagaggtccaatataattttcatattacaaagttgggacgtgcttcatttaagggaactatagatttagcttattgtgacattctgtacagagacttgaagaaaggtcttgaaggacttgtgcttgaaagccttcttcatctaatctacctaacaaccccctatgatctggtttcacagtgtaaccctgattggatgatatacttcaggcagtttagccaactcagtccagcagaacaaaatgtagctgccattcttggagtctctgaaagctttattgggaagaaagcatcaggccaagccatcggaaagaaggtggacaagaacgttgtcaacaggctatatctgtcttttgttctttataccttgctcaaagagaccaacatttggactgtatctgaaaaatttaatatgcctcgaggatatatacaaaatcttctcactggaactgcctcattctcatcttgtgtgttacatttctgtgaggtaatttcattgaatatatga

SEQ ID NO: 3723 - DNA, 3569 bp, Homo sapiens
gtgcttccggtccgcgagccctgagagctaacttggggtcttttcccaaggtggatgtagaagcgggctccggcgtcccactctcccttccatatgggcttagcgtctgggtcactgagaacgacgtctgaatagggccctgggtccttgccatggatgaatgtggttcccgcatccgccggcgggtgtctctccccaaaaggaaccgtccaagcttggggtgtatttttggcgctcccaccgcggccgagctcgagcccggagatgaggggaaagaggaggaggaaatggtggctgagaacaggaggcggaaaaccgcgggcgtactgccggttgaggtacagccccttctactctcagattccccggaatgtctcgtccttggaggtggtgatacaaacccggacctcctacgtcacatgcccactgacagaggggtgggagaccagcctaatgacagtgaagtggacatgtttggtgactatgatagctttactgaaaactcctttatagctcaagttgacgacctggaacaaaaatatatgcaactccctgaacataagaaacatgctacagactttgccactgaaaatctttgctcggaaagtatcaaaaacaaactcagcattactaccataggcaaccttactgaattacaaactgataagcacacagagaaccagagtggatatgaaggtgtcactattgaacctggagctgatcttttgtatgatgtaccttcctcacaggctatatactttgaaaatttgcagaactcttcaaatgatttgggtgatcattctatgaaagaaagggattggaagtcatcctctcacaacactgtgaatgaggaactgccccataattgcatagagcaaccccagcaaaatgatgagtcctcttccaaagtcagaactagttcagatatgaacaggagaaaaagtattaaagatcatctaaaaaatgccatgactggaaatgcgaaggcccagacaccaatattttctagaagtaaacagctcaaagacactctcctatctgaggaaattaatgttgctaagaaaacarttgagtcatcatcaaatgaccttggtcctttttattcattacccagcaaagtgagagacctttatgcccaattcaagggaattgaaaaattatatgaatggcaacatacttgtttaacaytgaattctgtgcaagaaagaaaaaatttaatatattccttgccaacaagtggtggaaaaaccctcgtggctgagattttaatgctgcaagaactgctttgctgtcggaaagatgttttaatgattcttccatatgtggcaattgtccaagaaaagatttcaggtttgtcaagttttggtatagaactcggtttctttgttgaagaatatgctggaagcaaaggaagatttcctccaactaaaagaagggaaaagaaatcactctatattgccactattgaaaaaggacatagcttggtgaactccttgattgaaactggaagaattgacagtctgggtctggttgttgtagacgagttgcacatgattggtgaaggaagccgtggagctacactggaaatgaccctagcaaaaatcctctacactagcaaaacgactcaaattatyggtatgagtgcaacattaaacaatgttgaagacctacaaaagtttcttcaagcagaatattataccagtcaatttagaccagttgagttaaaagaatatctgaaaataaatgatacaatatatgaagttgacagcaaagctgagaatggcatgactttttcacgtcttcttaattataagtattctgataccctaaaaaagatggatcctgatcacttggtagcattggtgacagaagttattcccaattattcctgcttagttttttgtcctagtaagaagaactgtgaaaatgtagcagaaatgatatgcaaatttttaagcaaggaatatctgaaacataaggagaaagaaaaatgtgaggtgattaagaacttgaagaatattggcaatggcaacctgtgtcctgttttaaagcgcactatcccatttggagttgcctatcaccacagtggcttaacaagtgatgaaaggaaactcttggaggaggcctactccacaggagtgctctgtctttttacctgcacatctaccctagcggcaggtgtcaacctaccagctcgaagagttattttaagagctccctatgttgctaaggaatttttaaagaggaatcaatataaacagatgattggcagagctggtcgtgctggaatagatactattggggagagtatcctcatattgcaagaaaaagacaaacaacaggtattggagttaataactaaaccattggaaaactgttacagccatcttgttcaggaattcaccaagggaatccaaacattatttctctctttgattggtttgaagattgcaacgaatcttgatgacatctatcatttcatgaatggtacattttttggtgttcagcaaaaggttttattgaaagaaaaaagtctctgggaaataactgttgaatcacttagatacctgacagaaaaaggactcctacaaaaagacactatttataagtctgaagaagaggtccaatataattttcatattacaaagttgggacgtgcttcatttaagggaactatagatttagcttattgtgacattctgtacagagacttgaagaaaggtcttgaaggacttgtgcttgaaagccttcttcatctaatctacctaacaaccccctatgatctggtttcacagtgtaaccctgattggatgatatacttcaggcagtttagccaactcagtccagcagaacaaaatgtagctgccattcttggagtctctgaaagctttattgggaagaaagcatcaggccaagccatcggaaagaaggtggacaagaacgttgtcaacaggctatatctgtcttttgttctttataccttgctcaaagagaccaacatttggactgtatctgaaaaatttaatatgcctcgaggatatatacaaaatcttctcactggaactgcctcattctcatcttgtgtgttacatttctgtgaggagcttgaggagttttgggtttacagagcccttttggtagaacttaccaagaagctgacttactgtgtaaaggcagaattaatccctctcatggaagttactggagttttagagggtcgagcaaaacagttatacagtgcaggttacaaaagtctaatgcacttagctaatgcaaatcctgaagtgctcgtaaggacaattgatcatttatcaagacgccaagccaagcaaattgtttcatcagcaaagatgctgttgcatgaaaaagcagaagccctgcaagaagaggtagaagagttactaagattgccttctgatttccctggtgctgtggcttcttccactgacaaagcatgaagctatctgatgagaattttcatatatgaattatttattgtacatgtgtgttattaaagataacttatactttataaatgaaaaaatacatttcagttatacattaagaac

SEQ ID NO: 3724 - DNA, 2019 bp, Homo sapiens
tggggctcggcgggaggaagtgctagagctctcgactctccgctgcgcggcagctggcggggggagcagccaggtgagcccaagatgctgctgcgctcgaagcctgcgctgccgccgccgctgatgctgctgctcctggggccgctgggtcccctctcccctggcgccctgccccgacctgcgcaagcacaggacgtcgtggacctggacttcttcacccaggagccgctgcacctggtgagcccctcgttcctgtccgtcaccattgacgccaacctggccacggacccgcggttcctcatcctcctgggttctccaaagcttcgtaccttggccagaggcttgtctcctgcgtacctgaggtttggtggcaccaagacagacttcctaattttcgatcccaagaaggaatcaacctttgaagagagaagttactggcaatctcaagtcaaccaggatatttgcaaatatggatccatccctcctgatgtggaggagaagttacggttggaatggccctaccaggagcaattgctactccgagaacactaccagaaaaagttcaagaacagcacctactcaagaagctctgtagatgtgctatacacttttgcaaactgctcaggactggacttgatctttggcctaaatgcgttattaagaacagcagatttgcagtggaacagttctaatgctcagttgctcctggactactgctcttccaaggggtataacatttcttgggaactaggcaatgaacctaacagtttccttaagaaggstgatattttcatcaatgggtcgcagttaggagaagattttattcaattgcataaacttctaagaaagtccaccttcaaaaatgcaaaactctatggtcctgatgttggtcagcctcgaagaaagacggctaagatgctgaagagcttcctgaaggctggtggagaagtgattgattcagttacatggcatcactactatttgaatggacggactgctaccagggaagattttctaaaccctgatgtattggacatttttatttcatctgtgcaaaaagttttccaggtggttgagagcaccaggcctggcaagaaggtctggttaggagaaacaagctctgcatatggaggcggagcgcccttgctatccgacacctttgcagctggctttatgtggctggataaattgggcctgtcagcccgaatgggaatagaagtggtgatgaggcaagtattctttggagcaggaaactaccatttagtggatgaaaacttcgatcctttacctgattattggctatctcttctgttcaagaaattggtgggcaccaaggtgttaatggcaagcgtgcaaggttcaaagagaaggaagcttcgagtataccttcattgcacaaacactgacaatccaaggtataaagaaggagatttaactctgtatgccataaacctccataaygtcaccaagtacttgcggttaccctatcctttttctaacaagcaagtggataaataccttctaagacctttgggacctcatggattactttccaaatctgtccaactcaatggtctaactctaaagatggtggatgatcaaaccttgccacctttaatggaaaaacctctccggccaggaagttcactgggcttgccagctttctcatatagtttttttgtgataagaaatgccaaagttgctgcttgcatctgaaaataaaatatactagtcctgacactgaatttttcaagtatactaagagtaaagcaactcaagttataggaaaggaagcagataccttgcaaagcaactagtgggtgcttgagagacactgggacactgtcagtgctagatttagcacagtattttgatctcgctaggtagaacactgctaataataatagctaataataccttgttccaaatactgcttagcattttgcatgttttacttttatctaaagttttgttttgttttattatttatttatttatttattttgagacagaatctct

SEQ ID NO: 3725 - DNA, 3647 bp, Homo sapiens
tggggctcggcgggaggaagtgctagagctctcgactctccgctgcgcggcagctggcggggggagcagccaggtgagcccaagatgctgctgcgctcgaagcctgcgctgccgccgccgctgatgctgctgctcctggggccgctgggtcccctctcccctggcgccctgccccgacctgcgcaagcacaggacgtcgtggacctggacttcttcacccaggagccgctgcacctggtgagcccctcgttcctgtccgtcaccattgacgccaacctggccacggacccgcggttcctcatcctcctgggttctccaaagcttcgtaccttggccagaggcttgtctcctgcgtacctgaggtttggtggcaccaagacagacttcctaattttcgatcccaagaaggaatcaacctttgaagagagaagttactggcaatctcaagtcaaccaggatatttgcaaatatggatccatccctcctgatgtggaggagaagttacggttggaatggccctaccaggagcaattgctactccgagaacactaccagaaaaagttcaagaacagcacctactcaagaagctctgtagatgtgctatacacttttgcaaactgctcaggactggacttgatctttggcctaaatgcgttattaagaacagcagatttgcagtggaacagttctaatgctcagttgctcctggactactgctcttccaaggggtataacatttcttgggaactaggcaatgaacctaacagtttccttaagaaggstgatattttcatcaatgggtcgcagttaggagaagattttattcaattgcataaacttctaagaaagtccaccttcaaaaatgcaaaactctatggtcctgatgttggtcagcctcgaagaaagacggctaagatgctgaagagcttcctgaaggctggtggagaagtgattgattcagttacatggcatcactactatttgaatggacggactgctaccagggaagattttctaaaccctgatgtattggacatttttatttcatctgtgcaaaaagttttccaggtggttgagagcaccaggcctggcaagaaggtctggttaggagaaacaagctctgcatatggaggcggagcgcccttgctatccgacacctttgcagctggctttatgtggctggataaattgggcctgtcagcccgaatgggaatagaagtggtgatgaggcaagtattctttggagcaggaaactaccatttagtggatgaaaacttcgatcctttacctgattattggctatctcttctgttcaagaaattggtgggcaccaaggtgttaatggcaagcgtgcaaggttcaaagagaaggaagcttcgagtataccttcattgcacaaacactgacaatccaaggtataaagaaggagatttaactctgtatgccataaacctccataaygtcaccaagtacttgcggttaccctatcctttttctaacaagcaagtggataaataccttctaagacctttgggacctcatggattactttccaaatctgtccaactcaatggtctaactctaaagatggtggatgatcaaaccttgccacctttaatggaaaaacctctccggccaggaagttcactgggcttgccagctttctcatatagtttttttgtgataagaaatgccaaagttgctgcttgcatctgaaaataaaatatactagtcctgacactgaatttttcaagtatactaagagtaaagcaactcaagttataggaaaggaagcagataccttgcaaagcaactagtgggtgcttgagagacactgggacactgtcagtgctagatttagcacagtattttgatctcgctaggtagaacactgctaataataatagctaataataccttgttccaaatactgcttagcattttgcatgttttacttttatctaaagttttgttttgttttattatttatttatttatttattttgagacagaatctctctcaaaaaaacaagttattaaaaatgtatatgaatgctcctaatatggtcaggaagcaaggaagcgaaggatatattatgagttttaagaaggtgcttagctgtatatttatctttcaaaatgtattagaagattttagaattctttccttcatgtgccatctctacaggcacccatcagaaaaagcatactgccgttaccgtgaaactggttgtaaaagagaaactatctatttgcaccttaaaagacagctagattttgctgattttcttctttcggttttctttgtcagcaataatatgtgagaggacagattgttagatatgatagtataaaaaatggttaatgacaattcagaggcgaggagattctgtaaacttaaaattactataaatgaaattgatttgtcaagaggataaattttagaaaacacccaataccttataactgtctgttaatgcttgctttttctctacctttcttccttgtttcagttgggaagcttttggctgcaagtaacagaaactcctaattcaaatggcttaagcaataaggaaatgtatattcccacataactagacgttcaaacaggccaggctccagcacttcagtacgtcaccagggatctgggttcttcccagctctctgctctgccatctttagcgctggcttcattctcagactctggtagcatgatggctgtagctgtttcatgggccccttcaaacctcatagcaaccagaggaagaaaatgagccattttttgagtctccttcatagacttgaataactctttttcagagcttctcacagcaaacctctcctcatgtctcctcatgtcttattgttcagaaatgggtaatgtggccatttcaccagtcactgccaacaacaacgaggttcctataattgtctctgagtaaccctttggaatggagagggtgttggtcagtctacaaactgaacactgcagttctgcgctttttaccagtgaaaaaatgtaattattttcccctcttaaggattaatattcttcaaatgtatgcctgttatggatatagtatctttaaaattttttattttaatagctttaggggtacacactttttgcttacaggggtgaattgtgtagtggtgaagactcggcttttaatgtacttgtcacctgagtgatgtacattgtacccaataggtaatttttcatccattaccctccttccgccctcttcccttctgagtctccaacatcccttataccactgtgtatgttcttgtgtacctacagctaagcttccacttataagtgagaacatgcagtatttggttttccattcctgagttacttcccttaggataacagcccccagttccgtccaagttgctgcaaaatacattattcttctttatggctgagtaatagtccatggtacatatataccacattttctttatccacttatcagttgatggacacttaggttaattccattcaatttcattcaatttaagtatatttgtaaggagctaaagctgaaaattaaattttagatctttcaatactcttaaattttatatgtaagtggtttttatattttcacatttgaaataaagtaatttttataaycttg

SEQ ID NO: 3726 - DNA, 3699 bp, Homo sapiens
cagcgctgctccccgggcgctcctccccgggcgctcctccccaggcctcccgggcgcttggatcccggccatctccgcacccttcaagtgggtgtgggtgatttcctggcggggggagcagccaggtgagcccaagatgctgctgcgctcgaagcctgcgctgccgccgccgctgatgctgctgctcctggggccgctgggtcccctctcccctggcgccctgccccgacctgcgcaagcacaggacgtcgtggacctggacttcttcacccaggagccgctgcacctggtgagcccctcgttcctgtccgtcaccattgacgccaacctggccacggacccgcggttcctcatcctcctgggttctccaaagcttcgtaccttggccagaggcttgtctcctgcgtacctgaggtttggtggcaccaagacagacttcctaattttcgatcccaagaaggaatcaacctttgaagagagaagttactggcaatctcaagtcaaccaggatatttgcaaatatggatccatccctcctgatgtggaggagaagttacggttggaatggccctaccaggagcaattgctactccgagaacactaccagaaaaagttcaagaacagcacctactcaagaagctctgtagatgtgctatacacttttgcaaactgctcaggactggacttgatctttggcctaaatgcgttattaagaacagcagatttgcagtggaacagttctaatgctcagttgctcctggactactgctcttccaaggggtataacatttcttgggaactaggcaatgaacctaacagtttccttaagaaggstgatattttcatcaatgggtcgcagttaggagaagattttattcaattgcataaacttctaagaaagtccaccttcaaaaatgcaaaactctatggtcctgatgttggtcagcctcgaagaaagacggctaagatgctgaagagcttcctgaaggctggtggagaagtgattgattcagttacatggcatcactactatttgaatggacggactgctaccagggaagattttctaaaccctgatgtattggacatttttatttcatctgtgcaaaaagttttccaggtggttgagagcaccaggcctggcaagaaggtctggttaggagaaacaagctctgcatatggaggcggagcgcccttgctatccgacacctttgcagctggctttatgtggctggataaattgggcctgtcagcccgaatgggaatagaagtggtgatgaggcaagtattctttggagcaggaaactaccatttagtggatgaaaacttcgatcctttacctgattattggctatctcttctgttcaagaaattggtgggcaccaaggtgttaatggcaagcgtgcaaggttcaaagagaaggaagcttcgagtataccttcattgcacaaacactgacaatccaaggtataaagaaggagatttaactctgtatgccataaacctccataaygtcaccaagtacttgcggttaccctatcctttttctaacaagcaagtggataaataccttctaagacctttgggacctcatggattactttccaaatctgtccaactcaatggtctaactctaaagatggtggatgatcaaaccttgccacctttaatggaaaaacctctccggccaggaagttcactgggcttgccagctttctcatatagtttttttgtgataagaaatgccaaagttgctgcttgcatctgaaaataaaatatactagtcctgacactgaatttttcaagtatactaagagtaaagcaactcaagttataggaaaggaagcagataccttgcaaagcaactagtgggtgcttgagagacactgggacactgtcagtgctagatttagcacagtattttgatctcgctaggtagaacactgctaataataatagctaataataccttgttccaaatactgcttagcattttgcatgttttacttttatctaaagttttgttttgttttattatttatttatttatttattttgagacagaatctctctcaaaaaaacaagttattaaaaatgtatatgaatgctcctaatatggtcaggaagcaaggaagcgaaggatatattatgagttttaagaaggtgcttagctgtatatttatctttcaaaatgtattagaagattttagaattctttccttcatgtgccatctctacaggcacccatcagaaaaagcatactgccgttaccgtgaaactggttgtaaaagagaaactatctatttgcaccttaaaagacagctagattttgctgattttcttctttcggttttctttgtcagcaataatatgtgagaggacagattgttagatatgatagtataaaaaatggttaatgacaattcagaggcgaggagattctgtaaacttaaaattactataaatgaaattgatttgtcaagaggataaattttagaaaacacccaataccttataactgtctgttaatgcttgctttttctctacctttcttccttgtttcagttgggaagcttttggctgcaagtaacagaaactcctaattcaaatggcttaagcaataaggaaatgtatattcccacataactagacgttcaaacaggccaggctccagcacttcagtacgtcaccagggatctgggttcttcccagctctctgctctgccatctttagcgctggcttcattctcagactctggtagcatgatggctgtagctgtttcatgggccccttcaaacctcatagcaaccagaggaagaaaatgagccattttttgagtctccttcatagacttgaataactctttttcagagcttctcacagcaaacctctcctcatgtctcctcatgtcttattgttcagaaatgggtaatgtggccatttcaccagtcactgccaacaacaacgaggttcctataattgtctctgagtaaccctttggaatggagagggtgttggtcagtctacaaactgaacactgcagttctgcgctttttaccagtgaaaaaatgtaattattttcccctcttaaggattaatattcttcaaatgtatgcctgttatggatatagtatctttaaaattttttattttaatagctttaggggtacacactttttgcttacaggggtgaattgtgtagtggtgaagactcggcttttaatgtacttgtcacctgagtgatgtacattgtacccaataggtaatttttcatccattaccctccttccgccctcttcccttctgagtctccaacatcccttataccactgtgtatgttcttgtgtacctacagctaagcttccacttataagtgagaacatgcagtatttggttttccattcctgagttacttcccttaggataacagcccccagttccgtccaagttgctgcaaaatacattattcttctttatggctgagtaatagtccatggtacatatataccacattttctttatccacttatcagttgatggacacttaggttaattccattcaatttcattcaatttaagtatatttgtaaggagctaaagctgaaaattaaattttagatctttcaatactcttaaattttatatgtaagtggtttttatattttcacatttgaaataaagtaatttttataaycttg

SEQ ID NO: 3727 - DNA, 1539 bp, Homo sapiens
tgccggggaatgacgtcaatccgagctcgtcccggcctcaccagcgccatgctgggctcgcgagccgcggggttcgcgcggggcctgcgggctttggcactggcgtggctgccgggctggcggggccgctccttcgccctggcgcgtgcggcaggcgcgccccacggtggtgacttgcagccccccgcctgtcccgagccgcgcgggcgccagctcagtttgtccgcggcggcggtggtggactctgcgccccgccccctgcagccgtacttgcgcctcatgcggttggacaagcccattggaacctggcttctgtatttaccatgtacctggagcattggtttggcagctgaaccaggttgttttccagattggtacatgctctccctctttggcactggagctattctgatgcgtggagcaggctgtactattaatgacatgtgggaccaggactatgataaaaaggttacaagaacagccaatcgtccaatagccgctggagacatttcaacttttcagtcctttgtttttcttgggggacagctaaccctggcactgggtgttcttctgtgtctaaattactacagtatagctctgggagcaggatccttacttcttgtcatcacctacccactaatgaaaagaatttcatactggcctcaactagccttgggcttgacatttaattggggagcgttacttggatggtctgctatcaagggttcctgtgatccatctgtttgcctgcctctttatttttctggagttatgtggacactaatatatgacactatttatgcccatcaggacaaaagagatgatgttttgattggtcttaagtcaacggctctgcggttcggagaaaataccaagccgtggctcagyggcttcagtgttgcaatgctgggggcactgagcctagtgggtgtgaacagtggacagactgctccctactacgctgccctgggtgctgtaggagcccatctgactcaccagatttacactctagacatccacagacctgaggattgttggaataaatttatctccaaccgaacactgggactaatagtttttttagggattgtccttgggaatttgtggaaagaaaagaagacagacaaaacaaagaagggtatagagaataaaatagaaaattaatgaatgaaatttatctaggaatttttaaaacattttttacaaaatataattagatttgaatacaaaatctgatacaatatgttaaagaattaagaacctgaagatgaagatttagagcatatttacctggattttacttatttgctagcaaaattcccccttgtcacagaaaccagggactcttcaggatttgagatggccttgagtattttagttgatacattcttctgcccattataattctcacctgaagttatggggattgcacgggttttggcactttagaaaaagcctgatgtgggtcttacataaatgaatgtctgtataagaaaatggactcttttttttagggaaaaataaaagcaactatgggaa

SEQ ID NO: 3728 - DNA, 1131 bp, Homo sapiens
tgccggggaatgacgtcaatccgagctcgtcccggcctcaccagcgccatgctgggctcgcgagccgcggggttcgcgcggggcctgcgggctttggcactggcgtggctgccgggctggcggggccgctccttcgccctggcgcgtgcggcaggcgcgccccacggtggtgacttgcagccccccgcctgtcccgagccgcgcgggcgccagctcagtttgtccgcggcggcggtggtggactctgcgccccgccccctgcagccgtacttgcgcctcatgcggttggacaagcccattggaacctggcttctgtatttaccatgtacctggagcattggtttggcagctgaaccaggttgttttccagattggtacatgctctccctctttggcactggagctattctgatgcgtggagcaggctgtactattaatgacatgtgggaccaggactatgataaaaaggttacaagaacagccaatcgtccaatagccgctggagacatttcaacttttcagtcctttgtttttcttgggggacagctaaccctggcactgggtgttcttctgtgtctaaattactacagtatagctctgggagcaggatccttacttcttgtcatcacctacccactaatgaaaagaatttcatactggcctcaactagccttgggcttgacatttaattggggagcgttacttggatggtctgctatcaagggttcctgtgatccatctgtttgcctgcctctttatttttctggagttatgtggacactaatatatgacactatttatgcccatcaggacaaaagagatgatgttttgattggtcttaagtcaacggctctgcggttcggagaaaataccaagccgtggctcagyggcttcagtgttgcaatgctgggggcactgagcctagtgggtgtgaacagtggacagactgctccctactacgctgccctgggtgctgtaggagcccatctgactcaccaggtttgacctttttcttatttgtccctcatatttccttggtataaattataaaaattatttaaacagtatgccctctgtgtttacctggcaaggaacttcttaaacaactacttggcttctactacctttaac

SEQ ID NO: 3729 - DNA, 1559 bp, Homo sapiens
tgccggggaatgacgtcaatccgagctcgtcccggcctcaccagcgccatgctgggctcgcgagccgcggggttcgcgcggggcctgcgggctttggcactggcgtggctgccgggctggcggggccgctccttcgccctggcgcgtgcggcaggcgcgccccacggtggtgacttgcagccccccgcctgtcccgagccgcgcgggcgccagctcagtttgtccgcggcggcggtggtggactctgcgccccgccccctgcagccgtacttgcgcctcatgcggttggacaagcccattggaacctggcttctgtatttaccatgtacctggagcattggtttggcagctgaaccaggttgttttccagattggtacatgctctccctctttggcactggagctattctgatgcgtggagcaggctgtactattaatgacatgtgggaccaggactatgataaaaaggttacaagaacagccaatcgtccaatagccgctggagacatttcaacttttcagtcctttgtttttcttgggggacagctaaccctggcactgggtgttcttctgtgtctaaattactacagtatagctctgggagcaggatccttacttcttgtcatcacctacccactaatgaaaagaatttcatactggcctcaactagccttgggcttgacatttaattggggagcgttacttggatggtctgctatcaagggttcctgtgatccatctgtttgcctgcctctttatttttctggagttatgtggacactaatatatgacactatttatgcccatcaggacaaaagagatgatgttttgattggtcttaagtcaacggctctgcggttcggagaaaataccaagccgtggctcagyggcttcagtgttgcaatgctgggggcactgagcctagtgggtgtgaacagtggacagactgctccctactacgctgccctgggtgctgtaggagcccatctgactcaccagaaatggggtcttgagattttgcccaggctggtctgaaattcctggcttcaagcaatcttcctgccctggtctcccaaaagtgctgggattaccagtgtgagctaccaaccccagccaaggtatattattttttaaaaataatataggcctaaatccaaattttcccatctgattttcctggaattacttctgattcatgtctggaaaaatttcagtgatatctgaagcttgtggtttgagttgaattactctaaaagcaaactgacagataaagcttttaaaaaaaaatctgggtttctagtgatggttagtagactaattattcataaatttggtttctgctggcataaagaccaaggacagataagacatgaaatgcggaacatgtcaaagttctgccagtagagagcaggaagctgtcatttcaggatattcacccacaccacatcccctacctgtcagaaacttatgttgagaatctacattgttgacttgtaaatgaatgaactaaatctaattttgattaaatcacttgctaataaattgactatatttttata

SEQ ID NO: 3730 - DNA, 1554 bp, Homo sapiens
tgccggggaatgacgtcaatccgagctcgtcccggcctcaccagcgccatgctgggctcgcgagccgcggggttcgcgcggggcctgcgggctttggcactggcgtggctgccgggctggcggggccgctccttcgccctggcgcgtgcggcaggcgcgccccacggtggtgacttgcagccccccgcctgtcccgagccgcgcgggcgccagctcagtttgtccgcggcggcggtggtggactctgcgccccgccccctgcagccgtacttgcgcctcatgcggttggacaagcccattggaacctggcttctgtatttaccatgtacctggagcattggtttggcagctgaaccaggttgttttccagattggtacatgctctccctctttggcactggagctattctgatgcgtggagcaggctgtactattaatgacatgtgggaccaggactatgataaaaaggttacaagaacagccaatcgtccaatagccgctggagacatttcaacttttcagtcctttgtttttcttgggggacagctaaccctggcactgggtgttcttctgtgtctaaattactacagctctgggagcaggatccttacttcttgtcatcacctacccactaatgaaaagaatttcatactggcctcaactagccttgggcttgacatttaattggggagcgttacttggatggtctgctatcaagggttcctgtgatccatctgtttgcctgcctctttatttttctggagttatgtggacactaatatatgacactatttatgcccatcaggacaaaagagatgatgttttgattggtcttaagtcaacggctctgcggttcggagaaaataccaagccgtggctcagyggcttcagtgttgcaatgctgggggcactgagcctagtgggtgtgaacagtggacagactgctccctactacgctgccctgggtgctgtaggagcccatctgactcaccagaaatggggtcttgagattttgcccaggctggtctgaaattcctggcttcaagcaatcttcctgccctggtctcccaaaagtgctgggattaccagtgtgagctaccaaccccagccaaggtatattattttttaaaaataatataggcctaaatccaaattttcccatctgattttcctggaattacttctgattcatgtctggaaaaatttcagtgatatctgaagcttgtggtttgagttgaattactctaaaagcaaactgacagataaagcttttaaaaaaaaatctgggtttctagtgatggttagtagactaattattcataaatttggtttctgctggcataaagaccaaggacagataagacatgaaatgcggaacatgtcaaagttctgccagtagagagcaggaagctgtcatttcaggatattcacccacaccacatcccctacctgtcagaaacttatgttgagaatctacattgttgacttgtaaatgaatgaactaaatctaattttgattaaatcacttgctaataaattgactatatttttata

SEQ ID NO: 3731 - DNA, 964 bp, Homo sapiens
ctctgggagcaggatccttacttcttgtcatcacctacccactaatgaaaagaatttcatactggcctcaactagccttgggcttgacatttaattggggagcgttacttggatggtctgctatcaagggttcctgtgatccatctgtttgcctgcctctttatttttctggagttatgtggacactaatatatgacactatttatgcccatcaggacaaaagagatgatgttttgattggtcttaagtcaacggctctgcggttcggagaaaataccaagccgtggctcagyggcttcagtgttgcaatgctgggggcactgagcctagtgggtgtgaacagtggacagactgctccctactacgctgccctgggtgctgtaggagcccatctgactcaccagaaatggggtcttgagattttgcccaggctggtctgaaattcctggcttcaagcaatcttcctgccctggtctcccaaaagtgctgggattaccagtgtgagctaccaaccccagccaaggtatattattttttaaaaataatataggcctaaatccaaattttcccatctgattttcctggaattacttctgattcatgtctggaaaaatttcagtgatatctgaagcttgtggtttgagttgaattactctaaaagcaaactgacagataaagcttttaaaaaaaaatctgggtttctagtgatggttagtagactaattattcataaatttggtttctgctggcataaagaccaaggacagataagacatgaaatgcggaacatgtcaaagttctgccagtagagagcaggaagctgtcatttcaggatattcacccacaccacatcccctacctgtcagaaacttatgttgagaatctacattgttgacttgtaaatgaatgaactaaatctaattttgattaaatcacttgctaataaattgactatatttttata

SEQ ID NO: 3732 - DNA, 4998 bp, Homo sapiens
aaggtttctccgtggtgttttggaaggtcccggcacggctaccgtcgccccacgctaggaaattttttttttattttcaacctttgttacatagcactgaggctacaagatcatagttcatttaaagcccccatccctgcaaggtggtgctttctrccaatatgaatcttttcaacctggaccgttttcgctttgagaaaaggaataagattgaggaagcgcccgaagcaacccctcaaccttcccagcctggcccttcttcaccaatttctcttagtgctgaagaggagaatgctgaaggggaagttagcagggcaaacactcctgattcagatataactgaaaaaacagaagattctagtgttccagaaactccagataatgaaagaaaagcaagtatatcatatttcaaaaatcaaagaggaatacagtatattgatttgtcttctgatagtgaagatgtcgtttccccaaattgctccaatacagttcaagagaaaacattcaacaaagatacagtgattatagtttctgagccatctgaagatgaagagtcccaaggcyttcctaccatggcaygtagaaatgatgatatttcagaactggaagacctttcggaattggaagaccttaaagatgctaaacttcagactttgaaggaactttttccacaaagaagtgacaatgatttacttaagttgattgaatcaacaagcactatggatggagcaattgctgctgccttgctgatgtttggtgatgcaggtggtgggcccaggaaaagaaaattatcttcttcttcagagccatatgaggaagatgaatttaatgatgatcaatctataaaaaagacaagactggatcatggagaggaatcaaatgagtctgcagaatctagcartaattgggaaaagcaggaaagtattgtactgaaattgcaaaaggaatttcccaattttgataaacaggaacttagagaagtactcaaggaacatgaatggatgtacacagaagctttagaatctctaaaagtgtttgcagaagaccaagatatgcaatatgyatcacaaagtgaggttccaaatggaaaagaagtttcttcaagaagtcaaaattaccctaaaaatgcaactaaaacaaaactaaaacagaaattttcaatgaaagcacaaaatggctttaacaagaaacgtaaaaaaaatgtttttaakccaaagagagttgttgaagactctgaatatgattcaggttctgatgtcggtagttcactagatgaggactatagtagtggtgaagaagtgatggaggatggctataaaggtaaaattcttcacttccttcaagatgcttcaattggtgaacttactttgattcctcagtgttctcagaaaaaggctcagaagataacagaactccggccctttaatagttgggaggctctgttcrcaaagatgtccaaaactaatggcttatcagaagatttgatatggcactgtaaaacactgatccaagaaagagatgtagttataaggcttatgaacaaatgtgaagacatttcaaataaattgaccaaacaagttaccatgcttactggaaatggaggtggatggaacatagaacaaccttccattctaaaccaragtttgtcactcaagccctatcagaaggttggtttgaattggctggcattggtacataaacatggacttaatggcattttggcagatgaaatgggcctaggaaaaactattcaagccattgcatttctggcatacctctatcaggagggtaataatggtcctcatttgatcgktgttccagcttcaactatagataactggttaagggaagttaatttatggtgccctactttgaaggtcctctgttactatggttctcaagaagaacgtaaacaaattagatttmacattcatagtagatatgaagattacaatgtaattgtgaccacatataactgtgcgatcagcagttctgatgaycgtagtctgtttcgacggctgaaacttaattacgcaatttttgatgagggccatatgctgaagaatatgggctccattcgctaccagcaccttatgacaattaatgcaaataaccgtttgctgctcacaggcacacctgtacagaacaatctgttagaactcatgtcgctgttgaattttgttatgccacacatgtttagtagtagcaccagtgaaatacgaagaatgttttcctctaagacaaaatcagcagatgagcaaagcatatatgaaaaggagagaatagcacatgcaaaacaaattataaagccatttattctcagaagagtaaaagaagaggttctcaagcagttaccccccaagaaagatcgaattgagttgtgtgcaatgtcggagaagcaggagcaactctatttgggtcttttcaacagattgaaaaaatctatcaataayttggaaaaaaacacagaaatgtgcaatgtcatgatgcagttgaggaaaatggccaatcatcctttattacatcgccaatattacacagctgaaaaactcaaggaaatgtctcagcttatgctaaaggaacctacacattgtgaggctaaccctgacctgatctttgaagatatggaagttatgacagacttcgaactacatgtactttgtaaacagtaccgacacattaataactttcagttagacatggacttgattttagattctggaaaatttcgagttttaggatgcatcttgtctgaattgaaacagaagggtgatagagttgtgttatttagccaatttaccatgatgctggatatcttagaggttctattaaaacatcatcagcataggtacctcagattagatggaaagactcagatttctgaaaggattcatctaattgatgagtttaataccgatatggatatctttgtgtttctgctatcaacaaaagctggtggattaggaataaatctgacttcagcaaatgttgttatacttcacgatattgactgtaatccttataatgacaaacaagcagaagatagatgccatagagtaggccagactaaagaagtactagttataaaactaataagccaagggacgattgaagaatccatgctaaaaattaaccaacagaaattgaaactagaacaggatatgactacagtagatgaaggtgatgaagggagtatgccagcagatatagccacattactaaaaacatcaatgggcctgtgaaataagaactgtgaactctcaattgatgaggaaatatcaacttggtgcactcaaggacatttacattatgatgaccatggggtttatgaacatttataactttttataatttccatattacatttctcatagtatggacaactttttgccactaactgaattctccaaatactcacacgtgaaatttcaaaaaagaagccacaaatatgtagttctgaagatgttgaataatcattttacaaagcagttttctgaatggggattagttggtgattgtttgtaacaaatatgctaatgctttagaaatgtcagtatttttgtaattatttctacctccaaatatatatatattgtctttcactggataatgtgtgtagatttttacatgtgccttatttgacaatgcttatgtcttgtttttgcttgtctcatttgaagttcttttttattatgttaaagaatgcagctgtatagattatatagctttcattttattgctatttgaagcagatgttcaccaatgtcagcaagaactcaacctgaatttaaaggtggcattccatatactaacatcccccaggtcctctcaagtacttctgctgaaacaaatttatttggctaggcactaagttgttttccagtgaatagtaactaaagaagcccctaccttgctccatggattaattccttctgttcattttccaactgcactaattgtgcatattactctgcctaatcttgtgcatgttttcattgatttccctctcccggcttttgcttctcttgaaactgttgcccagtcacttctgctccaattctcttcctctctaaatagtagtttattactgccacatctccatgcatcagcaaaatgttggtgacatttttctagcctggcagaacagattacttaaagctatttcayttcaaagcagactgaatgtgacttcatctaaaggcagcattaggtactgcatggaaataggtcattaacttgaaactcttatcaaaatatattttaccagtttccagaatttccagtacaggaccgcctgaagagagagccattgttcaattccaattcagtgtgagtgacaaagtgaaatttagaagtgaagttgtctatttgatatttaactctttattaaatctttctttaaatttctgcctgtcagtctatattgctgtttttattatacatmagtttctttgtataacttgtgagttccatgtgttttgtttttattatgtaaatatcattataaataaacttatttataaatcaaagatttgttaatttttggaaatcatgcttttcaaagcatcctaacttgctaagatgctaggtagtacgaccctctggatttggaaggcaaataaaactcttacagtgattatttagatattaaagactgagaactcacggcttaaccccagtcttgatggtatattgaacagactgaatatattttaccattacagggctaaaaggagtcttcrtgtgttaatactacctccttgtacatcactatacccaaatcagttattcaaattgttaggaattttaccttttaaaatctcataatggatatctcatgttttctgtattaatgtattttcaatgataggctgtttctttttttkttgttattgttgttgttgttatatccatacttttatctctaatgaaatgtagttgggttcttcctgtaatgcgctattatgtcttgggcttaataaaaatatttgtgatcat

SEQ ID NO: 3733 - DNA, 2999 bp, Homo sapiens
cgcgccgcgtcaacttccgggcggatgcccgccagcacggcctccgccgctccccttctttggcccctttgtgtccccgcagtgtcgaggcgcgggccctggcaggtcctttctcgaggcagggggcacggtagcacagggagcttctctttgtgggcgggcgcgaggcccgctagggggttatactggggaacgtgcctgcgcgtgcttggatagttcatttaaagcccccatccctgcaaggtggtgctttctrccaatatgaatcttttcaacctggaccgttttcgctttgagaaaaggaataagattgaggaagcgcccgaagcaacccctcaaccttcccagcctggcccttcttcaccaatttctcttagtgctgaagaggagaatgctgaaggggaagttagcagggcaaacactcctgattcagatataactgaaaaaacagaagattctagtgttccagaaactccagataatgaaagaaaagcaagtatatcatatttcaaaaatcaaagaggaatacagtatattgatttgtcttctgatagtgaagatgtcgtttccccaaattgctccaatacagttcaagagaaaacattcaacaaagatacagtgattatagtttctgagccatctgaagatgaagagtcccaaggcyttcctaccatggcaygtagaaatgatgatatttcagaactggaagacctttcggaattggaagaccttaaagatgctaaacttcagactttgaaggaactttttccacaaagaagtgacaatgatttacttaagttgattgaatcaacaagcactatggatggagcaattgctgctgccttgctgatgtttggtgatgcaggtggtgggcccaggaaaagaaaattatcttcttcttcagagccatatgaggaagatgaatttaatgatgatcaatctataaaaaagacaagactggatcatggagaggaatcaaatgagtctgcagaatctagcartaattgggaaaagcaggaaagtattgtactgaaattgcaaaaggaatttcccaattttgataaacaggaacttagagaagtactcaaggaacatgaatggatgtacacagaagctttagaatctctaaaagtgtttgcagaagaccaagatatgcaatatgyatcacaaagtgaggttccaaatggaaaagaagtttcttcaagaagtcaaaattaccctaaaaatgcaactaaaacaaaactaaaacagaaattttcaatgaaagcacaaaatggctttaacaagaaacgtaaaaaaaatgtttttaakccaaagagagttgttgaagactctgaatatgattcaggttctgatgtcggtagttcactagatgaggactatagtagtggtgaagaagtgatggaggatggctataaaggtaaaattcttcacttccttcaagatgcttcaattggtgaacttactttgattcctcagtgttctcagaaaaaggctcagaagataacagaactccggccctttaatagttgggaggctctgttcrcaaagatgtccaaaactaatggcttatcagaagatttgatatggcactgtaaaacactgatccaagaaagagatgtagttataaggcttatgaacaaatgtgaagacatttcaaataaattgaccaaacaagttaccatgcttactggaaatggaggtggatggaacatagaacaaccttccattctaaaccaragtttgtcactcaagccctatcagaaggttggtttgaattggctggcattggtacataaacatggacttaatggcattttggcagatgaaatgggcctaggaaaaactattcaagccattgcatttctggcatacctctatcaggagggtaataatggtcctcatttgatcgktgttccagcttcaactatagataactggttaagggaagttaatttatggtgccctactttgaaggtcctctgttactatggttctcaagaagaacgtaaacaaattagatttmacattcatagtagatatgaagattacaatgtaattgtgaccacatataactgtgcgatcagcagttctgatgaycgtagtctgtttcgacggctgaaacttaattacgcaatttttgatgagggccatatgctgaagaatatgggctccattcgctaccagcaccttatgacaattaatgcaaataaccgtttgctgctcacaggcacacctgtacagaacaatctgttagaactcatgtcgctgttgaattttgttatgccacacatgtttagtagtagcaccagtgaaatacgaagaatgttttcctctaagacaaaatcagcagatgagcaaagcatatatgaaaaggagagaatagcacatgcaaaacaaattataaagccatttattctcagaagagtaaaagaagaggttctcaagcagttaccccccaagaaagatcgaattgagttgtgtgcaatgtcggagaagcaggagcaactctatttgggtcttttcaacagattgaaaaaatctatcaataayttggaaaaaaacacagaaatgtgcaatgtcatgatgcagttgaggaaaatggccaatcatcctttattacatcgccaatattacacagctgaaaaactcaaggaaatgtctcagcttatgctaaaggaacctacacattgtgaggctaaccctgacctgatctttgaagatatggaagttatgacagacttcgaactacatgtactttgtaaacagtaccgacacattaataactttcagttagacatggacttgattttagattctggaaaatttcgagttttaggatgcatcttgtctgaattgaaacagaagggtgatagagttgtgttatttagccaatttaccatgatgctggatatcttagaggttctattaaaacatcatcagcataggtacctcagattagatggaaagactcagatttctgaaaggttggtataatt

SEQ ID NO: 3734 - DNA, 5004 bp, Homo sapiens
aaggtttctccgtggtgttttggaaggtcccggcacggctaccgtcgccccacgctaggaaattttttttttattttcaacctttgttacatagcactgaggctacaagatcatagttcatttaaagcccccatccctgcaaggtggtgctttctrccaatatgaatcttttcaacctggaccgttttcgctttgagaaaaggaataagattgaggaagcgcccgaagcaacccctcaaccttcccagcctggcccttcttcaccaatttctcttagtgctgaagaggagaatgctgaaggggaagttagcagggcaaacactcctgattcagatataactgaaaaaacagaagattctagtgttccagaaactccagataatgaaagaaaagcaagtatatcatatttcaaaaatcaaagaggaatacagtatattgatttgtcttctgatagtgaagatgtcgtttccccaaattgctccaatacagttcaagagaaaacattcaacaaagatacagtgattatagtttctgagccatctgaagatgaagagtcccaaggcyttcctaccatggcaygtagaaatgatgatatttcagaactggaagacctttcggaattggaagaccttaaagatgctaaacttcagactttgaaggaactttttccacaaagaagtgacaatgatttacttaagttgattgaatcaacaagcactatggatggagcaattgctgctgccttgctgatgtttggtgatgcaggtggtgggcccaggaaaagaaaattatcttcttcttcagagccatatgaggaagatgaatttaatgatgatcaatctataaaaaagacaagactggatcatggagaggaatcaaatgagtctgcagaatctagcartaattgggaaaagcaggaaagtattgtactgaaattgcaaaaggaatttcccaattttgataaacaggaacttagagaagtactcaaggaacatgaatggatgtacacagaagctttagaatctctaaaagtgtttgcagaagaccaagatatgcaatatgyatcacaaagtgaggttccaaatggaaaagaagtttcttcaagaagtcaaaattaccctaaaaatgcaactaaaacaaaactaaaacagaaattttcaatgaaagcacaaaatggctttaacaagaaacgtaaaaaaaatgtttttaakccaaagagagttgttgaagactctgaatatgattcaggttctgatgtcggtagttcactagatgaggactatagtagtggtgaagaagtgatggaggatggctataaaggtaaaattcttcacttccttcaagatgcttcaattggtgaacttactttgattcctcagtgttctcagaaaaaggctcagaagataacagaactccggccctttaatagttgggaggctctgttcrcaaagatgtccaaaactaatggcttatcagaagatttgatatggcactgtaaaacactgatccaagaaagagatgtagttataaggcttatgaacaaatgtgaagacatttcaaataaattgaccaaacaagttaccatgcttactggaaatggaggtggatggaacatagaacaaccttccattctaaaccaragtttgtcactcaagccctatcagaaggttggtttgaattggctggcattggtacataaacatggacttaatggcattttggcagatgaaatgggcctaggaaaaactattcaagccattgcatttctggcatacctctatcaggagggtaataatggtcctcatttgatcgktgttccagcttcaactatagataactggttaagggaagttaatttatggtgccctactttgaaggtcctctgttactatggttctcaagaagaacgtaaacaaattagatttmacattcatagtagatatgaagattacaatgtaattgtgaccacatataactgtgcgatcagcagttctgatgaycgtagtctgtttcgacggctgaaacttaattacgcaatttttgatgagggccatatgctgaagaatatgggctccattcgctaccagcaccttatgacaattaatgcaaataaccgtttgctgctcacaggcacacctgtacagaacaatctgttagaactcatgtcgctgttgaattttgttatgccacacatgtttagtagtagcaccagtgaaatacgaagaatgttttcctctaagacaaaatcagcagatgagcaaagcatatatgaaaaggagagaatagcacatgcaaaacaaattataaagccatttattctcagaagagtaaaagaagaggttctcaagcagttaccccccaagaaagatcgaattgagttgtgtgcaatgtcggagaagcaggagcaactctatttgggtcttttcaacagattgaaaaaatctatcaataayttggtcacagaaaaaaacacagaaatgtgcaatgtcatgatgcagttgaggaaaatggccaatcatcctttattacatcgccaatattacacagctgaaaaactcaaggaaatgtctcagcttatgctaaaggaacctacacattgtgaggctaaccctgacctgatctttgaagatatggaagttatgacagacttcgaactacatgtactttgtaaacagtaccgacacattaataactttcagttagacatggacttgattttagattctggaaaatttcgagttttaggatgcatcttgtctgaattgaaacagaagggtgatagagttgtgttatttagccaatttaccatgatgctggatatcttagaggttctattaaaacatcatcagcataggtacctcagattagatggaaagactcagatttctgaaaggattcatctaattgatgagtttaataccgatatggatatctttgtgtttctgctatcaacaaaagctggtggattaggaataaatctgacttcagcaaatgttgttatacttcacgatattgactgtaatccttataatgacaaacaagcagaagatagatgccatagagtaggccagactaaagaagtactagttataaaactaataagccaagggacgattgaagaatccatgctaaaaattaaccaacagaaattgaaactagaacaggatatgactacagtagatgaaggtgatgaagggagtatgccagcagatatagccacattactaaaaacatcaatgggcctgtgaaataagaactgtgaactctcaattgatgaggaaatatcaacttggtgcactcaaggacatttacattatgatgaccatggggtttatgaacatttataactttttataatttccatattacatttctcatagtatggacaactttttgccactaactgaattctccaaatactcacacgtgaaatttcaaaaaagaagccacaaatatgtagttctgaagatgttgaataatcattttacaaagcagttttctgaatggggattagttggtgattgtttgtaacaaatatgctaatgctttagaaatgtcagtatttttgtaattatttctacctccaaatatatatatattgtctttcactggataatgtgtgtagatttttacatgtgccttatttgacaatgcttatgtcttgtttttgcttgtctcatttgaagttcttttttattatgttaaagaatgcagctgtatagattatatagctttcattttattgctatttgaagcagatgttcaccaatgtcagcaagaactcaacctgaatttaaaggtggcattccatatactaacatcccccaggtcctctcaagtacttctgctgaaacaaatttatttggctaggcactaagttgttttccagtgaatagtaactaaagaagcccctaccttgctccatggattaattccttctgttcattttccaactgcactaattgtgcatattactctgcctaatcttgtgcatgttttcattgatttccctctcccggcttttgcttctcttgaaactgttgcccagtcacttctgctccaattctcttcctctctaaatagtagtttattactgccacatctccatgcatcagcaaaatgttggtgacatttttctagcctggcagaacagattacttaaagctatttcayttcaaagcagactgaatgtgacttcatctaaaggcagcattaggtactgcatggaaataggtcattaacttgaaactcttatcaaaatatattttaccagtttccagaatttccagtacaggaccgcctgaagagagagccattgttcaattccaattcagtgtgagtgacaaagtgaaatttagaagtgaagttgtctatttgatatttaactctttattaaatctttctttaaatttctgcctgtcagtctatattgctgtttttattatacatmagtttctttgtataacttgtgagttccatgtgttttgtttttattatgtaaatatcattataaataaacttatttataaatcaaagatttgttaatttttggaaatcatgcttttcaaagcatcctaacttgctaagatgctaggtagtacgaccctctggatttggaaggcaaataaaactcttacagtgattatttagatattaaagactgagaactcacggcttaaccccagtcttgatggtatattgaacagactgaatatattttaccattacagggctaaaaggagtcttcrtgtgttaatactacctccttgtacatcactatacccaaatcagttattcaaattgttaggaattttaccttttaaaatctcataatggatatctcatgttttctgtattaatgtattttcaatgataggctgtttctttttttkttgttattgttgttgttgttatatccatacttttatctctaatgaaatgtagttgggttcttcctgtaatgcgctattatgtcttgggcttaataaaaatatttgtgatcat

SEQ ID NO: 3735 - DNA, 4886 bp, Homo sapiens
atagttcatttaaagcccccatccctgcaaggtggtgctttctrccaatatgaatcttttcaacctggaccgttttcgctttgagaaaaggaataagattgaggaagcgcccgaagcaacccctcaaccttcccagcctggcccttcttcaccaatttctcttagtgctgaagaggagaatgctgaaggggaagttagcagggcaaacactcctgattcagatataactgaaaaaacagaagattctagtgttccagaaactccagataatgaaagaaaagcaagtatatcatatttcaaaaatcaaagaggaatacagtatattgatttgtcttctgatagtgaagatgtcgtttccccaaattgctccaatacagttcaagagaaaacattcaacaaagatacagtgattatagtttctgagccatctgaagatgaagagtcccaaggcyttcctaccatggcaygtagaaatgatgatatttcagaactggaagacctttcggaattggaagaccttaaagatgctaaacttcagactttgaaggaactttttccacaaagaagtgacaatgatttacttaagttgattgaatcaacaagcactatggatggagcaattgctgctgccttgctgatgtttggtgatgcaggtggtgggcccaggaaaagaaaattatcttcttcttcagagccatatgaggaagatgaatttaatgatgatcaatctataaaaaagacaagactggatcatggagaggaatcaaatgagtctgcagaatctagcartaattgggaaaagcaggaaagtattgtactgaaattgcaaaaggaatttcccaattttgataaacaggaacttagagaagtactcaaggaacatgaatggatgtacacagaagctttagaatctctaaaagtgtttgcagaagaccaagatatgcaatatgyatcacaaagtgaggttccaaatggaaaagaagtttcttcaagaagtcaaaattaccctaaaaatgcaactaaaacaaaactaaaacagaaattttcaatgaaagcacaaaatggctttaacaagaaacgtaaaaaaaatgtttttaakccaaagagagttgttgaagactctgaatatgattcaggttctgatgtcggtagttcactagatgaggactatagtagtggtgaagaagtgatggaggatggctataaaggtaaaattcttcacttccttcaagatgcttcaattggtgaacttactttgattcctcagtgttctcagaaaaaggctcagaagataacagaactccggccctttaatagttgggaggctctgttcrcaaagatgtccaaaactaatggcttatcagaagatttgatatggcactgtaaaacactgatccaagaaagagatgtagttataaggcttatgaacaaatgtgaagacatttcaaataaattgaccaaacaagttaccatgcttactggaaatggaggtggatggaacatagaacaaccttccattctaaaccaragtttgtcactcaagccctatcagaaggttggtttgaattggctggcattggtacataaacatggacttaatggcattttggcagatgaaatgggcctaggaaaaactattcaagccattgcatttctggcatacctctatcaggagggtaataatggtcctcatttgatcgktgttccagcttcaactatagataactggttaagggaagttaatttatggtgccctactttgaaggtcctctgttactatggttctcaagaagaacgtaaacaaattagatttmacattcatagtagatatgaagattacaatgtaattgtgaccacatataactgtgcgatcagcagttctgatgaycgtagtctgtttcgacggctgaaacttaattacgcaatttttgatgagggccatatgctgaagaatatgggctccattcgctaccagcaccttatgacaattaatgcaaataaccgtttgctgctcacaggcacacctgtacagaacaatctgttagaactcatgtcgctgttgaattttgttatgccacacatgtttagtagtagcaccagtgaaatacgaagaatgttttcctctaagacaaaatcagcagatgagcaaagcatatatgaaaaggagagaatagcacatgcaaaacaaattataaagccatttattctcagaagagtaaaagaagaggttctcaagcagttaccccccaagaaagatcgaattgagttgtgtgcaatgtcggagaagcaggagcaactctatttgggtcttttcaacagattgaaaaaatctatcaataayttggaaaaaaacacagaaatgtgcaatgtcatgatgcagttgaggaaaatggccaatcatcctttattacatcgccaatattacacagctgaaaaactcaaggaaatgtctcagcttatgctaaaggaacctacacattgtgaggctaaccctgacctgatctttgaagatatggaagttatgacagacttcgaactacatgtactttgtaaacagtaccgacacattaataactttcagttagacatggacttgattttagattctggaaaatttcgagttttaggatgcatcttgtctgaattgaaacagaagggtgatagagttgtgttatttagccaatttaccatgatgctggatatcttagaggttctattaaaacatcatcagcataggtacctcagattagatggaaagactcagatttctgaaaggattcatctaattgatgagtttaataccgatatggatatctttgtgtttctgctatcaacaaaagctggtggattaggaataaatctgacttcagcaaatgttgttatacttcacgatattgactgtaatccttataatgacaaacaagcagaagatagatgccatagagtaggccagactaaagaagtactagttataaaactaataagccaagggacgattgaagaatccatgctaaaaattaaccaacagaaattgaaactagaacaggatatgactacagtagatgaaggtgatgaagggagtatgccagcagatatagccacattactaaaaacatcaatgggcctgtgaaataagaactgtgaactctcaattgatgaggaaatatcaacttggtgcactcaaggacatttacattatgatgaccatggggtttatgaacatttataactttttataatttccatattacatttctcatagtatggacaactttttgccactaactgaattctccaaatactcacacgtgaaatttcaaaaaagaagccacaaatatgtagttctgaagatgttgaataatcattttacaaagcagttttctgaatggggattagttggtgattgtttgtaacaaatatgctaatgctttagaaatgtcagtatttttgtaattatttctacctccaaatatatatatattgtctttcactggataatgtgtgtagatttttacatgtgccttatttgacaatgcttatgtcttgtttttgcttgtctcatttgaagttcttttttattatgttaaagaatgcagctgtatagattatatagctttcattttattgctatttgaagcagatgttcaccaatgtcagcaagaactcaacctgaatttaaaggtggcattccatatactaacatcccccaggtcctctcaagtacttctgctgaaacaaatttatttggctaggcactaagttgttttccagtgaatagtaactaaagaagcccctaccttgctccatggattaattccttctgttcattttccaactgcactaattgtgcatattactctgcctaatcttgtgcatgttttcattgatttccctctcccggcttttgcttctcttgaaactgttgcccagtcacttctgctccaattctcttcctctctaaatagtagtttattactgccacatctccatgcatcagcaaaatgttggtgacatttttctagcctggcagaacagattacttaaagctatttcayttcaaagcagactgaatgtgacttcatctaaaggcagcattaggtactgcatggaaataggtcattaacttgaaactcttatcaaaatatattttaccagtttccagaatttccagtacaggaccgcctgaagagagagccattgttcaattccaattcagtgtgagtgacaaagtgaaatttagaagtgaagttgtctatttgatatttaactctttattaaatctttctttaaatttctgcctgtcagtctatattgctgtttttattatacatmagtttctttgtataacttgtgagttccatgtgttttgtttttattatgtaaatatcattataaataaacttatttataaatcaaagatttgttaatttttggaaatcatgcttttcaaagcatcctaacttgctaagatgctaggtagtacgaccctctggatttggaaggcaaataaaactcttacagtgattatttagatattaaagactgagaactcacggcttaaccccagtcttgatggtatattgaacagactgaatatattttaccattacagggctaaaaggagtcttcrtgtgttaatactacctccttgtacatcactatacccaaatcagttattcaaattgttaggaattttaccttttaaaatctcataatggatatctcatgttttctgtattaatgtattttcaatgataggctgtttctttttttkttgttattgttgttgttgttatatccatacttttatctctaatgaaatgtagttgggttcttcctgtaatgcgctattatgtcttgggcttaataaaaatatttgtgatcat

SEQ ID NO: 3736 - DNA, 4833 bp, Homo sapiens
ggcgccgcgggtcaggcagctgcgtgcgcgtctcctccaggcagcaaggggaacccgaggccgccggcgcccggaccatgtcgtctccggggccgtcgcagccgccggccgaggacccgccctggcccgcgcgcctcctgcgtgcgcctctggggctgctgcggctggaccccagcgggggcgcgctgctgctatgcggcctcgtagcgctgctgggctggagctggctgcggaggcgccgggcgcggggcatcccgcccgggcccacgccctggcctctggtgggcaacttcggtcacgtgctgctgcctcccttcctccggcggcggagctggctgagcagcaggaccagggccgcagggattgatccctcggtcataggcccgcaggtgctcctggctcacctagcccgcgtgtacggcagcatcttcagcttctttatcggccactacctggtggtggtcctcagcgacttccacagcgtgcgcgaggcgctggtgcagcaggccgaggtcttcagcgaccgcccgcgggtgccgctcatctccatcgtgaccaaggagaagggaatactgtttctcatcttcctttcttggtgtccctttgcaggggttgtgtttgcacattatggtcccgtctggagacaacaaaggaagttctctcattcaactcttcgtcattttgggttgggaaaacttagcttggagcccaagattattgaggagttcaaatatgtgaaagcagaaatgcaaaagcacggagaagaccccttctgccctttctccatcatcagcaatgccgtctctaacatcatttgctccttgtgctttggccagcgctttgattacactaatagtgagttcaagaaaatgcttggttttatgtcacgaggcctagaaatctgtctgaacagtcaagtcctcctggtcaacmtatgcccttggctttattaccttccctttggaccatttaaggaattaagacaaattgaaaaggatataaccagtttccttaaaaaaatcatcaaagaccatcaagagtctctggatagagagaaccctcaggacttcatagacatgtaccttctccacatggaagaggagaggaaaaataatagtaacagcagttttgatgaagagtacttattttatatcattggggatctctttattgctgggactgataccacaactaactctttgctctggtgcctgctgtatatgtcgctgaaccccgatgtacaagaaaagrttcatgaagaaattgaaagagtcattggcgccaaccgagctccttccctcacagacaaggcccagatgccctacacagaagccaccatcatggaagtgcagaggctaactgtggtggtgccgcttgccattcctcatatgacctcagagaacacaggcaacatactgaataacacccatatgtttccttttgttttagtgctccaagggtataccattcctaaaggcacattgatcttacccaacctgtggtcagtacatagagacccagccatttgggagaaaccggaggatttctaccctaatcgatttctggatgaccaaggacaactaattaaaaaagaaacctttattccttttgggatagggaagcgggtgtgtatgggagaacaactggcaaagatggaattattcctaatgtttgtgagcctaatgcagagtttcgcatttgctttacctgaggattctaagaagcccctcctgactggaagatttggtctaactttagccccacatccatttaatataactatttcaaggagatgaagagcatctccaagaagagatggtaaaaagrtatataaatacatatccttctaagcagattcttcctactgcaaaggacagtgaatccagcaactcagtggatccaagctgggctcagaggtcggaaggagggtagagcacactgggaggtttcatcttggaggattcctcagcaggatacttcagccattttagtaatgcaggtctgtgatttgggggatagaaaacaaagtacctatgaaacgggatatctggattttacttgcagtggcttccaccgatgggccaatcttctcatttcttagtgcctcagacatcccatatgtaaaatgagagtaataaaacttggcttctctctacctctcagcactaatgatggtcaaatgccttacatcttttctgatatctctaaaatgctgttaagttctggagaagaacttcaggagaagaagatctatcagctggcttttaaagacctatgacaacatgaaagtggtgttcagcctggaatgctttgtcagagatgggtgtggatttaggttatactgggggagaacttttctcagcacagattctatgccagcttctttgggcttgttctgtcactatctttttgtttatgattttagtttttactttttgtagatgtgggatgaagtggactctgtcgtgtatattgaggaaaaaagaaattataattttaaaaaatcccttgtaggattattatctaaatttatatgtctaacttctactacaactacaggaacagtgagccttgctacttctttagtagcttcttggcagaattcctttctactgagttatttgcaaagatgcagctctacctttttacttaaggcctgaatggtgagcatggggattttgatactgggactcatcaggaaaggattctgctttcaaactatactgaacattcctgtcctagcgtccctgccaccaggcccaatgcatctgatccttgaatatactctcaaagaattcactctckttttattaagagaactaaattgtttctaaatgtagatggtccctctggaaaagcagttttcagcaggggtggtaaccccttcagagggagtttggaaatgtgtgggtatgattcttggttatcataatgatgggggtgctactggccttctgctgccatgggaccaggatgctaaatgtcaaggtagtcctatacagtgaagaattgtcctgctcaagatgccaggatttcccccagtgagaacatgctctaaggaatgaccacccctttcttttattctcccacagtgctccatgtacagaagtaagcatagcagtcatatgagcaaccacattcctgaacctttcctcatgctggctctacacttaatcctttacttgtatgtttctgtaattcttacataaattctattaagagggtggcatactgtagtggatgaagctgaggcttatagtaggtaaggcacaaagttaaaaagtaacatcactgggtttcaaacctactggtctctgtgactaaagaacactttcagaaccacttcttgattctgccaccacttgatcccataacaggctaccccttggcctcatgctggagttgtgtgtgtctgtcttcatcccaggctgagctccttgaggtgaggatgttgtgctgtttgcctccctcacagtgccttggtcttagtggatgcccagtygtcttgtgaatgacttttaagamgtgtacttaagagaaaaatcctaccttatttgaataattacaagtcatgtttttgttgcttaaaggtgataaatcagtgtatattatttgttaatgtccattaaagccagtttttaaaaaaatcactggacttttgtgtttaccatttaaaacaaccattttaaacaaacttagaacgatgccttagctgtttataggtaacagaatgtaaactcccaccacctggagactaggccatatccagggacctcacactgactttcctaaaggagagaagcagctacgctgttcatactgatagagaagagggcaagaaaagatccagagtggctgttactttgaaaattaaacgaaagatgaaattctgaacttaaaacacttctgtttggccttctataactgatcacccttctttgctctgttttccagataaatggagacaccagatctccctaacctctgacttctgccgttagccatactctgtgtagttagatctcagtctgggaatggcattccagggcaattgtgaacatgaggctagatttttcctttgatttagcacattcctaggcagacttttgcaagctcaaaaaatgaaaataatatctgcttaaccaaaacataatcataggaagaagaaaaattttaaaatgattgatttttgactctacattctttatctaccatactgctcttttcctttttagaaatattactaagcactttcmgtatagataaatgaaatacaggctaatctttaggtgtcttaggaatttttgctttttgaaaaagaaaagctaatagcctaactgcagaggaactgagtggatggggtagctgctgtatagatttttagatgagatgatacagtgtggattacactgtaccttgggcgggagagtttgttcttgatatggaattcatatgcttttgaattgcactaataactcagcattaacaagtatattactccttaaattatacatgcattttcaatattcctaaccaaatagtttatagcttattgagaagaagtctgttcttggagagatgttgaaattagatgtttattaaactttaaaatataatgccttaagctgtggcactttaaaaacatctttatatataaattgctaaaaggactgttaatgcttttctcagacacattggcattttacaattttgcacatggtttatttgaaatcaaaaaataactatactttgttttataagtctacctaatatctcatttttgattctcatcgttagcacagttttgttgcttttattaaactattttaactg

SEQ ID NO: 3737 - DNA, 4749 bp, Homo sapiens
ggcgccgcgggtcaggcagctgcgtgcgcgtctcctccaggcagcaaggggaacccgaggccgccggcgcccggaccatgtcgtctccggggccgtcgcagccgccggccgaggacccgccctggcccgcgcgcctcctgcgtgcgcctctggggctgctgcggctggaccccagcgggggcgcgctgctgctatgcggcctcgtagcgctgctgggctggagctggctgcggaggcgccgggcgcggggcatcccgcccgggcccacgccctggcctctggtgggcaacttcggtcacgtgctgctgcctcccttcctccggcggcggagctggctgagcagcaggaccagggccgcagggattgatccctcggtcataggcccgcaggtgctcctggctcacctagcccgcgtgtacggcagcatcttcagcttctttatcggccactacctggtggtggtcctcagcgacttccacagcgtgcgcgaggcgctggtgcagcaggccgaggtcttcagcgaccgcccgcgggtgccgctcatctccatcgtgaccaaggagaagggggttgtgtttgcacattatggtcccgtctggagacaacaaaggaagttctctcattcaactcttcgtcattttgggttgggaaaacttagcttggagcccaagattattgaggagttcaaatatgtgaaagcagaaatgcaaaagcacggagaagaccccttctgccctttctccatcatcagcaatgccgtctctaacatcatttgctccttgtgctttggccagcgctttgattacactaatagtgagttcaagaaaatgcttggttttatgtcacgaggcctagaaatctgtctgaacagtcaagtcctcctggtcaacmtatgcccttggctttattaccttccctttggaccatttaaggaattaagacaaattgaaaaggatataaccagtttccttaaaaaaatcatcaaagaccatcaagagtctctggatagagagaaccctcaggacttcatagacatgtaccttctccacatggaagaggagaggaaaaataatagtaacagcagttttgatgaagagtacttattttatatcattggggatctctttattgctgggactgataccacaactaactctttgctctggtgcctgctgtatatgtcgctgaaccccgatgtacaagaaaagrttcatgaagaaattgaaagagtcattggcgccaaccgagctccttccctcacagacaaggcccagatgccctacacagaagccaccatcatggaagtgcagaggctaactgtggtggtgccgcttgccattcctcatatgacctcagagaacacagtgctccaagggtataccattcctaaaggcacattgatcttacccaacctgtggtcagtacatagagacccagccatttgggagaaaccggaggatttctaccctaatcgatttctggatgaccaaggacaactaattaaaaaagaaacctttattccttttgggatagggaagcgggtgtgtatgggagaacaactggcaaagatggaattattcctaatgtttgtgagcctaatgcagagtttcgcatttgctttacctgaggattctaagaagcccctcctgactggaagatttggtctaactttagccccacatccatttaatataactatttcaaggagatgaagagcatctccaagaagagatggtaaaaagrtatataaatacatatccttctaagcagattcttcctactgcaaaggacagtgaatccagcaactcagtggatccaagctgggctcagaggtcggaaggagggtagagcacactgggaggtttcatcttggaggattcctcagcaggatacttcagccattttagtaatgcaggtctgtgatttgggggatagaaaacaaagtacctatgaaacgggatatctggattttacttgcagtggcttccaccgatgggccaatcttctcatttcttagtgcctcagacatcccatatgtaaaatgagagtaataaaacttggcttctctctacctctcagcactaatgatggtcaaatgccttacatcttttctgatatctctaaaatgctgttaagttctggagaagaacttcaggagaagaagatctatcagctggcttttaaagacctatgacaacatgaaagtggtgttcagcctggaatgctttgtcagagatgggtgtggatttaggttatactgggggagaacttttctcagcacagattctatgccagcttctttgggcttgttctgtcactatctttttgtttatgattttagtttttactttttgtagatgtgggatgaagtggactctgtcgtgtatattgaggaaaaaagaaattataattttaaaaaatcccttgtaggattattatctaaatttatatgtctaacttctactacaactacaggaacagtgagccttgctacttctttagtagcttcttggcagaattcctttctactgagttatttgcaaagatgcagctctacctttttacttaaggcctgaatggtgagcatggggattttgatactgggactcatcaggaaaggattctgctttcaaactatactgaacattcctgtcctagcgtccctgccaccaggcccaatgcatctgatccttgaatatactctcaaagaattcactctckttttattaagagaactaaattgtttctaaatgtagatggtccctctggaaaagcagttttcagcaggggtggtaaccccttcagagggagtttggaaatgtgtgggtatgattcttggttatcataatgatgggggtgctactggccttctgctgccatgggaccaggatgctaaatgtcaaggtagtcctatacagtgaagaattgtcctgctcaagatgccaggatttcccccagtgagaacatgctctaaggaatgaccacccctttcttttattctcccacagtgctccatgtacagaagtaagcatagcagtcatatgagcaaccacattcctgaacctttcctcatgctggctctacacttaatcctttacttgtatgtttctgtaattcttacataaattctattaagagggtggcatactgtagtggatgaagctgaggcttatagtaggtaaggcacaaagttaaaaagtaacatcactgggtttcaaacctactggtctctgtgactaaagaacactttcagaaccacttcttgattctgccaccacttgatcccataacaggctaccccttggcctcatgctggagttgtgtgtgtctgtcttcatcccaggctgagctccttgaggtgaggatgttgtgctgtttgcctccctcacagtgccttggtcttagtggatgcccagtygtcttgtgaatgacttttaagamgtgtacttaagagaaaaatcctaccttatttgaataattacaagtcatgtttttgttgcttaaaggtgataaatcagtgtatattatttgttaatgtccattaaagccagtttttaaaaaaatcactggacttttgtgtttaccatttaaaacaaccattttaaacaaacttagaacgatgccttagctgtttataggtaacagaatgtaaactcccaccacctggagactaggccatatccagggacctcacactgactttcctaaaggagagaagcagctacgctgttcatactgatagagaagagggcaagaaaagatccagagtggctgttactttgaaaattaaacgaaagatgaaattctgaacttaaaacacttctgtttggccttctataactgatcacccttctttgctctgttttccagataaatggagacaccagatctccctaacctctgacttctgccgttagccatactctgtgtagttagatctcagtctgggaatggcattccagggcaattgtgaacatgaggctagatttttcctttgatttagcacattcctaggcagacttttgcaagctcaaaaaatgaaaataatatctgcttaaccaaaacataatcataggaagaagaaaaattttaaaatgattgatttttgactctacattctttatctaccatactgctcttttcctttttagaaatattactaagcactttcmgtatagataaatgaaatacaggctaatctttaggtgtcttaggaatttttgctttttgaaaaagaaaagctaatagcctaactgcagaggaactgagtggatggggtagctgctgtatagatttttagatgagatgatacagtgtggattacactgtaccttgggcgggagagtttgttcttgatatggaattcatatgcttttgaattgcactaataactcagcattaacaagtatattactccttaaattatacatgcattttcaatattcctaaccaaatagtttatagcttattgagaagaagtctgttcttggagagatgttgaaattagatgtttattaaactttaaaatataatgccttaagctgtggcactttaaaaacatctttatatataaattgctaaaaggactgttaatgcttttctcagacacattggcattttacaattttgcacatggtttatttgaaatcaaaaaataactatactttgttttataagtctacctaatatctcatttttgattctcatcgttagcacagttttgttgcttttattaaactattttaactg

SEQ ID NO: 3738 - DNA, 1620 bp, Homo sapiens
caaatgccatacaggtttattttcttactgtgtgccatttgggaccaacagagcaacggstagttttaccaagagattatatttgaatgatacctgatttggtatttcatttaaagttctggaaatgggctgggcgcagtggcccatgcctataatcccagcacgatagcagctattgtttaaaatcacacaaaataaatagcttatgaatgactggatttggtatatcctctggtgataatggtgctctctggcttcccttctgattcttcctcatttgctactgctgcttccttgtttccagatgccttttctttcttctcccattgaaacttaaagagctagctcaaatgccacctcttccaggaagctgtctctaactcttgctctcttcctctggtccgaaggcagaattattcctcccagtctctcttttctcctagtcttggtatgtgtccttggtgtaatagagttggtctgtgtaccatgacttacttatctttgaatagacttgccatattgtcaatttggagaatttgtgagcaattgaaatattacatttccaaaggatctacgtccaactcttggtgtccactaataaatgctctttctttggattactttatttctctttgtagctctgtttcctattttgtagtctcccatttccatcttccttcttacacttccatctagttgactactgacaccactgaaccaaaattttcatctttcctcttaaatgtgttcaacttctgagctcttctttcactctttgacttgcttggcccctagatttgatcactcacacatcctgaaaattattcctcctgaataattctgaaatccattcccagagtctccattcttactggaattgcaggcagaagaaattgcatgagccacaaaggaaagaaagacacctaggtgtgttaggggagcggagtcatggtagagttagggaaaggacatgaaaatcattactgccatgtgattctgaattctgttttccctaggttacagtgaatgacaatttaagaaaataattgggatgcaaattgagaaagatatgtctcatttaaatttttttctaccatttacagaacttgaaggtctcttcacagactaatttcttatctcgagcatggtggttccccatcttttatttttttgagaaaaatgtacaaggctcaattccttgctgcttctcctggccrctgtcttggcctcctggctgcttcaaatcatcatgcaaaaagtattcacgggttcagaagattggtgaagacaatgagaaatcgacctagcccgcgtgtacggcagcatcttcagcttctttatcggccactacctggtggtggtcctcagcgacttccacagcgtgcgcgaggcgctggtgcagcaggccgaggtcttcagcgaccgcccgcgggtgccgctcatctccatcgtgaccaaggagaagggtgagcgggaggtcgtgggctgtgggtacgcggatgccgcggatgagtctccaggtgcgtgggggctgcagttcctgtgccccttccggccgcccgcgcccccaggctgcctcacacctgcatcctgaactaacaggtgatggtggtggcggcg

SEQ ID NO: 3739 - DNA, 2540 bp, Homo sapiens
accgagtagctaccttataaagaccatctgtacatccactgtgaaatggagtttcaaaatcacaagcttctttcccacatgaacataagactaggagcacatatggaagagtaaagttgaagggaatttggatgatgatttggcaagatgctgtgggatagtaacatctttttgagggaagaattggcttcctttcttgaaagtggtgaaggtacagcatatagctgcatggaagaaacagtaatcggatggctaccttctacattttgtattaggaaacaaagtccattgtaagagtccatgttgatcttggaaatagaaggattgaaaaaagctaaatttccacaaagaacaagaacttgaccatctcctttttgatctgaagactaggggacaatggatatcatagagacagcaaaacttgaagaacatttggaaaatcaacccagtgatcctaygaacacttatgcaagacccgctgaacctgttgaagaagaaaacaaaaatggcaatggtaaacccaagagcttatccagtgggctgcgaaaaggcaccaaaaagtacccggactatatccaaattgctatgcccactgaatcaaggaacaaatttccactagagtggtggaaaacgggcattgccttcatatatgcagttttcaacctcgtcttgacaaccgtcatgatcacagttgtacatgagagggtccctcccaaggagcttagccctccactcccagacaagttttttgattacattgatagggtgaaatgggcattttctgtatcagaaataaatgggattatattagttggattatggatcacccagtggctgtttctgagatacaagtcaatagtgggacgcagattctgttttattattggaactttatacctgtatcgctgcattacaatgtatgttactactctacctgtgcctggaatgcatttccagtgtgctccaaagctcaatggagactctcaggcaaaagttcaacggattctacgattgatttctggtggtggattgtccataactggatcacatatcttatgtggagacttcctcttcagcggtcacacggttacgctgacmctgacttatttgttcatcaaagaatattcgcctcgtcacttctggtggtatcatttaatctgctggctgctgagtgctgcygggatcatctgcattcttgtagcacacgaacactacactatcgatgtgatcattgcttattatatcacaacacgactgttttggtggtaccattcaatggccaatgaaaagaacttgaaggtctcttcacagactaatttcttatctcgagcatggtggttccccatcttttatttttttgagaaaaatgtacaaggctcaattccttgctgcttctcctggccrctgtcttggcctcctggctgcttcaaatcatcatgcaaaaagtattcacgggttcagaagattggtgaagacaatgagaaatcgacctgaggagcaaaacaaaggcatcagctcttacaccaaaagagtyaacgctgtaaccaaaggtatagttttgttttttattttaggagaactgactggtaaatgaagaaatggaccaaattttgtgtaaacgattagaaagatgaacaaagtattgccctttgactggttttcttcttcatcctgagaaagatacattctcttgcagctcttcattcattggtgacaagcccccaccccgggactttactaatgagcttgttaaagaggtgccaaagaacatattcctcctttctttattctttctccaccaaaaccctctacttcagaattttttcaggatatttttcagcccaaggtcagaagaatgtgttaatattttaaataaaatatctggacatctacagccactgtgtaaatagaactgcctaatgttgagagtggtttttagcattaggtttagcaagggggagatccgtgggttgtgcgtcagctttgggtgaattttgtttctaccctgtcacggggaaagttcgggttgagtccaggagtgcacactgctgctgccacccaatgcgctacrtatcacttttttttgttttgttttgttttgtttttaaaagatcattttatcttaaaaaggaaagctgatccaagtaaacacgaaagtatttgacacaccccacagattttacatgtgtgtaaatgtttcactttaaaatctctatgacagatacacaggaaacatgagatggtttctgctaatgagtggcccttgagtacacacttagatgctgtctgccctgtaaatttggatctggtgccccagggcagtcaactcttctagcacaggctgaaaacacgtgtgtgtcaactgaggttcacaccacttggggaatgagcctgttttctttccaggtcaggccctggtgtgagatcaattttagggctcctaattggagcacagaaatgtatttggtcaaatttcattgaaggtgatttcttcctttttctgttgtactttatggaaaaaccaagatggaacctgaaag

SEQ ID NO: 3740 - DNA, 588 bp, Homo sapiens
tgtggccttgggctttcaggagcccagtagtgacttctgtggtccctgacttgcaccctcaccctgttattggagttgtgcttcatttctctgtgtggaaagagtgaagtattgggaagtatgaccctggtcaccgaaccaactcagagacgtcgatttctcattgtcttcaccaatcttctgaacccgtgaatactttttgcatgatgatttgaagcagccaggaggccaagacagyggccaggagaagcagcaaggaattgagccttgtacatttttctcaaaaaaataaaagatggggaaccaccatgctcgagataagaaattagtctgtgaagagaccttcaagttctgtaaatggtagaaaaaaatttaaatgagacatatctttctcaatttgcatcccaattattttcttaaattgtcattcactgtaacctagggaaaacagaattcagaatcacatggcagtaatgattttcatgtcctttccctaactctaccatgactccgctcccctaacacacctaggtgtctttctttcctttgtggctcatgcaatttcttctgcctgcaattccagtaaga

SEQ ID NO: 3741 - DNA, 1726 bp, Homo sapiens
gccgcaggctyctccggaagaccaggggcmgacggggcggtggcggggtcgtgcccagtgggaggggtcgggtctgcccaatgggttctcccgggcggggggcggggctctatttcagcagctctcagggccttgggctcatcccgagtcccgggctcagtatgtggcgccttcctcgcgcgctgtgtgtgcacgctgcaaagwccagcaagctctctggwccttgsagcaggcctgccgccttcatgtccactctcctcatcaatcagccccagtatgcgtggctgaaagagctggggctccgcgaggaaaacgagggcgtgtataatggaagctggggaggccggggagaggttattacgamctattgccctgctaacaacgagccaatagcaagagtccgacaggccagtgtggcagactatgaagaaacygtaaagaaagcaagagaagcatggaaaatctgggcagatattcctgctccaaaacgaggagaaatagtaagacagattggcgatgccttgcgggagaagatccaagtactaggaagcttggtgtctttggagatggggaaaatcttagtggaaggtgtgggtgaagttcaggagtatgtggatatctgtgactatgctgttggtttatcaaggatgattggaggacctatcttgccttctgaaagatctggccatgcactgattgagcagtggaatcccgtaggcctggttggaatcatcacggcattcaatttccctgtggcagtgtatggttggaacaacgccatcgccatgatctgtggaaatgtctgcctctggaaaggagctccaaccacttccctyattagtgtggctgtcacaaagataatagccaaggttctggaggacaacaagctgcctggtgcaatttgttccttgacttgtggtggagcagatattggcacagcaatggccaaagatgaacgagtgaacctgctgtccttcactgggagcactcaggtgggaaaacaggtgggcctgatggtgcaggagaggtttgggagaagtctgttggaacttggaggaaacaatgccattattgcctttgaagatgcagacctcagcttagttgttccatcagctctcttcgctgctgtgggaacagctggccagaggtgtaccactgcgaggcgactgtttatacatgaaagcatccatgatgaggttgtaaacagacttaaaaaggcctatgcacagatccgagttgggaacccatgggaccctaatgttctctatgggccactccacaccaagcaggcagtgagcatgtttcttggagcagtggaagaagcaaagaaagaaggtggcacagtggtctatgggggcaaggttatggatcgccctggaaattatgtagaaccgrcaattgtgacaggtcttggccacgatgcgtccattgcacacacagagacttttgctccgattctctatgtctttaaattcmagaatgaagaagaggtctttgcatggaataatgaagtaaaacagggactttcaagtagcatctttaccaaagatctgggcagaatctttcgctggcttggacctaaaggatcagactgtggcattgtaaatgtcaacattccaacaagtggggctgagattggaggtgcctttggaggagaaaagcacactggtggtggcagggagtctggcagtgatgcctggaaacagtacatgagaaggtctacttg

SEQ ID NO: 3742 - DNA, 5191 bp, Homo sapiens
caatggcgcaggcttcacttctgctgtggcggtgactgaggcctttctggtgacctcagcccaacrcaggccgtctccggagcttcccggtagtggccccggattcccacggtctttgtcattggctgtcagctagcaggcctggccgctcccgtgcggagagaccatctcttcagggcaatgtccaggccgagcagcgtctccccgcggcagcyggctcctggcggtggcggaggcggcggcccctcgccttgtggccctgggggcggcggccgggccaaggggctgaaggacattcgcattgatgaggaggtgaagatcgcagtcaatatcgcgctggagcgcttccgatacggggaccagagagaaatggaatttccttcttctttgaccagtactgaaagagcctttattcatcgactcagtcagtctcttggtttggtctctaaaagtaaaggattcctcagttccttttagatgattgctttaaaaatggtatcccctgccgtatattttgtactcaaccaagacgattggcagctatcgctgtggctgaaagagttgccgcagagagacgggaaaggattggtcaaacaattggttatcagatccgattagaaagcagggtttctccaaagacacttctgacattttgtactaatggggtattgcttcgtacattgatggcaggagatagtacgttgtcgactgtgacacatgttatcgtggatgaagtgcatgaaagggatcgatttagtgattttttacttacaaagttaagagatttgttgcaaaagcacccaactttgaaactaattctttctagtgctgccttggatgtaaatctstttataagatattttggaagttgtccagtgatatatatacagggaagaccatttgaagtaaaagaaatrtttctggaagatattttaagaacaactggatatacaaacaaagaaatgttaaaatatggtgcagtactaatttttctgcctggatatgacgaaattgttggactgagagatcgcatcctgtttgatgacaagcgataccaagtctttatgcttcattcaaatatgcaaacatccgatcaaaagaaagtattaaaaaacccacctgcaggtgttcgaaaaataattctttccaccaatattgctgaaaccagcatcacagtcaatgatgttgtctttgttattgattctggtaaggtgaaagagaaatcctttgatgctctgaattttgttacaatgttaaaaatggtatggatttccaaagctagtgccatacagcggaaaggcagggcagggcgatgtagacctggaatttgttttcgtctgttcagtagactccgattccagaatatgttggaatttcagactccggaacttttgagaatgccattacaggaactttgcttacataccaagctgttagccccagttaattgtcccattgctgattttcttatgaaagctcctgaacctccaccagctttaattgtaagaaatgctgtacaaatgcttaagacaatagatgcaatggayacatgggaagatctgactgaacttgggtatcatttggctgacttgccagtagaaccacatcttggtaaaatggtcttgtgtgctgttgttttaaagtgtctggaccccatccttacaattgcttgcacrctagcttatcgagatccttttgtactacctactcaggcctctcaaaaacgtgcagctatgctttgtaggaaacgttttactgcaggagctttcagtgaccatatggcacttctcagagcattccaggcctggcaaaaagcacgaagtgatgggtgggagcgagccttttgtgaaaagaattttctttcacaggctactatggaaataatcataggcatgagaacacagttgcttggtcaacttagagcatcaggttttgttagagcacgaggtggtggtgacattcgggacgttaacacaaactctgagaattgggctgtcgttaaagctgcattggtggcaggcatgtatcctaatttagtccacgtggacagagagaatctagtgttgacagggccaaaggagaaaaaagtacgatttcatcctgcttcagttctcagtcagcctcaatataaaaagattcctccagccaatggtcaagctgcagcaattaaggcactgcccacagattggcttatttatgatgaaatgaccagagcccatagaatagctaatattagatgttgttcagcagtgacgcctgtcactatattggtattctgtggaccagctagattggcaagtaatgctcttcaggaaccttcatcctttagagtggatggcattcccaatgacagtagtgatagtgaaatggaggacaaaactacagctaatttggcagccttgaaacttgatgagtggctccatttcacactggagccagaggcagctagtttattgctgcagctcagacagaagtggcatagcttatttttacgccgaatgagagctccatctaaaccttggtctcaagttgatgaagctaccataagagcaattatagctgttttaagcactgaagaacagtctgcaggtttacaacaaccatckgggattggccaaaggccaaggcctatgtcttcagaagagcttcctttggcctcatcttggaggtcaaataatagtaggaaaagttcagcagatactgaattttctgatgagtgtactactgcagaaagagtactgatgaaatctccatctccagcattacacccacctcagaagtacaaagatagaggaattttacatcctaaacgaggtactgaggaccgatcagatcagtcttctstgaaatctacagacagcagtagttacccaagtccttgtgctagtccttctcctccatcctcaggaaagggctcaaaatctccttcrccaagaccaaacatgcctgttcgatacttcataatgaagagtagcaatttgagaaaccttgaaatttctcaacagaagggtatctggtctacaactcctagtaatgaacggaagctaaatcgagccttttgggaaagcagcatagtttacttggtattttctgttcaaggatctggacatttccagggattttctaggatgtcttctgagattggaagggaaaagagtcaggactggggctctgctggactaggaggagtatttaaggtggagtggatacgaaaagaaagccttccctttcaatttgcacaccatttactcaatccatggaatgacaacaagaaagtgcagataagcagggatgggcaggaactagaacctcwggttggtgaacagttgctccagttatgggaacgtcttcccttgggagaaaaaaacacaactgattgacactcagaactcttagctgtggaagaacatcatgcctatttataaccactgaatgcactgactttcaaaaactgaggtggggtgtgtgttacgaatgggctttttaacacttttagagtgttgctttagaactaccatcttcatatacaggagaaaggaagcatttaaatttttatagtgattatagagaatgattatatgatgtttgtaatgaataaaatagtagtttcattatttggcacaatagcagtttattttaaacaaacaatttgaagttaaacatttcatttttaaaaacactgaattacagttcttattgatgactttttaatgcagagtaagttgtttaagaaaggcctgaatatatcagaacatctgagcaccattttagaagagtcaactcttaagattatcattagaaaacaaatacgtcaacacctatgaaaagaagcggggaaaacaacaacaaggacaacaacaaaaaaccagtgaaattctacaagtgtcccttttaaaaatagtrtgtgctaactaagggctattcattctgccatttttaacttgagacacatttaagaataaagttggatgttctttttctgtgattatgaaatgcaataaaatctgaataaagggcaaagtttcttcctgatcagattagattaagtgcttagttttattcctaattctgccccttttaacctgatgtgtaccttactctttcctccctctcttcctcccttcctcctctccccrctcctttcctgcatttctccctccctccttccctcgtcacatctcttatatgagcacagtaattatgacctttttgttttggctacaacttgattgaaacaagttcaaaatttaaacaagttcatacaagtttttaaaaattctcaactggtagcttgcttgctgtgcgtcttccaaactaaagcctgcaagcgccacaattctaagtgccgccttccattttttttcagtatgttttcactggcttatgttttcagatatgattttcctttttcgcatatatggtttaataaatgggggataattttttttttgtaaatccgtgcttgtgccaagtctcatatttctttgccatctcagaattatctttttaccaccactgtttataaaatttccttagagactttttgaagggaaaatagagcaacagggaaaaatgaaagaaatgtcttggttactgagctctaaatagacaggtttgatggcacttctcatgatacattttagttattcttataaaagcaaacaggcaaacatgagtgtaaattaaagacaaaaagaaaactctggttttatatttgagaacacgtgaaaaatcatgggtcaacataaaatcttgagaaccttctactttctctgggaaagcattatatagtggtgcattagtttagaaagtcagctatgattttgcctatagttctagttattagctttggggttttcttgtactttaagacatacctgtaaattgaacctatttgaattatattccactgtatgtgtattatggctsttttcctattagagcaacttgtgtttccctgataatgtgtacattttttaggcatgtacttaatagttcacaatgttctaaatttggaaggacttaaaaaaaaaacttgtttaaatttccatctgttttgtaatatctagctctatatgkaaatgatgggtttgttggtatttaaaatgaatacaacttgaatgtaattaaagtgctgttttttggaagcgataaactttaratatacttattaaaatgaaattctattaag

SEQ ID NO: 3743 - DNA, 3319 bp, Homo sapiens
tattaaaaaacccacctgcaggtgttcgaaaaataattctttccaccaatattgctgaaaccagcatcacagtcaatgatgttgtctttgttattgattctggtaaggtgaaagagaaatcctttgatgctctgaattttgttacaatgttaaaaatggtatggatttccaaagctagtgccatacagcggaaaggcagggcagggcgatgtagacctggaatttgttttcgtctgttcagtagactccgattccagaatatgttggaatttcagactccggaacttttgagaatgccattacaggaactttgcttacataccaagctgttagccccagttaattgtcccattgctgattttcttatgaaagctcctgaacctccaccagctttaattgtaagaaatgctgtacaaatgcttaagacaatagatgcaatggayacatgggaagatctgactgaacttgggtatcatttggctgacttgccagtagaaccacatcttggtaaaatggtcttgtgtgctgttgttttaaagtgtctggaccccatccttacaattgcttgcacrctagcttatcgagatccttttgtactacctactcaggcctctcaaaaacgtgcagctatgctttgtaggaaacgttttactgcaggagctttcagtgaccatatggcacttctcagagcattccaggcctggcaaaaagcacgaagtgatgggtgggagcgagccttttgtgaaaagaattttctttcacaggctactatggaaataatcataggcatgagaacacagttgcttggtcaacttagagcatcaggttttgttagagcacgaggtggtggtgacattcgggacgttaacacaaactctgagaattgggctgtcgttaaagctgcattggtggcaggcatgtatcctaatttagtccacgtggacagagagaatctagtgttgacagggccaaaggagaaaaaagtacgatttcatcctgcttcagttctcagtcagcctcaatataaaaagattcctccagccaatggtcaagctgcagcaattaaggcactgcccacagattggcttatttatgatgaaatgaccagagcccatagaatagctaatattagatgttgttcagcagtgacgcctgtcactatattggtattctgtggaccagctagattggcaagtaatgctcttcaggaaccttcatcctttagagtggatggcattcccaatgacagtagtgatagtgaaatggaggacaaaactacagctaatttggcagccttgaaacttgatgagtggctccatttcacactggagccagaggcagctagtttattgctgcagctcagacagaagtggcatagcttatttttacgccgaatgagagctccatctaaaccttggtctcaagttgatgaagctaccataagagcaattatagctgttttaagcactgaagaacagtctgcaggtttacaacaaccatckgggattggccaaaggccaaggcctatgtcttcagaagagcttcctttggcctcatcttggaggtcaaataatagtaggaaaagttcagcagatactgaattttctgatgagtgtactactgcagaaagagtactgatgaaatctccatctccagcattacacccacctcagaagtacaaagatagaggaattttacatcctaaacgaggtactgaggaccgatcagatcagtcttctstgaaatctacagacagcagtagttacccaagtccttgtgctagtccttctcctccatcctcaggaaagggctcaaaatctccttcrccaagaccaaacatgcctgttcgatacttcataatgaagagtagcaatttgagaaaccttgaaatttctcaacagaagggtatctggtctacaactcctagtaatgaacggaagctaaatcgagccttttgggaaagcagcatagtttacttggtattttctgttcaaggatctggacatttccagggattttctaggatgtcttctgagattggaagggaaaagagtcaggactggggctctgctggactaggaggagtatttaaggtggagtggatacgaaaagaaagccttccctttcaatttgcacaccatttactcaatccatggaatgacaacaagaaagtgcagataagcagggatgggcaggaactagaacctcwggttggtgaacagttgctccagttatgggaacgtcttcccttgggagaaaaaaacacaactgattgacactcagaactcttagctgtggaagaacatcatgcctatttataaccactgaatgcactgactttcaaaaactgagagtaagttgtttaagaaaggcctgaatatatcagaacatctgagcaccattttagaagagtcaactcttaagattatcattagaaaacaaatacgtcaacacctatgaaaagaagcggggaaaacaacaacaaggacaacaacaaaaaaccagtgaaattctacaagtgtcccttttaaaaatagtrtgtgctaactaagggctattcattctgccatttttaacttgagacacatttaagaataaagttggatgttctttttctgtgattatgaaatgcaataaaatctgaataaagggcaaagtttcttcctgatcagattagattaagtgcttagttttattcctaattctgccccttttaacctgatgtgtaccttactctttcctccctctcttcctcccttcctcctctccccrctcctttcctgcatttctccctccctccttccctcgtcacatctcttatatgagcacagtaattatgacctttttgttttggctacaacttgattgaaacaagttcaaaatttaaacaagttcatacaagtttttaaaaattctcaactggtagcttgcttgctgtgcgtcttccaaactaaagcctgcaagcgccacaattctaagtgccgccttccattttttttcagtatgttttcactggcttatgttttcagatatgattttcctttttcgcatatatggtttaataaatgggggataattttttttttgtaaatccgtgcttgtgccaagtctcatatttctttgccatctcagaattatctttttaccaccactgtttataaaatttccttagagactttttgaagggaaaatagagcaacagggaaaaatgaaagaaatgtcttggttactgagctctaaatagacaggtttgatggcacttctcatgatacattttagttattcttataaaagcaaacaggcaaacatgagtgtaaat

SEQ ID NO: 3744 - DNA, 3971 bp, Homo sapiens
aaatcctttgatgctctgaattttgttacaatgttaaaaatggtatggatttccaaagctagtgccatacagcggaaaggcagggcagggcgatgtagacctggaatttgttttcgtctgttcagtagactccgattccagaatatgttggaatttcagactccggaacttttgagaatgccattacaggaactttgcttacataccaagctgttagccccagttaattgtcccattgctgattttcttatgaaagctcctgaacctccaccagctttaattgtaagaaatgctgtacaaatgcttaagacaatagatgcaatggayacatgggaagatctgactgaacttgggtatcatttggctgacttgccagtagaaccacatcttggtaaaatggtcttgtgtgctgttgttttaaagtgtctggaccccatccttacaattgcttgcacrctagcttatcgagatccttttgtactacctactcaggcctctcaaaaacgtgcagctatgctttgtaggaaacgttttactgcaggagctttcagtgaccatatggcacttctcagagcattccaggcctggcaaaaagcacgaagtgatgggtgggagcgagccttttgtgaaaagaattttctttcacaggctactatggaaataatcataggcatgagaacacagttgcttggtcaacttagagcatcaggttttgttagagcacgaggtggtggtgacattcgggacgttaacacaaactctgagaattgggctgtcgttaaagctgcattggtggcaggcatgtatcctaatttagtccacgtggacagagagaatctagtgttgacagggccaaaggagaaaaaagtacgatttcatcctgcttcagttctcagtcagcctcaatataaaaagattcctccagccaatggtcaagctgcagcaattaaggcactgcccacagattggcttatttatgatgaaatgaccagagcccatagaatagctaatattagatgttgttcagcagtgacgcctgtcactatattggtattctgtggaccagctagattggcaagtaatgctcttcaggaaccttcatcctttagagtggatggcattcccaatgacagtagtgatagtgaaatggaggacaaaactacagctaatttggcagccttgaaacttgatgagtggctccatttcacactggagccagaggcagctagtttattgctgcagctcagacagaagtggcatagcttatttttacgccgaatgagagctccatctaaaccttggtctcaagttgatgaagctaccataagagcaattatagctgttttaagcactgaagaacagtctgcaggtttacaacaaccatckgggattggccaaaggccaaggcctatgtcttcagaagagcttcctttggcctcatcttggaggtcaaataatagtaggaaaagttcagcagatactgaattttctgatgagtgtactactgcagaaagagtactgatgaaatctccatctccagcattacacccacctcagaagtacaaagatagaggaattttacatcctaaacgaggtactgaggaccgatcagatcagtcttctstgaaatctacagacagcagtagttacccaagtccttgtgctagtccttctcctccatcctcaggaaagggctcaaaatctccttcrccaagaccaaacatgcctgttcgatacttcataatgaagagtagcaatttgagaaaccttgaaatttctcaacagaagggtatctggtctacaactcctagtaatgaacggaagctaaatcgagccttttgggaaagcagcatagtttacttggtattttctgttcaaggatctggacatttccagggattttctaggatgtcttctgagattggaagggaaaagagtcaggactggggctctgctggactaggaggagtatttaaggtggagtggatacgaaaagaaagccttccctttcaatttgcacaccatttactcaatccatggaatgacaacaagaaagtgcagataagcagggatgggcaggaactagaacctcwggttggtgaacagttgctccagttatgggaacgtcttcccttgggagaaaaaaacacaactgattgacactcagaactcttagctgtggaagaacatcatgcctatttataaccactgaatgcactgactttcaaaaactgaggtggggtgtgtgttacgaatgggctttttaacacttttagagtgttgctttagaactaccatcttcatatacaggagaaaggaagcatttaaatttttatagtgattatagagaatgattatatgatgtttgtaatgaataaaatagtagtttcattatttggcacaatagcagtttattttaaacaaacaatttgaagttaaacatttcatttttaaaaacactgaattacagttcttattgatgactttttaatgcagagtaagttgtttaagaaaggcctgaatatatcagaacatctgagcaccattttagaagagtcaactcttaagattatcattagaaaacaaatacgtcaacacctatgaaaagaagcggggaaaacaacaacaaggacaacaacaaaaaaccagtgaaattctacaagtgtcccttttaaaaatagtrtgtgctaactaagggctattcattctgccatttttaacttgagacacatttaagaataaagttggatgttctttttctgtgattatgaaatgcaataaaatctgaataaagggcaaagtttcttcctgatcagattagattaagtgcttagttttattcctaattctgccccttttaacctgatgtgtaccttactctttcctccctctcttcctcccttcctcctctccccrctcctttcctgcatttctccctccctccttccctcgtcacatctcttatatgagcacagtaattatgacctttttgttttggctacaacttgattgaaacaagttcaaaatttaaacaagttcatacaagtttttaaaaattctcaactggtagcttgcttgctgtgcgtcttccaaactaaagcctgcaagcgccacaattctaagtgccgccttccattttttttcagtatgttttcactggcttatgttttcagatatgattttcctttttcgcatatatggtttaataaatgggggataattttttttttgtaaatccgtgcttgtgccaagtctcatatttctttgccatctcagaattatctttttaccaccactgtttataaaatttccttagagactttttgaagggaaaatagagcaacagggaaaaatgaaagaaatgtcttggttactgagctctaaatagacaggtttgatggcacttctcatgatacattttagttattcttataaaagcaaacaggcaaacatgagtgtaaattaaagacaaaaagaaaactctggttttatatttgagaacacgtgaaaaatcatgggtcaacataaaatcttgagaaccttctactttctctgggaaagcattatatagtggtgcattagtttagaaagtcagctatgattttgcctatagttctagttattagctttggggttttcttgtactttaagacatacctgtaaattgaacctatttgaattatattccactgtatgtgtattatggctsttttcctattagagcaacttgtgtttccctgataatgtgtacattttttaggcatgtacttaatagttcacaatgttctaaatttggaaggacttaaaaaaaaaacttgtttaaatttccatctgttttgtaatatctagctctatatgkaaatgatgggtttgttggtatttaaaatgaatacaacttgaatgtaattaaagtgctgttttttggaagcgataaactttaratatacttattaaaatgaaattctattaag

SEQ ID NO: 3745 - DNA, 1395 bp, Homo sapiens
caatggcgcaggcttcacttctgctgtggcggtgactgaggcctttctggtgacctcagcccaacrcaggccgtctccggagcttcccggtagtggccccggattcccacggtctttgtcattggctgtcagctagcaggcctggccgctcccgtgcggagagaccatctcttcagggcaatgtccaggccgagcagcgtctccccgcggcagcyggctcctggcggtggcggaggcggcggcccctcgccttgtggccctgggggcggcggccgggccaaggggctgaaggacattcgcattgatgaggaggtgaagatcgcagtcaatatcgcgctggagcgcttccgatacggggaccagagagaaatggaatttccttcttctttgaccagtactgaaagagcctttattcatcgactcagtcagtctcttggtttggtctctaaaagtaaaggaaagggagcaaatagatacctaactgtgaagaagaaagatggatcagaaacagctcatgcaatgatgacctgtaatttgactcataatacaaaacatgctgttaggagcctaattcaaagatttcctgtcaccaataaagagcgtacagaacttctgcctaaaacagaaagaggaaatgtgtttgcagttgaagctgaaaaccgggaaatgagcaagacaagtgggcgactcaacaatggcatacctcagattccagtgaaaagaggagaatccgaatttgattcttttaggcagtctttaccagtgtttgagaaacaggaagaaattgttaaaataattaaggaaaataaagtagttttgattgtaggagaaactgggtctggaaagaccacacagattcctcagttccttttagatgattgctttaaaaatggtatcccctgccgtatattttgtactcaaccaagacgattggcagctatcgctgtggctgaaagagttgccgcagagagacgggaaaggattggtcaaacaattggttatcagatccgattagaaagcagggtttctccaaagacacttctgacattttgtactaatggggtattgcttcgtacattgatggcaggagatagtacgttgtcgactgtgacacatgttatcgtggatgaagtgcatgaaagggatcgatttagtgattttttacttacaaagttaagagatttgttgcaaaagcacccaactttgaaactaattctttctagtgctgccttggatgtaaatctstttataagatattttggaagttgtccagtgatatatatacagggaagaccatttgaagtaaaagaaatrtttctggaagatattttaagaacaactggatatacaaacaaagaaatgttaaaatataaaaaggaaaaacagcaaggtaaa

SEQ ID NO: 3746 - DNA, 2634 bp, Homo sapiens
tccgggtcgcggcggacgtcgcttccggagcagcatggcggccactgaggatgagaggctagcagggagcggtgagggagagcggctggatttcttacgggatcggcacgtgcgatttttccagcgctgcctccaggttttgccggagcgctattcttcactcgagacaagcaggtaactcgtggcacagtcagccaggatcaaatctaaatcgctgtggtttccgaggctcttcatacctgggtrttccgttcaatccatcaaaggctcctggaacagctcatccttatgatagtggccacattgcaatgacctacactggcctctcatgcttagttattcttggagacgacttaagccgagtaaataaagaagcttgcttagcgggcttgagagcccttcagctggaagatgggagtttttgtgcagtacctgaaggcagtgaaaatgacatgcgatttgtgtactgtgcttcctgtatttgctatatgctcaacaactggtcrggcatggatatgaaaaaagccatcacctatattagaaggagtatgtcctatgacaatggactggcacagggagctggacttgaatctcatggaggatcaactttttgtggcattgcctcactatgtctgatgggtaaactagaagaagttttttcagaaaaagaattgaacaggataaagaggtggtgtataatgaggcaacaaaatggttatcatggaagacctaataagcctgtagacacctgttattctttttgggtgggagcaactctgaagcttctaaaaattttccaatacactaactttgagaaaaatagaaattacatcttatcaactcaagatcgccttgtagggggatttgccaagtggccagacaatgctttgcatgcatactttgggatctgtggcctgtcactaatggaggaaagtggaatttgtaaagttcatcctgctctgaatgtaagcacacggacttctgaacgccttctagatctccatcaaagctggaaaaccaaggactctaaacaatgctcagagaatgtacatatctccacaygactgattttagattgggagggtggggggatttgyagcataactgtagctcaagtttaaaagccatgtataaccaagtgtgctctttttttaaaaggtagagtcttacaatcaaatctcctgctgatttcactttgggatatggtcttgagccagtaatctttatactgggtttcaagaaaatctttgttgaagtttgaaccacaactttgtcgtggttcttaaatgtttatactgtatttctaagaagttgtttgaggcaaattaactgtatgtgtgtaggttatctttttaaaaactcttcagtgcaaattgtatcttattataaaatggacacaaattttcaagtttacacttcatatagcattgataatcttcasgtgaacacttagtgatcatttaaaaagctcactgctgatcgtagaaaatttgctttaattaattaagtatctgggattattctttgaaaacagatgaccataattttttttaaagaagagtgacttattttgtcttattcttaagtaaagtgtgccaattaaacctgtgtggcctatataaatgaagttaataacttcatagtaagaataaataggtttaactaatgtgatagttttctaaaaggagattgtttgaagacaactattatgtaactgagggaaaagcaacttaactgtatgtgattgtgaatgagaaagttttgtgctatgtgggtcatttatctagacattgctgtggtgaataccagttatgtttgattttattctcaaatcattagttgccttttttttttttttttttttttgctttctaggaagaaaacaatcttttttatctagaaggaaagatactttgtgttttcatttttagccatttgaagtttttaatttattgcccccagtgtgttagctgctctaatttcaaactaatacttttctaatttttttcaaattaaataagtaaaaartacaaaaacagaaccattcaaacagattcagtggtgtaactcaatacatggtcatttttattctcatattttcaggtaagtgaaagggaaatgcgaccatttagagggtaagaaatagggttttgtttttgttcattgttttgttttaagtctatgaactagctaattataaaggaggtagtataaaaactcttcattartaattaatttatcaataactcatatccrttacttgctcagtgacattcagaactattgcgtctagtactgaaatggggaaagaaatctcttcactaaaggagttggctttaagttagtcttggtgataataaatgttgaaatacaagtatcagtataaaaactggattactggtatcactgtttaggcattgtaatactttaaatgttatctttttttctaaatcagagggaaaaaaatgttgtgaaataacagtccttcccaagggaaacactgtgtacttggagaaatgattgatttattattggcatgcttagttttaaacctgagtttgccaactgtatgttttttaattagaaataaaataaatcttctgatggtgggggaaaaagtaagcttaataacag

SEQ ID NO: 3747 - DNA, 2772 bp, Homo sapiens
cacaggagggttctttctctccgcgggcactgattccgggtcgcggcggacgtcgcttccggagcagcatggcggccactgaggatgagaggctagcagggagcggtgagggagagcggctggatttcttacgggatcggcacgtgcgatttttccagcgctgcctccaggttttgccggagcgctattcttcactcgagacaagcaggttgacaattgcattttttgcactctcygggctggatatgttggattccttagatgtggtgaacaaagatgatataatagagtggatttattccctgcaggtccttcccacagaagacagatcaaatctaaatcgctgtggtttccgaggctcttcatacctgggtrttccgttcaatccatcaaaggctcctggaacagctcatccttatgatagtggccacattgcaatgacctacactggcctctcatgcttagttattcttggagacgacttaagccgagtaaataaagaagcttgcttagcgggcttgagagcccttcagctggaagatgggagtttttgtgcagtacctgaaggcagtgaaaatgacatgcgatttgtgtactgtgcttcctgtatttgctatatgctcaacaactggtcrggcatggatatgaaaaaagccatcacctatattagaaggagtatgtcctatgacaatggactggcacagggagctggacttgaatctcatggaggatcaactttttgtggcattgcctcactatgtctgatgggtaaactagaagaagttttttcagaaaaagaattgaacaggataaagaggtggtgtataatgaggcaacaaaatggttatcatggaagacctaataagcctgtagacacctgttattctttttgggtgggagcaactctgaagcttctaaaaattttccaatacactaactttgagaaaaatagaaattacatcttatcaactcaagatcgccttgtagggggatttgccaagtggccagacagtcatccagatgctttgcatgcatactttgggatctgtggcctgtcactaatggaggaaagtggaatttgtaaagttcatcctgctctgaatgtaagcacacggacttctgaacgccttctagatctccatcaaagctggaaaaccaaggactctaaacaatgctcagagaatgtacatatctccacaygactgattttagattgggagggtggggggatttgyagcataactgtagctcaagtttaaaagccatgtataaccaagtgtgctctttttttaaaaggtagagtcttacaatcaaatctcctgctgatttcactttgggatatggtcttgagccagtaatctttatactgggtttcaagaaaatctttgttgaagtttgaaccacaactttgtcgtggttcttaaatgtttatactgtatttctaagaagttgtttgaggcaaattaactgtatgtgtgtaggttatctttttaaaaactcttcagtgcaaattgtatcttattataaaatggacacaaattttcaagtttacacttcatatagcattgataatcttcasgtgaacacttagtgatcatttaaaaagctcactgctgatcgtagaaaatttgctttaattaattaagtatctgggattattctttgaaaacagatgaccataattttttttaaagaagagtgacttattttgtcttattcttaagtaaagtgtgccaattaaacctgtgtggcctatataaatgaagttaataacttcatagtaagaataaataggtttaactaatgtgatagttttctaaaaggagattgtttgaagacaactattatgtaactgagggaaaagcaacttaactgtatgtgattgtgaatgagaaagttttgtgctatgtgggtcatttatctagacattgctgtggtgaataccagttatgtttgattttattctcaaatcattagttgccttttttttttttttttttttttgctttctaggaagaaaacaatcttttttatctagaaggaaagatactttgtgttttcatttttagccatttgaagtttttaatttattgcccccagtgtgttagctgctctaatttcaaactaatacttttctaatttttttcaaattaaataagtaaaaartacaaaaacagaaccattcaaacagattcagtggtgtaactcaatacatggtcatttttattctcatattttcaggtaagtgaaagggaaatgcgaccatttagagggtaagaaatagggttttgtttttgttcattgttttgttttaagtctatgaactagctaattataaaggaggtagtataaaaactcttcattartaattaatttatcaataactcatatccrttacttgctcagtgacattcagaactattgcgtctagtactgaaatggggaaagaaatctcttcactaaaggagttggctttaagttagtcttggtgataataaatgttgaaatacaagtatcagtataaaaactggattactggtatcactgtttaggcattgtaatactttaaatgttatctttttttctaaatcagagggaaaaaaatgttgtgaaataacagtccttcccaagggaaacactgtgtacttggagaaatgattgatttattattggcatgcttagttttaaacctgagtttgccaactgtatgttttttaattagaaataaaataaatcttctgatggtgggggaaaaagtaagcttaataacag

SEQ ID NO: 3748 - DNA, 2171 bp, Homo sapiens
ctgaaagcagggaaactacaaatcccagcatgcattattaagcgcttgacttgcttccagacaaaggttgtctcaagtttgttgctcaaaccgagttctggagaacgccatcagctcgctgcttaaaattaaaccacaggttccattatgggtcgacttgatgggaaagtcatcatcctgacggccgctgctcaggggattggccaagcagctgccttagcttttgcaagagaaggtgccaaagtcatagccacagacattaatgagtccaaacttcaggaactggaaaagtacccgggtattcaaactcgtgtccttgatgtcacaaagaagaaacaaattgatcagtttgccaatgaagttgagagacttgatgttctctttaatgttgctggttttgtccatcatggaactgtcctggattgtgaggagaaagactgggacttctcgatgaatctcaatgtgcgcagcatgtacctgatgatcaaggcattccttcctaaaatgcttgctcagaaatctggcaatattatcaacatgtcttctgtggcttccagcgtcaaaggtgggtctgtctccttccgaggactgcgatgctcatacacgcacatcattaagagctctgcgtttgggaacaggcatagcagagattataatttcaagtattgaaatgatttcaaaactgcttttttcaaaattggtattaagttccttaaccacagatcttttgctctcgatgtgagccagtggtaaaattaaattaaaatgtggggtatttttgccctcccttttattctttctaatggacatggaaatgaacatcaaactgggagaaagaaccatttaacatttaattaatttaaaatagtgtattgagcaccggtatgtgctctggccataaaagaattcacagtccaaaactaggagcaaggcagcaaacatcatcttctccagtgtgatgatatataacagaggtttgtacaaagcgctgtcaaaatacagggaaataactgcctgtgagtttgtggaatgcttcacaaagacagttgatctgagccatcagcaagaagtcaagttgaaggacaaggacagcagtrcaaaatgtggattatgtcacaatmtggcatagttggatctgtgagtttaaaatgaaatagttactgctgagataccatttcttctctttgcaaggatacacatattcaacatacacaagagaggaatgtaaagaagtgcctaggcctcctgttttattgttttgttttgttattaatcttcattttcttttggaatctgcctaagagttatggcaactgatgatgagaaactaagactaccaatgttaagtaagttcagcatttcaattaagtctcaattaagttgtgcctatactgatattatttccctagatccagaaactgactctattgaaggaaaaaaatctgatatcaatctttttaaaaggggaggaatgtgggagaaagcatgaaaatggctactgggaaaacttatttgtgttacctttctgaaggaaaatacattttttattccttcaattgttgaacctttcctccaccctcaggagttgtgaacagatgtgtgtacagcacaaccaaggcagccgtgattggcctcacaaaatctgtggctgcagatttcatccagcagggcatcaggtgcaactgtgtgtgcccaggaacagttgatacgccatctctacaagaaagaatacaagccagaggaaatcctgaagaggcacggaatgatttcctgaagagacaaaagacgggaagattcgcaactgcagaagaaatagccatgctctgcgtgtatttggcttctgatgaatctgcttatgtaactggtaaccctgtcatcattgatggaggctggagcttgtgattttaggatctccatggtgggaaggaaggcaggcccttcctatccacagtgaacctggttacgaagaaaactcaccaatcatctccttcctgttaatcacatgttaatgaaaataagctctttttaatgatgtcactgtttgcaagagtctgattctttaagtatattaatctctttgtaatctcttctgaaatcattgtaaagaaataaaaatattgaactcatagcaggagaatagtttttaaaataaatctcgatttgttagcatc

SEQ ID NO: 3749 - DNA, 3735 bp, Homo sapiens
gcgggaactggcgggtagcgaggccctcctcggaatctcgtgtgaaggtggccctcctcttgggcctttaacgtctgtagatgctggagaccagcagaaaggatactgtgtgcgatgagataagcatgtgagaatgctttctaaccgaaagtgcctttcaaaagcgcctgtgtctggcagagctggtgtgagacgagacaatcctgccccgccgccgggataatcaagagttttggccggacctttgagcatacaccgagagagtgaggagccagacgacaagcacacactatggcgctgaaacggattaataaggaacttagtgatttggcccgtgaccctccagcacaatgttctgcaggtccagttggggatgatatgtttcattggcaagccacaattatgggacctaatgacagcccatatcaaggcggtgtattctttttgacaattcattttcctacagactaccccttcaaaccacctaaggcaagttgcatttacaacaagaatttatcatccaaatattaacagtaatggcagcatttgtctcgatattctaagatcacagtggtcgcctgctttaacaatttctaaagttcttttatccatttgttcactgctatgtgatccaaacccagatgaccccctagtgccagagattgcacggatctataaaacagacagagataagtacaacagaatatctcgggaatggactcagaagtatgccatgtgatgctaccttaaagtcagaataacctgcattatagctggaataaactttaaattactgttccttttttgattttcttatccggctgctcccctatcagacctcatcttttttaattttattttttgtttacctccctccattcattcacatgctcatctgagaagacttaagttcttccagctttggacaataactgcttttagaaactgtaaagtagttacaagagaacagttgcccaagactcagaattttwaaaaaaaaaaatggagcatgtgtattatgtggccaatgtcttcactctaacttggttatgagactaaaaccattcctcactgctctaacatgctgaagaaatcatctgagggggagggagatggatgctcagttgtcacatcaaaggatacagcattattctagcagcatccattcttgtttaagccttccactgttagagatttgaggttacatgatatgctttatgctcataactgatgtggctggagaattggtattgaatttatagcatcagcagaacagaaaatgtgatgtattttatgcatgtcaataaaggaatgacctgttcttgttctacagagaatggaaattggaagtcaaacaccctttgtattccaaaatagggtctcaaacattttgtaattttcatttaaattgttaggaggcttggagctattagttaatctatcttccaatacactgtttaatatagcactgaataaatgatgcaagttgtcaatggatgagtgatcaactaatagctctgctagtaattgatttatttttcttcaataaagttgcataaaccaatgagttagctgcctggattaatcagtatgggaaacaatcttttgtaaatgcaaagctgttttttgtatatactgttgggatttgcttcattgtttgacatcaaatgatgatgtaaagttcgaaagagtgaayattttgccatgttcagttaaagtgcacagtctgttacaggttgacacattgcttgacctgatttatgcagaattaataagctatttggatagtgtagctttaatgtgctgcacatgatactggcagccctagagttcatagatggacttttgggacccagcagttttgaaatgtgtttatggagtttaagaaatttattttccaggtgcagcccctgtctaactgaaatttctcttcmccttgtacacttgacagctgaaaaaaaacaacatgggagtaataatgggtcaaaatttgctgtgttgaagtgacttatctatgtgggatattgagtatccattgaaatggatttgttcagccatttacattaatgagcatttaaatgcaacagatatcatttcaggtgacttaacatgaatgaataaaagtcaatgctattggattgttttttgtttgacaagtgctatctgtgccactgatttaacttctgtagtaacaagggcattaccattcttcacctttcctaattctgatcccatagttttacatttttcctgtttattttgattttgttcactgctttatttcttaaagttctagcacatctgtgactcctccacttccacatttttgcactgcttacacttacgtgcaatcttattccttgtctgcacacacatgtggaaagctagaaataaatgttaaaacttactttttataaacattttaatatgtagtttggacatgatttattgacttaaggttcttctctaaactggaagtgaaatgcatgccttctgaagatgttctggctttgttaattctgtaatcatttcattggggaaaaaaccagctacgcagtttttccaatgagtgaattttttcattttgtgttttgcttaaaacggctccttcagggtagatgtcatactgcataacttttttggattcaaattatgaatgagaaattagttaacattctgctccacaaggtaagaaaaactgctctttggctctattttcaaaattacttctgagatgcatatagtctcaaaataacagctttagtaggcatatcacttcttgaaagccaaacatgagtgtaagacacttttatgaaacacggtggatccctaactggctttcaaattgacctttatagccttagacaacccttaggtatttacggagatgacttctttgattgtcataacaattagtggatgtgtccagttctctgtatctttgacttgatgctttatacatcatttcatttgttgcttctaagggaataagccatagaggcttctccaggtttaaaagaacagtaaagtacctggaaaaccaacatttttgaatgtatggacactggacatgagatatgtacaatgaaatcttaaaagaatctaagaatttgccctctttgccccactccacccagtaatttgacattactagtgccatgtataggacccaactgagtattagaatcagttttgactatgtctttgtatttcctaaatcttttaatgcataaaccgaattagggtccagttggcctgttaatggtaaatttacattttaaatgactcagtttgtttttcctgggcgagtttgcaatgtgataatcagattttttaaaactgattaatttgctttcttgtgtgggtgtactcacattttaaagtatgaaccacagttaactagtggtctcaggggtagtgaaacactcacttttttttttgtttgtttttttttgtttgtttgttgaaatggcttagttgaagtatacttaaggtactgatcatgctgtgttagtaatttgggcggggaggggggtaactcagccatgttttgtgttggcataacaaaactgttaatgattgttgattacacttttaagtgaatttgtcttttatgaggaacccagtgcaagtcactaaatattgtctaatagtgacatctgcataagacttgtaatagctgaagttaattgagcttaaaggaattgttaccattaaagtctgtgtttaaagaca

SEQ ID NO: 3750 - DNA, 4091 bp, Homo sapiens
gctggatcgcgcagcggctgcttcctttaccttcctcccatggtctccttccggttctcgatgcttctctgagcctaagggtttccgccactcgttcaccctccccccagctcatgatcytcctccctcccccgccctcctggtccaatctccgatctgtttagtaagaaggtgctgttccgagaaraaggaaaagggcttgacacgtattcactcggccccggacgtgggaagcaagccgtctggcttcggcctcacatcggtcytgtgctcgggacggcggcgttggcggactgatccgcggcggtgaagaggcaggaggagggggaggggcggagcgtggcagctggcagtagttccgtcagagcggacatcttgtggctgtgtcgtgcgcgtgagccccgtagggccggggaggcaccagctgccgcgcggggaggaggccgaggccgcagcttgagggaggccccggcccctctgcgcctgtgtctggcagagctggtgtgagacgagacaatcctgccccgccgccgggataatcaagagttttggccggacctttgagcatacaccgagagagtgaggagccagacgacaagcacacactatggcgctgaaacggattaataaggaacttagtgatttggcccgtgaccctccagcacaatgttctgcaggtccagttggggatgatatgtttcattggcaagccacaattatgggacctaatgacagcccatatcaaggcggtgtattctttttgacaattcattttcctacagactaccccttcaaaccacctaaggcaagttgcatttacaacaagaatttatcatccaaatattaacagtaatggcagcatttgtctcgatattctaagatcacagtggtcgcctgctttaacaatttctaaagttcttttatccatttgttcactgctatgtgatccaaacccagatgaccccctagtgccagagattgcacggatctataaaacagacagagataagtacaacagaatatctcgggaatggactcagaagtatgccatgtgatgctaccttaaagtcagaataacctgcattatagctggaataaactttaaattactgttccttttttgattttcttatccggctgctcccctatcagacctcatcttttttaattttattttttgtttacctccctccattcattcacatgctcatctgagaagacttaagttcttccagctttggacaataactgcttttagaaactgtaaagtagttacaagagaacagttgcccaagactcagaattttwaaaaaaaaaaatggagcatgtgtattatgtggccaatgtcttcactctaacttggttatgagactaaaaccattcctcactgctctaacatgctgaagaaatcatctgagggggagggagatggatgctcagttgtcacatcaaaggatacagcattattctagcagcatccattcttgtttaagccttccactgttagagatttgaggttacatgatatgctttatgctcataactgatgtggctggagaattggtattgaatttatagcatcagcagaacagaaaatgtgatgtattttatgcatgtcaataaaggaatgacctgttcttgttctacagagaatggaaattggaagtcaaacaccctttgtattccaaaatagggtctcaaacattttgtaattttcatttaaattgttaggaggcttggagctattagttaatctatcttccaatacactgtttaatatagcactgaataaatgatgcaagttgtcaatggatgagtgatcaactaatagctctgctagtaattgatttatttttcttcaataaagttgcataaaccaatgagttagctgcctggattaatcagtatgggaaacaatcttttgtaaatgcaaagctgttttttgtatatactgttgggatttgcttcattgtttgacatcaaatgatgatgtaaagttcgaaagagtgaayattttgccatgttcagttaaagtgcacagtctgttacaggttgacacattgcttgacctgatttatgcagaattaataagctatttggatagtgtagctttaatgtgctgcacatgatactggcagccctagagttcatagatggacttttgggacccagcagttttgaaatgtgtttatggagtttaagaaatttattttccaggtgcagcccctgtctaactgaaatttctcttcmccttgtacacttgacagctgaaaaaaaacaacatgggagtaataatgggtcaaaatttgcaaaataaagtactgttttggtgtgggagttgtcatgaggctgtgttgaagtgacttatctatgtgggatattgagtatccattgaaatggatttgttcagccatttacattaatgagcatttaaatgcaacagatatcatttcaggtgacttaacatgaatgaataaaagtcaatgctattggattgttttttgtttgacaagtgctatctgtgccactgatttaacttctgtagtaacaagggcattaccattcttcacctttcctaattctgatcccatagttttacatttttcctgtttattttgattttgttcactgctttatttcttaaagttctagcacatctgtgactcctccacttccacatttttgcactgcttacacttacgtgcaatcttattccttgtctgcacacacatgtggaaagctagaaataaatgttaaaacttactttttataaacattttaatatgtagtttggacatgatttattgacttaaggttcttctctaaactggaagtgaaatgcatgccttctgaagatgttctggctttgttaattctgtaatcatttcattggggaaaaaaccagctacgcagtttttccaatgagtgaattttttcattttgtgttttgcttaaaacggctccttcagggtagatgtcatactgcataacttttttggattcaaattatgaatgagaaattagttaacattctgctccacaaggtaagaaaaactgctctttggctctattttcaaaattacttctgagatgcatatagtctcaaaataacagctttagtaggcatatcacttcttgaaagccaaacatgagtgtaagacacttttatgaaacacggtggatccctaactggctttcaaattgacctttatagccttagacaacccttaggtatttacggagatgacttctttgattgtcataacaattagtggatgtgtccagttctctgtatctttgacttgatgctttatacatcatttcatttgttgcttctaagggaataagccatagaggcttctccaggtttaaaagaacagtaaagtacctggaaaaccaacatttttgaatgtatggacactggacatgagatatgtacaatgaaatcttaaaagaatctaagaatttgccctctttgccccactccacccagtaatttgacattactagtgccatgtataggacccaactgagtattagaatcagttttgactatgtctttgtatttcctaaatcttttaatgcataaaccgaattagggtccagttggcctgttaatggtaaatttacattttaaatgactcagtttgtttttcctgggcgagtttgcaatgtgataatcagattttttaaaactgattaatttgctttcttgtgtgggtgtactcacattttaaagtatgaaccacagttaactagtggtctcaggggtagtgaaacactcacttttttttttgtttgtttttttttgtttgtttgttgaaatggcttagttgaagtatacttaaggtactgatcatgctgtgttagtaatttgggcggggaggggggtaactcagccatgttttgtgttggcataacaaaactgttaatgattgttgattacacttttaagtgaatttgtcttttatgaggaacccagtgcaagtcactaaatattgtctaatagtgacatctgcataagacttgtaatagctgaagttaattgagcttaaaggaattgttaccattaaagtctgtgtttaaagaca

SEQ ID NO: 3751 - DNA, 4051 bp, Homo sapiens
gctggatcgcgcagcggctgcttcctttaccttcctcccatggtctccttccggttctcgatgcttctctgagcctaagggtttccgccactcgttcaccctccccccagctcatgatcytcctccctcccccgccctcctggtccaatctccgatctgtttagtaagaaggtgctgttccgagaaraaggaaaagggcttgacacgtattcactcggccccggacgtgggaagcaagccgtctggcttcggcctcacatcggtcytgtgctcgggacggcggcgttggcggactgatccgcggcggtgaagaggcaggaggagggggaggggcggagcgtggcagctggcagtagttccgtcagagcggacatcttgtggctgtgtcgtgcgcgtgagccccgtagggccggggaggcaccagctgccgcgcggggaggaggccgaggccgcagcttgagggaggccccggcccctctgcgcctgtgtctggcagagctggtgtgagacgagacaatcctgccccgccgccgggataatcaagagttttggccggacctttgagcatacaccgagagagtgaggagccagacgacaagcacacactatggcgctgaaacggattaataaggaacttagtgatttggcccgtgaccctccagcacaatgttctgcaggtccagttggggatgatatgtttcattggcaagccacaattatgggacctaatgacagcccatatcaaggcggtgtattctttttgacaattcattttcctacagactaccccttcaaaccacctaaggcaagttgcatttacaacaagaatttatcatccaaatattaacagtaatggcagcatttgtctcgatattctaagatcacagtggtcgcctgctttaacaatttctaaagttcttttatccatttgttcactgctatgtgatccaaacccagatgaccccctagtgccagagattgcacggatctataaaacagacagagataagtacaacagaatatctcgggaatggactcagaagtatgccatgtgatgctaccttaaagtcagaataacctgcattatagctggaataaactttaaattactgttccttttttgattttcttatccggctgctcccctatcagacctcatcttttttaattttattttttgtttacctccctccattcattcacatgctcatctgagaagacttaagttcttccagctttggacaataactgcttttagaaactgtaaagtagttacaagagaacagttgcccaagactcagaattttwaaaaaaaaaaatggagcatgtgtattatgtggccaatgtcttcactctaacttggttatgagactaaaaccattcctcactgctctaacatgctgaagaaatcatctgagggggagggagatggatgctcagttgtcacatcaaaggatacagcattattctagcagcatccattcttgtttaagccttccactgttagagatttgaggttacatgatatgctttatgctcataactgatgtggctggagaattggtattgaatttatagcatcagcagaacagaaaatgtgatgtattttatgcatgtcaataaaggaatgacctgttcttgttctacagagaatggaaattggaagtcaaacaccctttgtattccaaaatagggtctcaaacattttgtaattttcatttaaattgttaggaggcttggagctattagttaatctatcttccaatacactgtttaatatagcactgaataaatgatgcaagttgtcaatggatgagtgatcaactaatagctctgctagtaattgatttatttttcttcaataaagttgcataaaccaatgagttagctgcctggattaatcagtatgggaaacaatcttttgtaaatgcaaagctgttttttgtatatactgttgggatttgcttcattgtttgacatcaaatgatgatgtaaagttcgaaagagtgaayattttgccatgttcagttaaagtgcacagtctgttacaggttgacacattgcttgacctgatttatgcagaattaataagctatttggatagtgtagctttaatgtgctgcacatgatactggcagccctagagttcatagatggacttttgggacccagcagttttgaaatgtgtttatggagtttaagaaatttattttccaggtgcagcccctgtctaactgaaatttctcttcmccttgtacacttgacagctgaaaaaaaacaacatgggagtaataatgggtcaaaatttgctgtgttgaagtgacttatctatgtgggatattgagtatccattgaaatggatttgttcagccatttacattaatgagcatttaaatgcaacagatatcatttcaggtgacttaacatgaatgaataaaagtcaatgctattggattgttttttgtttgacaagtgctatctgtgccactgatttaacttctgtagtaacaagggcattaccattcttcacctttcctaattctgatcccatagttttacatttttcctgtttattttgattttgttcactgctttatttcttaaagttctagcacatctgtgactcctccacttccacatttttgcactgcttacacttacgtgcaatcttattccttgtctgcacacacatgtggaaagctagaaataaatgttaaaacttactttttataaacattttaatatgtagtttggacatgatttattgacttaaggttcttctctaaactggaagtgaaatgcatgccttctgaagatgttctggctttgttaattctgtaatcatttcattggggaaaaaaccagctacgcagtttttccaatgagtgaattttttcattttgtgttttgcttaaaacggctccttcagggtagatgtcatactgcataacttttttggattcaaattatgaatgagaaattagttaacattctgctccacaaggtaagaaaaactgctctttggctctattttcaaaattacttctgagatgcatatagtctcaaaataacagctttagtaggcatatcacttcttgaaagccaaacatgagtgtaagacacttttatgaaacacggtggatccctaactggctttcaaattgacctttatagccttagacaacccttaggtatttacggagatgacttctttgattgtcataacaattagtggatgtgtccagttctctgtatctttgacttgatgctttatacatcatttcatttgttgcttctaagggaataagccatagaggcttctccaggtttaaaagaacagtaaagtacctggaaaaccaacatttttgaatgtatggacactggacatgagatatgtacaatgaaatcttaaaagaatctaagaatttgccctctttgccccactccacccagtaatttgacattactagtgccatgtataggacccaactgagtattagaatcagttttgactatgtctttgtatttcctaaatcttttaatgcataaaccgaattagggtccagttggcctgttaatggtaaatttacattttaaatgactcagtttgtttttcctgggcgagtttgcaatgtgataatcagattttttaaaactgattaatttgctttcttgtgtgggtgtactcacattttaaagtatgaaccacagttaactagtggtctcaggggtagtgaaacactcacttttttttttgtttgtttttttttgtttgtttgttgaaatggcttagttgaagtatacttaaggtactgatcatgctgtgttagtaatttgggcggggaggggggtaactcagccatgttttgtgttggcataacaaaactgttaatgattgttgattacacttttaagtgaatttgtcttttatgaggaacccagtgcaagtcactaaatattgtctaatagtgacatctgcataagacttgtaatagctgaagttaattgagcttaaaggaattgttaccattaaagtctgtgtttaaagaca

SEQ ID NO: 3752 - DNA, 3771 bp, Homo sapiens
gcgggaactggcgggtagcgaggccctcctcggaatctcgtgtgaaggtggccctcctcttgggcctttaacgtctgtagatgctggagaccagcagaaaggatactgtgtgcgatgagataagcatgtgagaatgctttctaaccgaaagtgcctttcaaaagcgcctgtgtctggcagagctggtgtgagacgagacaatcctgccccgccgccgggataatcaagagttttggccggacctttgagcatacaccgagagagtgaggagccagacgacaagcacacactatggcgctgaaacggattaataaggaacttagtgatttggcccgtgaccctccagcacaatgttctgcaggtccagttggggatgatatgtttcattggcaagccacaattatgggacctaatgacagcccatatcaaggcggtgtattctttttgacaattcattttcctacagactaccccttcaaaccacctaaggttgcatttacaacaagaatttatcatccaaatattaacagtaatggcagcatttgtctcgatattctaagatcacagtggtcgcctgctttaacaatttctaaagttcttttatccatttgttcactgctatgtgatccaaacccagatgaccccctagtgccagagattgcacggatctataaaacagacagagataagtacaacagaatatctcgggaatggactcagaagtatgccatgtgatgctaccttaaagtcagaataacctgcattatagctggaataaactttaaattactgttccttttttgattttcttatccggctgctcccctatcagacctcatcttttttaattttattttttgtttacctccctccattcattcacatgctcatctgagaagacttaagttcttccagctttggacaataactgcttttagaaactgtaaagtagttacaagagaacagttgcccaagactcagaattttwaaaaaaaaaaatggagcatgtgtattatgtggccaatgtcttcactctaacttggttatgagactaaaaccattcctcactgctctaacatgctgaagaaatcatctgagggggagggagatggatgctcagttgtcacatcaaaggatacagcattattctagcagcatccattcttgtttaagccttccactgttagagatttgaggttacatgatatgctttatgctcataactgatgtggctggagaattggtattgaatttatagcatcagcagaacagaaaatgtgatgtattttatgcatgtcaataaaggaatgacctgttcttgttctacagagaatggaaattggaagtcaaacaccctttgtattccaaaatagggtctcaaacattttgtaattttcatttaaattgttaggaggcttggagctattagttaatctatcttccaatacactgtttaatatagcactgaataaatgatgcaagttgtcaatggatgagtgatcaactaatagctctgctagtaattgatttatttttcttcaataaagttgcataaaccaatgagttagctgcctggattaatcagtatgggaaacaatcttttgtaaatgcaaagctgttttttgtatatactgttgggatttgcttcattgtttgacatcaaatgatgatgtaaagttcgaaagagtgaayattttgccatgttcagttaaagtgcacagtctgttacaggttgacacattgcttgacctgatttatgcagaattaataagctatttggatagtgtagctttaatgtgctgcacatgatactggcagccctagagttcatagatggacttttgggacccagcagttttgaaatgtgtttatggagtttaagaaatttattttccaggtgcagcccctgtctaactgaaatttctcttcmccttgtacacttgacagctgaaaaaaaacaacatgggagtaataatgggtcaaaatttgcaaaataaagtactgttttggtgtgggagttgtcatgaggctgtgttgaagtgacttatctatgtgggatattgagtatccattgaaatggatttgttcagccatttacattaatgagcatttaaatgcaacagatatcatttcaggtgacttaacatgaatgaataaaagtcaatgctattggattgttttttgtttgacaagtgctatctgtgccactgatttaacttctgtagtaacaagggcattaccattcttcacctttcctaattctgatcccatagttttacatttttcctgtttattttgattttgttcactgctttatttcttaaagttctagcacatctgtgactcctccacttccacatttttgcactgcttacacttacgtgcaatcttattccttgtctgcacacacatgtggaaagctagaaataaatgttaaaacttactttttataaacattttaatatgtagtttggacatgatttattgacttaaggttcttctctaaactggaagtgaaatgcatgccttctgaagatgttctggctttgttaattctgtaatcatttcattggggaaaaaaccagctacgcagtttttccaatgagtgaattttttcattttgtgttttgcttaaaacggctccttcagggtagatgtcatactgcataacttttttggattcaaattatgaatgagaaattagttaacattctgctccacaaggtaagaaaaactgctctttggctctattttcaaaattacttctgagatgcatatagtctcaaaataacagctttagtaggcatatcacttcttgaaagccaaacatgagtgtaagacacttttatgaaacacggtggatccctaactggctttcaaattgacctttatagccttagacaacccttaggtatttacggagatgacttctttgattgtcataacaattagtggatgtgtccagttctctgtatctttgacttgatgctttatacatcatttcatttgttgcttctaagggaataagccatagaggcttctccaggtttaaaagaacagtaaagtacctggaaaaccaacatttttgaatgtatggacactggacatgagatatgtacaatgaaatcttaaaagaatctaagaatttgccctctttgccccactccacccagtaatttgacattactagtgccatgtataggacccaactgagtattagaatcagttttgactatgtctttgtatttcctaaatcttttaatgcataaaccgaattagggtccagttggcctgttaatggtaaatttacattttaaatgactcagtttgtttttcctgggcgagtttgcaatgtgataatcagattttttaaaactgattaatttgctttcttgtgtgggtgtactcacattttaaagtatgaaccacagttaactagtggtctcaggggtagtgaaacactcacttttttttttgtttgtttttttttgtttgtttgttgaaatggcttagttgaagtatacttaaggtactgatcatgctgtgttagtaatttgggcggggaggggggtaactcagccatgttttgtgttggcataacaaaactgttaatgattgttgattacacttttaagtgaatttgtcttttatgaggaacccagtgcaagtcactaaatattgtctaatagtgacatctgcataagacttgtaatagctgaagttaattgagcttaaaggaattgttaccattaaagtctgtgtttaaagaca

SEQ ID NO: 3753 - DNA, 3731 bp, Homo sapiens
gcgggaactggcgggtagcgaggccctcctcggaatctcgtgtgaaggtggccctcctcttgggcctttaacgtctgtagatgctggagaccagcagaaaggatactgtgtgcgatgagataagcatgtgagaatgctttctaaccgaaagtgcctttcaaaagcgcctgtgtctggcagagctggtgtgagacgagacaatcctgccccgccgccgggataatcaagagttttggccggacctttgagcatacaccgagagagtgaggagccagacgacaagcacacactatggcgctgaaacggattaataaggaacttagtgatttggcccgtgaccctccagcacaatgttctgcaggtccagttggggatgatatgtttcattggcaagccacaattatgggacctaatgacagcccatatcaaggcggtgtattctttttgacaattcattttcctacagactaccccttcaaaccacctaaggttgcatttacaacaagaatttatcatccaaatattaacagtaatggcagcatttgtctcgatattctaagatcacagtggtcgcctgctttaacaatttctaaagttcttttatccatttgttcactgctatgtgatccaaacccagatgaccccctagtgccagagattgcacggatctataaaacagacagagataagtacaacagaatatctcgggaatggactcagaagtatgccatgtgatgctaccttaaagtcagaataacctgcattatagctggaataaactttaaattactgttccttttttgattttcttatccggctgctcccctatcagacctcatcttttttaattttattttttgtttacctccctccattcattcacatgctcatctgagaagacttaagttcttccagctttggacaataactgcttttagaaactgtaaagtagttacaagagaacagttgcccaagactcagaattttwaaaaaaaaaaatggagcatgtgtattatgtggccaatgtcttcactctaacttggttatgagactaaaaccattcctcactgctctaacatgctgaagaaatcatctgagggggagggagatggatgctcagttgtcacatcaaaggatacagcattattctagcagcatccattcttgtttaagccttccactgttagagatttgaggttacatgatatgctttatgctcataactgatgtggctggagaattggtattgaatttatagcatcagcagaacagaaaatgtgatgtattttatgcatgtcaataaaggaatgacctgttcttgttctacagagaatggaaattggaagtcaaacaccctttgtattccaaaatagggtctcaaacattttgtaattttcatttaaattgttaggaggcttggagctattagttaatctatcttccaatacactgtttaatatagcactgaataaatgatgcaagttgtcaatggatgagtgatcaactaatagctctgctagtaattgatttatttttcttcaataaagttgcataaaccaatgagttagctgcctggattaatcagtatgggaaacaatcttttgtaaatgcaaagctgttttttgtatatactgttgggatttgcttcattgtttgacatcaaatgatgatgtaaagttcgaaagagtgaayattttgccatgttcagttaaagtgcacagtctgttacaggttgacacattgcttgacctgatttatgcagaattaataagctatttggatagtgtagctttaatgtgctgcacatgatactggcagccctagagttcatagatggacttttgggacccagcagttttgaaatgtgtttatggagtttaagaaatttattttccaggtgcagcccctgtctaactgaaatttctcttcmccttgtacacttgacagctgaaaaaaaacaacatgggagtaataatgggtcaaaatttgctgtgttgaagtgacttatctatgtgggatattgagtatccattgaaatggatttgttcagccatttacattaatgagcatttaaatgcaacagatatcatttcaggtgacttaacatgaatgaataaaagtcaatgctattggattgttttttgtttgacaagtgctatctgtgccactgatttaacttctgtagtaacaagggcattaccattcttcacctttcctaattctgatcccatagttttacatttttcctgtttattttgattttgttcactgctttatttcttaaagttctagcacatctgtgactcctccacttccacatttttgcactgcttacacttacgtgcaatcttattccttgtctgcacacacatgtggaaagctagaaataaatgttaaaacttactttttataaacattttaatatgtagtttggacatgatttattgacttaaggttcttctctaaactggaagtgaaatgcatgccttctgaagatgttctggctttgttaattctgtaatcatttcattggggaaaaaaccagctacgcagtttttccaatgagtgaattttttcattttgtgttttgcttaaaacggctccttcagggtagatgtcatactgcataacttttttggattcaaattatgaatgagaaattagttaacattctgctccacaaggtaagaaaaactgctctttggctctattttcaaaattacttctgagatgcatatagtctcaaaataacagctttagtaggcatatcacttcttgaaagccaaacatgagtgtaagacacttttatgaaacacggtggatccctaactggctttcaaattgacctttatagccttagacaacccttaggtatttacggagatgacttctttgattgtcataacaattagtggatgtgtccagttctctgtatctttgacttgatgctttatacatcatttcatttgttgcttctaagggaataagccatagaggcttctccaggtttaaaagaacagtaaagtacctggaaaaccaacatttttgaatgtatggacactggacatgagatatgtacaatgaaatcttaaaagaatctaagaatttgccctctttgccccactccacccagtaatttgacattactagtgccatgtataggacccaactgagtattagaatcagttttgactatgtctttgtatttcctaaatcttttaatgcataaaccgaattagggtccagttggcctgttaatggtaaatttacattttaaatgactcagtttgtttttcctgggcgagtttgcaatgtgataatcagattttttaaaactgattaatttgctttcttgtgtgggtgtactcacattttaaagtatgaaccacagttaactagtggtctcaggggtagtgaaacactcacttttttttttgtttgtttttttttgtttgtttgttgaaatggcttagttgaagtatacttaaggtactgatcatgctgtgttagtaatttgggcggggaggggggtaactcagccatgttttgtgttggcataacaaaactgttaatgattgttgattacacttttaagtgaatttgtcttttatgaggaacccagtgcaagtcactaaatattgtctaatagtgacatctgcataagacttgtaatagctgaagttaattgagcttaaaggaattgttaccattaaagtctgtgtttaaagaca

SEQ ID NO: 3754 - DNA, 3812 bp, Homo sapiens
cgcttcggttagccagccacgaagttctcgcgagagtcgtctcctcgataccaataagaaggtgctgttccgagaaraaggaaaagggcttgacacgtattcactcggccccggacgtgggaagcaagccgtctggcttcggcctcacatcggtcytgtgctcgggacggcggcgttggcggactgatccgcggcggtgaagaggcgcctgtgtctggcagagctggtgtgagacgagacaatcctgccccgccgccgggataatcaagagttttggccggacctttgagcatacaccgagagagtgaggagccagacgacaagcacacactatggcgctgaaacggattaataaggaacttagtgatttggcccgtgaccctccagcacaatgttctgcaggtccagttggggatgatatgtttcattggcaagccacaattatgggacctaatgacagcccatatcaaggcggtgtattctttttgacaattcattttcctacagactaccccttcaaaccacctaaggttgcatttacaacaagaatttatcatccaaatattaacagtaatggcagcatttgtctcgatattctaagatcacagtggtcgcctgctttaacaatttctaaagttcttttatccatttgttcactgctatgtgatccaaacccagatgaccccctagtgccagagattgcacggatctataaaacagacagagataagtacaacagaatatctcgggaatggactcagaagtatgccatgtgatgctaccttaaagtcagaataacctgcattatagctggaataaactttaaattactgttccttttttgattttcttatccggctgctcccctatcagacctcatcttttttaattttattttttgtttacctccctccattcattcacatgctcatctgagaagacttaagttcttccagctttggacaataactgcttttagaaactgtaaagtagttacaagagaacagttgcccaagactcagaattttwaaaaaaaaaaatggagcatgtgtattatgtggccaatgtcttcactctaacttggttatgagactaaaaccattcctcactgctctaacatgctgaagaaatcatctgagggggagggagatggatgctcagttgtcacatcaaaggatacagcattattctagcagcatccattcttgtttaagccttccactgttagagatttgaggttacatgatatgctttatgctcataactgatgtggctggagaattggtattgaatttatagcatcagcagaacagaaaatgtgatgtattttatgcatgtcaataaaggaatgacctgttcttgttctacagagaatggaaattggaagtcaaacaccctttgtattccaaaatagggtctcaaacattttgtaattttcatttaaattgttaggaggcttggagctattagttaatctatcttccaatacactgtttaatatagcactgaataaatgatgcaagttgtcaatggatgagtgatcaactaatagctctgctagtaattgatttatttttcttcaataaagttgcataaaccaatgagttagctgcctggattaatcagtatgggaaacaatcttttgtaaatgcaaagctgttttttgtatatactgttgggatttgcttcattgtttgacatcaaatgatgatgtaaagttcgaaagagtgaayattttgccatgttcagttaaagtgcacagtctgttacaggttgacacattgcttgacctgatttatgcagaattaataagctatttggatagtgtagctttaatgtgctgcacatgatactggcagccctagagttcatagatggacttttgggacccagcagttttgaaatgtgtttatggagtttaagaaatttattttccaggtgcagcccctgtctaactgaaatttctcttcmccttgtacacttgacagctgaaaaaaaacaacatgggagtaataatgggtcaaaatttgcaaaataaagtactgttttggtgtgggagttgtcatgaggctgtgttgaagtgacttatctatgtgggatattgagtatccattgaaatggatttgttcagccatttacattaatgagcatttaaatgcaacagatatcatttcaggtgacttaacatgaatgaataaaagtcaatgctattggattgttttttgtttgacaagtgctatctgtgccactgatttaacttctgtagtaacaagggcattaccattcttcacctttcctaattctgatcccatagttttacatttttcctgtttattttgattttgttcactgctttatttcttaaagttctagcacatctgtgactcctccacttccacatttttgcactgcttacacttacgtgcaatcttattccttgtctgcacacacatgtggaaagctagaaataaatgttaaaacttactttttataaacattttaatatgtagtttggacatgatttattgacttaaggttcttctctaaactggaagtgaaatgcatgccttctgaagatgttctggctttgttaattctgtaatcatttcattggggaaaaaaccagctacgcagtttttccaatgagtgaattttttcattttgtgttttgcttaaaacggctccttcagggtagatgtcatactgcataacttttttggattcaaattatgaatgagaaattagttaacattctgctccacaaggtaagaaaaactgctctttggctctattttcaaaattacttctgagatgcatatagtctcaaaataacagctttagtaggcatatcacttcttgaaagccaaacatgagtgtaagacacttttatgaaacacggtggatccctaactggctttcaaattgacctttatagccttagacaacccttaggtatttacggagatgacttctttgattgtcataacaattagtggatgtgtccagttctctgtatctttgacttgatgctttatacatcatttcatttgttgcttctaagggaataagccatagaggcttctccaggtttaaaagaacagtaaagtacctggaaaaccaacatttttgaatgtatggacactggacatgagatatgtacaatgaaatcttaaaagaatctaagaatttgccctctttgccccactccacccagtaatttgacattactagtgccatgtataggacccaactgagtattagaatcagttttgactatgtctttgtatttcctaaatcttttaatgcataaaccgaattagggtccagttggcctgttaatggtaaatttacattttaaatgactcagtttgtttttcctgggcgagtttgcaatgtgataatcagattttttaaaactgattaatttgctttcttgtgtgggtgtactcacattttaaagtatgaaccacagttaactagtggtctcaggggtagtgaaacactcacttttttttttgtttgtttttttttgtttgtttgttgaaatggcttagttgaagtatacttaaggtactgatcatgctgtgttagtaatttgggcggggaggggggtaactcagccatgttttgtgttggcataacaaaactgttaatgattgttgattacacttttaagtgaatttgtcttttatgaggaacccagtgcaagtcactaaatattgtctaatagtgacatctgcataagacttgtaatagctgaagttaattgagcttaaaggaattgttaccattaaagtctgtgtttaaagaca

SEQ ID NO: 3755 - DNA, 3965 bp, Homo sapiens
accaagtgaggaaactgggggacgctgtggggagrggcgtggggctggatcgcgcagcggctgcttcctttaccttcctcccatggtctccttccggttctcgatgcttctctgagcctaagggtttccgccactcgttcaccctccccccagctcatgatcytcctccctcccccgccctcctggtccaatctccgatctgtttagtaagaaggtgctgttccgagaaraaggaaaagggcttgacacgtattcactcggccccggacgtgggaagcaagccgtctggcttcggcctcacatcggtcytgtgctcgggacggcggcgttggcggactgatccgcggcggtgaagaggcgcctgtgtctggcagagctggtgtgagacgagacaatcctgccccgccgccgggataatcaagagttttggccggacctttgagcatacaccgagagagtgaggagccagacgacaagcacacactatggcgctgaaacggattaataaggaacttagtgatttggcccgtgaccctccagcacaatgttctgcaggtccagttggggatgatatgtttcattggcaagccacaattatgggacctaatgacagcccatatcaaggcggtgtattctttttgacaattcattttcctacagactaccccttcaaaccacctaaggttgcatttacaacaagaatttatcatccaaatattaacagtaatggcagcatttgtctcgatattctaagatcacagtggtcgcctgctttaacaatttctaaagttcttttatccatttgttcactgctatgtgatccaaacccagatgaccccctagtgccagagattgcacggatctataaaacagacagagataagtacaacagaatatctcgggaatggactcagaagtatgccatgtgatgctaccttaaagtcagaataacctgcattatagctggaataaactttaaattactgttccttttttgattttcttatccggctgctcccctatcagacctcatcttttttaattttattttttgtttacctccctccattcattcacatgctcatctgagaagacttaagttcttccagctttggacaataactgcttttagaaactgtaaagtagttacaagagaacagttgcccaagactcagaattttwaaaaaaaaaaatggagcatgtgtattatgtggccaatgtcttcactctaacttggttatgagactaaaaccattcctcactgctctaacatgctgaagaaatcatctgagggggagggagatggatgctcagttgtcacatcaaaggatacagcattattctagcagcatccattcttgtttaagccttccactgttagagatttgaggttacatgatatgctttatgctcataactgatgtggctggagaattggtattgaatttatagcatcagcagaacagaaaatgtgatgtattttatgcatgtcaataaaggaatgacctgttcttgttctacagagaatggaaattggaagtcaaacaccctttgtattccaaaatagggtctcaaacattttgtaattttcatttaaattgttaggaggcttggagctattagttaatctatcttccaatacactgtttaatatagcactgaataaatgatgcaagttgtcaatggatgagtgatcaactaatagctctgctagtaattgatttatttttcttcaataaagttgcataaaccaatgagttagctgcctggattaatcagtatgggaaacaatcttttgtaaatgcaaagctgttttttgtatatactgttgggatttgcttcattgtttgacatcaaatgatgatgtaaagttcgaaagagtgaayattttgccatgttcagttaaagtgcacagtctgttacaggttgacacattgcttgacctgatttatgcagaattaataagctatttggatagtgtagctttaatgtgctgcacatgatactggcagccctagagttcatagatggacttttgggacccagcagttttgaaatgtgtttatggagtttaagaaatttattttccaggtgcagcccctgtctaactgaaatttctcttcmccttgtacacttgacagctgaaaaaaaacaacatgggagtaataatgggtcaaaatttgcaaaataaagtactgttttggtgtgggagttgtcatgaggctgtgttgaagtgacttatctatgtgggatattgagtatccattgaaatggatttgttcagccatttacattaatgagcatttaaatgcaacagatatcatttcaggtgacttaacatgaatgaataaaagtcaatgctattggattgttttttgtttgacaagtgctatctgtgccactgatttaacttctgtagtaacaagggcattaccattcttcacctttcctaattctgatcccatagttttacatttttcctgtttattttgattttgttcactgctttatttcttaaagttctagcacatctgtgactcctccacttccacatttttgcactgcttacacttacgtgcaatcttattccttgtctgcacacacatgtggaaagctagaaataaatgttaaaacttactttttataaacattttaatatgtagtttggacatgatttattgacttaaggttcttctctaaactggaagtgaaatgcatgccttctgaagatgttctggctttgttaattctgtaatcatttcattggggaaaaaaccagctacgcagtttttccaatgagtgaattttttcattttgtgttttgcttaaaacggctccttcagggtagatgtcatactgcataacttttttggattcaaattatgaatgagaaattagttaacattctgctccacaaggtaagaaaaactgctctttggctctattttcaaaattacttctgagatgcatatagtctcaaaataacagctttagtaggcatatcacttcttgaaagccaaacatgagtgtaagacacttttatgaaacacggtggatccctaactggctttcaaattgacctttatagccttagacaacccttaggtatttacggagatgacttctttgattgtcataacaattagtggatgtgtccagttctctgtatctttgacttgatgctttatacatcatttcatttgttgcttctaagggaataagccatagaggcttctccaggtttaaaagaacagtaaagtacctggaaaaccaacatttttgaatgtatggacactggacatgagatatgtacaatgaaatcttaaaagaatctaagaatttgccctctttgccccactccacccagtaatttgacattactagtgccatgtataggacccaactgagtattagaatcagttttgactatgtctttgtatttcctaaatcttttaatgcataaaccgaattagggtccagttggcctgttaatggtaaatttacattttaaatgactcagtttgtttttcctgggcgagtttgcaatgtgataatcagattttttaaaactgattaatttgctttcttgtgtgggtgtactcacattttaaagtatgaaccacagttaactagtggtctcaggggtagtgaaacactcacttttttttttgtttgtttttttttgtttgtttgttgaaatggcttagttgaagtatacttaaggtactgatcatgctgtgttagtaatttgggcggggaggggggtaactcagccatgttttgtgttggcataacaaaactgttaatgattgttgattacacttttaagtgaatttgtcttttatgaggaacccagtgcaagtcactaaatattgtctaatagtgacatctgcataagacttgtaatagctgaagttaattgagcttaaaggaattgttaccattaaagtctgtgtttaaagaca

SEQ ID NO: 3756 - DNA, 3824 bp, Homo sapiens
ccaaccaccggcataagcattcaggggcgttgctttcctggcagtggcccgccccagttcgagccggtgccttactgcgtctcgcgagaacttatgcattttggaggcggaaccccgtcaggaaaagcgcacaaaactgctcttaagtcattgcagagctaccgcttcggttagccagccacgaagttctcgcgagagtcgtctcctcgataccaagcgcctgtgtctggcagagctggtgtgagacgagacaatcctgccccgccgccgggataatcaagagttttggccggacctttgagcatacaccgagagagtgaggagccagacgacaagcacacactatggcgctgaaacggattaataaggaacttagtgatttggcccgtgaccctccagcacaatgttctgcaggtccagttggggatgatatgtttcattggcaagccacaattatgggacctaatgacagcccatatcaaggcggtgtattctttttgacaattcattttcctacagactaccccttcaaaccacctaaggttgcatttacaacaagaatttatcatccaaatattaacagtaatggcagcatttgtctcgatattctaagatcacagtggtcgcctgctttaacaatttctaaagttcttttatccatttgttcactgctatgtgatccaaacccagatgaccccctagtgccagagattgcacggatctataaaacagacagagataagtacaacagaatatctcgggaatggactcagaagtatgccatgtgatgctaccttaaagtcagaataacctgcattatagctggaataaactttaaattactgttccttttttgattttcttatccggctgctcccctatcagacctcatcttttttaattttattttttgtttacctccctccattcattcacatgctcatctgagaagacttaagttcttccagctttggacaataactgcttttagaaactgtaaagtagttacaagagaacagttgcccaagactcagaattttwaaaaaaaaaaatggagcatgtgtattatgtggccaatgtcttcactctaacttggttatgagactaaaaccattcctcactgctctaacatgctgaagaaatcatctgagggggagggagatggatgctcagttgtcacatcaaaggatacagcattattctagcagcatccattcttgtttaagccttccactgttagagatttgaggttacatgatatgctttatgctcataactgatgtggctggagaattggtattgaatttatagcatcagcagaacagaaaatgtgatgtattttatgcatgtcaataaaggaatgacctgttcttgttctacagagaatggaaattggaagtcaaacaccctttgtattccaaaatagggtctcaaacattttgtaattttcatttaaattgttaggaggcttggagctattagttaatctatcttccaatacactgtttaatatagcactgaataaatgatgcaagttgtcaatggatgagtgatcaactaatagctctgctagtaattgatttatttttcttcaataaagttgcataaaccaatgagttagctgcctggattaatcagtatgggaaacaatcttttgtaaatgcaaagctgttttttgtatatactgttgggatttgcttcattgtttgacatcaaatgatgatgtaaagttcgaaagagtgaayattttgccatgttcagttaaagtgcacagtctgttacaggttgacacattgcttgacctgatttatgcagaattaataagctatttggatagtgtagctttaatgtgctgcacatgatactggcagccctagagttcatagatggacttttgggacccagcagttttgaaatgtgtttatggagtttaagaaatttattttccaggtgcagcccctgtctaactgaaatttctcttcmccttgtacacttgacagctgaaaaaaaacaacatgggagtaataatgggtcaaaatttgcaaaataaagtactgttttggtgtgggagttgtcatgaggctgtgttgaagtgacttatctatgtgggatattgagtatccattgaaatggatttgttcagccatttacattaatgagcatttaaatgcaacagatatcatttcaggtgacttaacatgaatgaataaaagtcaatgctattggattgttttttgtttgacaagtgctatctgtgccactgatttaacttctgtagtaacaagggcattaccattcttcacctttcctaattctgatcccatagttttacatttttcctgtttattttgattttgttcactgctttatttcttaaagttctagcacatctgtgactcctccacttccacatttttgcactgcttacacttacgtgcaatcttattccttgtctgcacacacatgtggaaagctagaaataaatgttaaaacttactttttataaacattttaatatgtagtttggacatgatttattgacttaaggttcttctctaaactggaagtgaaatgcatgccttctgaagatgttctggctttgttaattctgtaatcatttcattggggaaaaaaccagctacgcagtttttccaatgagtgaattttttcattttgtgttttgcttaaaacggctccttcagggtagatgtcatactgcataacttttttggattcaaattatgaatgagaaattagttaacattctgctccacaaggtaagaaaaactgctctttggctctattttcaaaattacttctgagatgcatatagtctcaaaataacagctttagtaggcatatcacttcttgaaagccaaacatgagtgtaagacacttttatgaaacacggtggatccctaactggctttcaaattgacctttatagccttagacaacccttaggtatttacggagatgacttctttgattgtcataacaattagtggatgtgtccagttctctgtatctttgacttgatgctttatacatcatttcatttgttgcttctaagggaataagccatagaggcttctccaggtttaaaagaacagtaaagtacctggaaaaccaacatttttgaatgtatggacactggacatgagatatgtacaatgaaatcttaaaagaatctaagaatttgccctctttgccccactccacccagtaatttgacattactagtgccatgtataggacccaactgagtattagaatcagttttgactatgtctttgtatttcctaaatcttttaatgcataaaccgaattagggtccagttggcctgttaatggtaaatttacattttaaatgactcagtttgtttttcctgggcgagtttgcaatgtgataatcagattttttaaaactgattaatttgctttcttgtgtgggtgtactcacattttaaagtatgaaccacagttaactagtggtctcaggggtagtgaaacactcacttttttttttgtttgtttttttttgtttgtttgttgaaatggcttagttgaagtatacttaaggtactgatcatgctgtgttagtaatttgggcggggaggggggtaactcagccatgttttgtgttggcataacaaaactgttaatgattgttgattacacttttaagtgaatttgtcttttatgaggaacccagtgcaagtcactaaatattgtctaatagtgacatctgcataagacttgtaatagctgaagttaattgagcttaaaggaattgttaccattaaagtctgtgtttaaagaca

SEQ ID NO: 3757 - DNA, 3884 bp, Homo sapiens
aaaggatactgtgtgcgatgagataagcatgtgagaatgctttctaaccgaaatctcttcctttctagaggccgggaagttaaacttgtagccaccacctccgctcttcccgtcaccctcgcccccacttcgggccgaaagcacggtacagaggctgttggtggctttgccacgccaccccacccaccccggatcgcggctgtcttaagggacctggattcatcaggggctcttcggggcctgtgcgagtgctgatctgctccgtttttgcaaaaggcgcctgtgtctggcagagctggtgtgagacgagacaatcctgccccgccgccgggataatcaagagttttggccggacctttgagcatacaccgagagagtgaggagccagacgacaagcacacactatggcgctgaaacggattaataaggaacttagtgatttggcccgtgaccctccagcacaatgttctgcaggtccagttggggatgatatgtttcattggcaagccacaattatgggacctaatgacagcccatatcaaggcggtgtattctttttgacaattcattttcctacagactaccccttcaaaccacctaaggttgcatttacaacaagaatttatcatccaaatattaacagtaatggcagcatttgtctcgatattctaagatcacagtggtcgcctgctttaacaatttctaaagttcttttatccatttgttcactgctatgtgatccaaacccagatgaccccctagtgccagagattgcacggatctataaaacagacagagataagtacaacagaatatctcgggaatggactcagaagtatgccatgtgatgctaccttaaagtcagaataacctgcattatagctggaataaactttaaattactgttccttttttgattttcttatccggctgctcccctatcagacctcatcttttttaattttattttttgtttacctccctccattcattcacatgctcatctgagaagacttaagttcttccagctttggacaataactgcttttagaaactgtaaagtagttacaagagaacagttgcccaagactcagaattttwaaaaaaaaaaatggagcatgtgtattatgtggccaatgtcttcactctaacttggttatgagactaaaaccattcctcactgctctaacatgctgaagaaatcatctgagggggagggagatggatgctcagttgtcacatcaaaggatacagcattattctagcagcatccattcttgtttaagccttccactgttagagatttgaggttacatgatatgctttatgctcataactgatgtggctggagaattggtattgaatttatagcatcagcagaacagaaaatgtgatgtattttatgcatgtcaataaaggaatgacctgttcttgttctacagagaatggaaattggaagtcaaacaccctttgtattccaaaatagggtctcaaacattttgtaattttcatttaaattgttaggaggcttggagctattagttaatctatcttccaatacactgtttaatatagcactgaataaatgatgcaagttgtcaatggatgagtgatcaactaatagctctgctagtaattgatttatttttcttcaataaagttgcataaaccaatgagttagctgcctggattaatcagtatgggaaacaatcttttgtaaatgcaaagctgttttttgtatatactgttgggatttgcttcattgtttgacatcaaatgatgatgtaaagttcgaaagagtgaayattttgccatgttcagttaaagtgcacagtctgttacaggttgacacattgcttgacctgatttatgcagaattaataagctatttggatagtgtagctttaatgtgctgcacatgatactggcagccctagagttcatagatggacttttgggacccagcagttttgaaatgtgtttatggagtttaagaaatttattttccaggtgcagcccctgtctaactgaaatttctcttcmccttgtacacttgacagctgaaaaaaaacaacatgggagtaataatgggtcaaaatttgcaaaataaagtactgttttggtgtgggagttgtcatgaggctgtgttgaagtgacttatctatgtgggatattgagtatccattgaaatggatttgttcagccatttacattaatgagcatttaaatgcaacagatatcatttcaggtgacttaacatgaatgaataaaagtcaatgctattggattgttttttgtttgacaagtgctatctgtgccactgatttaacttctgtagtaacaagggcattaccattcttcacctttcctaattctgatcccatagttttacatttttcctgtttattttgattttgttcactgctttatttcttaaagttctagcacatctgtgactcctccacttccacatttttgcactgcttacacttacgtgcaatcttattccttgtctgcacacacatgtggaaagctagaaataaatgttaaaacttactttttataaacattttaatatgtagtttggacatgatttattgacttaaggttcttctctaaactggaagtgaaatgcatgccttctgaagatgttctggctttgttaattctgtaatcatttcattggggaaaaaaccagctacgcagtttttccaatgagtgaattttttcattttgtgttttgcttaaaacggctccttcagggtagatgtcatactgcataacttttttggattcaaattatgaatgagaaattagttaacattctgctccacaaggtaagaaaaactgctctttggctctattttcaaaattacttctgagatgcatatagtctcaaaataacagctttagtaggcatatcacttcttgaaagccaaacatgagtgtaagacacttttatgaaacacggtggatccctaactggctttcaaattgacctttatagccttagacaacccttaggtatttacggagatgacttctttgattgtcataacaattagtggatgtgtccagttctctgtatctttgacttgatgctttatacatcatttcatttgttgcttctaagggaataagccatagaggcttctccaggtttaaaagaacagtaaagtacctggaaaaccaacatttttgaatgtatggacactggacatgagatatgtacaatgaaatcttaaaagaatctaagaatttgccctctttgccccactccacccagtaatttgacattactagtgccatgtataggacccaactgagtattagaatcagttttgactatgtctttgtatttcctaaatcttttaatgcataaaccgaattagggtccagttggcctgttaatggtaaatttacattttaaatgactcagtttgtttttcctgggcgagtttgcaatgtgataatcagattttttaaaactgattaatttgctttcttgtgtgggtgtactcacattttaaagtatgaaccacagttaactagtggtctcaggggtagtgaaacactcacttttttttttgtttgtttttttttgtttgtttgttgaaatggcttagttgaagtatacttaaggtactgatcatgctgtgttagtaatttgggcggggaggggggtaactcagccatgttttgtgttggcataacaaaactgttaatgattgttgattacacttttaagtgaatttgtcttttatgaggaacccagtgcaagtcactaaatattgtctaatagtgacatctgcataagacttgtaatagctgaagttaattgagcttaaaggaattgttaccattaaagtctgtgtttaaagaca

SEQ ID NO: 3758 - DNA, 3686 bp, Homo sapiens
atgacaggatcaaattcacacataacaatattaactttaaatgtaaatggactaaatgctccaattaaaagacacaggctggcaaattggataaagagtcaagacccatcagtgtgctgtattcaggaaacccatctcacgtgcagagacacacataggctcaaaataaaaggatggaggaagatctcccaagcaaatggaaaacaaaaaaaggcaggggttgcatcctagtctctgataaaacagactttaaaccaacaaagatcaaaagagacaaagaaggccattacatcatggtaaagggatcaattcaacaagaagagctatctatcctaaatatatatgcacccaatacaggagcacccggattcataaagcaagtcctaagtgacctacaaggagacttagactcccacacaataataatggaagactttaaattatctttctatttcactaaattccacttttctgaaagttgctttcttgaacagttgaaaagstgtcatttaagcatttcaggtatttcattttcctgttacaatcctgggttagatttsctgttacttagctctcacctcttcatctattacagttttctccctcatttaattggagtatatcctcaaagatcttccacagaaaaggcatactggagatacaatttcagagttcttgaagacaatgaaattaaggcagaaatcaagaagttacttgaaactactgagaacagagatacaaaataccggaatctatgkaatccgactaaggcagtattaagagggaaatgtatagcactgaatgcccatatcacaagttagaaagatctcaagttaacttacaacttaacatcacaactaaaagaactaggaaaccaagagcaaacaaatcccaaagctagcagtagacaagaaataaccaaaatcagagctgaattgaaggagattgagataagaaaaatcattcaaaacataaatccaggagctggttttttgaaaaaaaaaaattaataaaatacatagatcactagctagactaataaagaagaaaagagaatattcatataaacacaaaatattcaaataaacacaatcagaaatgataaggggcgattgcaactgaccccacagaaatataaccatcggaggatattatgaatacttccgtgcacataaactagaacatctagaagcaatggataaattcctcaacacagctaccctcccaagagtgaaccaggaagaaactggatctctaaacagacaatatcaagcttggaaattgagacagtaataaatagcttaccaaccaataatgtccaggaccagacggattcacatctgaattctcccagatgtatgaagaagagctggtaccatttctactgaaactatttcaaaagttgatgagcaactcctccctaactcatcctgtgaggctagcatcaccctgataccaaaacctggcagagataaaacaaaaaaagaaaacctcagcccattatccctgatgaacatcgatgcaaaaatcctcaataaaacactggcaaactgaayccagcagcacatcaaaaagcttaaccaccatgatcaagtgggcttcatccctgggatgcaaggctggttcaacatacgcaaatcaatgaatgtaatccatcatataaacagaaccaaagacaaaaacgacaagattatctcaatagatgcagaaaaggcctttgacaaaattcaacagccgttcatgctaaacactctcaataaattaggtattgatgggatatatctcaaaataataagagctatttatgacagacccacagccaatatcatactgaatggacaaaaactggaagcattccctttgaaaagtggcacaagacaaggatgccctctctcaccactcctattcaacatagtattggaaattctggccagggcaatcagacaggagaaagaaataaagggtagtcaattaggaaaagaggaagtcaaatggtccctgtttgcagatgacatgattgtgtatttagaaaacctcattgtctccagcccaaaatctccttaagctgataagcaacttcagcaaagtctcaggacacaaaatcaatgtgcaaaaatcacaagcattcctatayaccaataacagacaaacagagagtgaaatcatgagtgaactcccattcacaatggcttcaaagagaataaaatacctaggaatccaatttacaagggatgtgaaggacctcttcaaggagaactacaaaccactgctcaasgaaataaaagaggacacaaacaaatggaagaacattctatgttcatggataggaagaatcaatatcatgaaaatggccatactgcccaaggtaatttacagattcaatgccatccccatcaagctaccactgactttcttcacagaattggaaaaaactactttaaagttcatatggaaccaaaaaagagcctgcattgccaagacaatcataagccaaaagaacaaagctggaggcatcacattacctgacttcagactatactacgaggctacagtaaccaaaacagcatggtactggtaccaaaacagagatatagctcaatggaacagaacagagtcctcagaaataataccacacatctacaaccatctgatctttgacaaacctgagaaaaacaagcaatggggaaaggattccctatttaataaatggtgctgggaaaactggctagccatatgtagaaagctgaaactggatcccttccttacaccttatacaaaaattaattcgagatggattaaagacttacatgttagacctaaaaccataaaaaccctagaagaaaacctaggcaataccattcaggacataggcatgggcaaggacttcatgtctaraacaccaaaagcaatggtaacaaaagccaaaattgacaaatgggatctaattaaactaaagagcttctgcacagcaaaagaaactaccattagaatgaacaggcaacctacagaatggragaaaatgtttgcaatctacccatctgacaaagggctaatatccagaatctacaawgaactyaaacaaatttacaagaaaaaaatcaaacaaccccatcaaaaagtgggtgaaggatatgaacagacacttctcaaaagaagacattkatgcagccaaaaracacatgaaaaaatgctcatcatcactggccatcagacaaatgcaaatcaaaaccacaatgagataccatctcataccagttagaatggcaatcattaaaaagtcaggaaacaacaggtgctggagaggatgtggagaaataggaacacttttacactgttggtgggactataaactagttcaaccattgtgggagtcggtgtggcgattcctcagggatctagagctagaaataccatttgacccagccatcccattactgggtatatacccaaaggattataaatcatgctgctataaagacacatgcacacgtatgtttattgtggcactattcacaatagcaaagacttggaaccaacccaaatgtccaacartgatagactggagtaagaaaatgtggcacatatacatcatggaatactatgcagccataaaaaatgatgagttcatgtcctttttaaggacatggatgaagctggaaaccatcattctcagcaaacgatcgcaa

SEQ ID NO: 3759 - DNA, 5080 bp, Homo sapiens
ctgtttccttctttgattgacaacttgtgttaaccctcgcacatctctgggccaatttttgcttgtaagtctttccggagacccctggaatttaaatcattagcaccgcgcccttccccgaagagtcttcgaagggttgccgcttttcggtggcgcagttctcgcgagaaggaaaatggcagctcccgagcagccgcttgcgatatcaaggggatgcacgagctcctcctcgctttccccgcctcggggcgaccgaacccttctggtcaggcacctgccggctgagcttactgctgaggagaaagaggacttgctgaagtacttcggggctcagtctgtgcgggtcctgtcagataaggggcgactgaaacatacagcttttgccacattccctaatgaaaaagcagctataaaggcattgacaagactccatcaactgaaacttttaggtcatactttagtcgttgaatttgcaaaagagcaagatcgagttcactccccatgtcccacttcaggytctgaaaaaaaaaaaaggtctgatgaccctgtcgaagatgataaagaaaaaaaagaacttggttatttaacagtagaaaatggaattgcaccaaaccatgggctgacttttcctttaaattcatgcctcaagtatatgtacccaccaccttccagcacaatcctagcaaacattgtaaatgccttggcaagcgtgcctaagttctatgtacaggtccttcatcttatgaataaaatgaatttgcccacaccttttggaccaattactgcgcgacctcccatgtatgaagactatatgccattgcatgcacctcttccacccacatctcctcagccacctgaggaacctcctttgccagacgaggatgaggaattatctagtgaagaatcagaatatgaaagcactgatgatgaggaccgacagagaatgaacaaattaatggaactagcaaatcttcagcccaaaagacctaaaacaataaagcagcgccatgtgagaaaaaagagaaaaataaaggatatgttgaatacacctttgtgtccttcacacagcagtttacatccagtgctgttaccttcagatgtatttgaccaaccacaacctgtaggtaacaaaagaattgaattccatatatctaccgacatgccagctgcatttaagaaagatttagaaaaggaacaaaattgtgaggaaaaaaatcatgatttacctgctactgaagttgatgcatccaatataggatttggaaaaatcttccccaaacctaatttggacatcacagaggagattaaagaagactctgatgaaatgccttcagaatgtatttctagaagggaattggaaaagggcagaatttctagagaagaaatggaaacactttcagttttcagaagttatgaaccgggtgaaccaaactgtagaatttatgtaaagaatttagctaaacatgttcaagaaaaggaccttaaatatatttttggaagatatgttgacttttcatcagaaacacagcggatcatgtttgatatacgtttgatgaaagaaggtcgtatgaaaggacaagctttcattggacttcctaatgaaaaagcagcagcaaaagccttaaaggaagctaatggatatgtgctttttggaaaacccatggtggttcagtttgctcgatctgctagaccaaaacaagatcctaaggaaggaaaaagaaagtgttaaaaattaataaagaagcattcctgcgtaaatactgctgtaatactgtcatgcaaagtgtatcctttcttgtctcttgtttcttctatttgtatgtttcctaaacctaattcaataacatatgctttctgttgtgtaatatatctggtttaggtatttataatgtgtttaaaatttgggcaaaggaaatgtttttcttttaaaaagtacttacattgaaaattaagatgtctggattactatgtaaattctagagagtagcagacctctcatctgaagtcttagtgaatctcttttgacatagatagcaatagaagtatctttcttctttcccctttctttttctaaacaagagaagaaaagcgtaatagaggggagaacacataatgcccactaagggtagtgcattaaggaaaaacagtcttggcaggtatataggaatagtggtttccagactggttgatgaccgtaatcaccaagaacagtggttctcagtcttggctgcacattgcagtgatctggaacttaaatactaattytaaaagggtgcagtggctcatacctgtaatcccagcactttgcaagtccgagatgggagaatcacttgagcccaggagtttgagaccagcctgggcaatgtagggagaccctgtccctacaaaaaatacaaaaattagccaagtgtggtggcttgcacctctggtctcagctacttgggatgctaaggcaggaggattacttgagccccagaggttgaggttgcagtgaaccatgatcacaccactgcattctagcctgggtgacagagtgagaccctctccctcctaaaaaaatccttaagaaatatattgatgcttggttcctttggtcagaattttgatttaaggtgttgggagtgtagcacagatgttggaataaacctctcaaactgattttaatatacaaacaaggtcgagaaccaccaaggaagagtttttatgcataaagattcctgtactctaccctagaactaatacatctgaatctctgggaatggagtataacaatcagatttgaaaaggtttctttagtaattttaaggactgaccagtttagacactgctttgttagagtaaaatgattaggtacctagtatcaacctagccatccaaccttatattaataactaggaaaataaagggttggagcctctgtgtttctttgttgaaaaatctgctactattattagatctgtgaaaacaattgaaaattcggttattatcaccttaaaagtacaaaacctatagattttgaaaatgtaattatttttctgtaggcatagttaaaaagattttgtaaatgttataaatcagtttctttataagcggtttatttagataaattttgttatactgacatgattcactaattttctaaatataaatggttcagctcttagttatttttaaactaatgacctgtgttatacttcctatttttaatgggcttttatgatgttttaggtttttttgaatcccgtgtccttcaagtgyttkctaactttgagaggaagaaattgaccmcctggactatggaactttggttgaatctggcgatgtggaacccatggatatggagggctgactatatacaccatgttttttcctggcacatcactcaactactattagctggcgagtcaactcacgttgttggaatgactagggacaactagacttcaagtgatctttcatcccaggaatataaatagtttctggaaaggacactgacaacttcaaagcaaaatgaagttctttctgttgcttttcaccattgggttctgctgggctcagtattccccaaatacacaacaaggacggacatctattgttcatctgtttgaatggcgatgggttgatattgctcttgaatgtgagcgatatttagctcccaagggatttggaggggttcaggtctctccaccaaatgaaaatgttgcaattcacaaccctttcagaccttggtgggaaagataccaaccagttagctataaattatgcacaagatctggaaatgaagatgaatttagaaacatggtgactagatgtaacaatgttggggttcgtatttatgtggatgctgtaattaatcatatgtctggtaatgctgtgagtgcaggaacaagcastacctgtggaagttacttcaaccctggaagtagggactytccagcagtcccatattctggatgggatttyaatgatggtaaatgtaaaactggaagtggagatatcgagaactacaatgatgctactcaggtcagagattgtcgtctggttggtcttcttgatcttgcactggagaaagattaygtgcgttccaagattgccgaatatatgaatcatctcattgacattggtgttgcagggttcagacttgatgcttccaagcacatgtggcctggagacataaaggcaattttggacaaactgcataatctaaacagtaactggttccctgcaggaagtaaacctttcatttaccaggaggtaattgatctgggtggtgagccaattaaaagcagtgactactttggwaatggccgggtgacagaattcaagtatggtgcaaaactcggcacagttattcgcaagtggaatggagagaagatgtcttacctaaagaactggggagaaggttggggtttcatgccttctgacagagcrcttgtctttgtggataaccatgacaatcaacgaggacatggggctggaggagcctctattcttaccttctgggatgctaggctgtataaaatggcagttggatttatgcttgctcatccttayggwtttacacgagtaatgtcaagctaccgttggccaagacagtttcaaaatggaaacgatgttaaygattgggttgggccaccaaataataatggagtaaytaaagaagttactattaatccagacactacttgtggcaatgactgggtctgtgaacatcgatggcgccaaataaggaacatggttawtttccgcaatgtagtggatggccagccttttacaaactggtatgataatgggagcaaccaagtggcttttgggagaggaaacagaggattcattgttttcaacaatgatgactggacattttctttaactttgcaaactggtcttcctgctggcacatactgtgatgtcatttctggagataaaattaatggcaaytgcacaggcattaaaatytacgtttctgaygatggcaaagctcatttttctattagtaactctgctgargatccatttattgcaattcatgctgaatctaaattataaaatttaaaattaaatgcatatcctcaaaacaata

SEQ ID NO: 3760 - DNA, 1809 bp, Homo sapiens
gttatactgacatgattcactaattttctaaatataaatggttcagctcttagttatttttaaactaatgacctgtgttatacttcctatttttaatgggcttttatgatgttttaggtttttttgaatcccgtgtccttcaagtgyttkctaactttgagaggaagaaattgaccmcctggactatggaactgaatataaatagtttctggaaaggacactgacaacttcaaagcaaaatgaagttctttctgttgcttttcaccattgggttctgctgggctcagtattccccaaatacacaacaaggacggacatctattgttcatctgtttgaatggcgatgggttgatattgctcttgaatgtgagcgatatttagctcccaagggatttggaggggttcaggtctctccaccaaatgaaaatgttgcaattcacaaccctttcagaccttggtgggaaagataccaaccagttagctataaattatgcacaagatctggaaatgaagatgaatttagaaacatggtgactagatgtaacaatgttggggttcgtatttatgtggatgctgtaattaatcatatgtctggtaatgctgtgagtgcaggaacaagcastacctgtggaagttacttcaaccctggaagtagggactytccagcagtcccatattctggatgggatttyaatgatggtaaatgtaaaactggaagtggagatatcgagaactacaatgatgctactcaggtcagagattgtcgtctggttggtcttcttgatcttgcactggagaaagattaygtgcgttccaagattgccgaatatatgaatcatctcattgacattggtgttgcagggttcagacttgatgcttccaagcacatgtggcctggagacataaaggcaattttggacaaactgcataatctaaacagtaactggttccctgcaggaagtaaacctttcatttaccaggaggtaattgatctgggtggtgagccaattaaaagcagtgactactttggwaatggccgggtgacagaattcaagtatggtgcaaaactcggcacagttattcgcaagtggaatggagagaagatgtcttacctaaagaactggggagaaggttggggtttcatgccttctgacagagcrcttgtctttgtggataaccatgacaatcaacgaggacatggggctggaggagcctctattcttaccttctgggatgctaggctgtataaaatggcagttggatttatgcttgctcatccttayggwtttacacgagtaatgtcaagctaccgttggccaagacagtttcaaaatggaaacgatgttaaygattgggttgggccaccaaataataatggagtaaytaaagaagttactattaatccagacactacttgtggcaatgactgggtctgtgaacatcgatggcgccaaataaggaacatggttawtttccgcaatgtagtggatggccagccttttacaaactggtatgataatgggagcaaccaagtggcttttgggagaggaaacagaggattcattgttttcaacaatgatgactggacattttctttaactttgcaaactggtcttcctgctggcacatactgtgatgtcatttctggagataaaattaatggcaaytgcacaggcattaaaatytacgtttctgaygatggcaaagctcatttttctattagtaactctgctgargatccatttattgcaattcatgctgaatctaaattataaaatttaaaattaaatgcatatcctcaaaacaata

SEQ ID NO: 3761 - DNA, 4738 bp, Homo sapiens
ttcctgtttccttctttgattgacaacttgtgttaaccctcgcacatctctgggccaatttttgcttaaacatacagcttttgccacattccctaatgaaaaagcagctataaaggcattgacaagactccatcaactgaaacttttaggtcatactttagtcgttgaatttgcaaaagagcaagatcgagttcactccccatgtcccacttcaggytctgaaaaaaaaaaaaggtctgatgaccctgtcgaagatgataaagaaaaaaaagaacttggttatttaacagtagaaaatggaattgcaccaaaccatgggctgacttttcctttaaattcatgcctcaagtatatgtacccaccaccttccagcacaatcctagcaaacattgtaaatgccttggcaagcgtgcctaagttctatgtacaggtccttcatcttatgaataaaatgaatttgcccacaccttttggaccaattactgcgcgacctcccatgtatgaagactatatgccattgcatgcacctcttccacccacatctcctcagccacctgaggaacctcctttgccagacgaggatgaggaattatctagtgaagaatcagaatatgaaagcactgatgatgaggaccgacagagaatgaacaaattaatggaactagcaaatcttcagcccaaaagacctaaaacaataaagcagcgccatgtgagaaaaaagagaaaaataaaggatatgttgaatacacctttgtgtccttcacacagcagtttacatccagtgctgttaccttcagatgtatttgaccaaccacaacctgtaggtaacaaaagaattgaattccatatatctaccgacatgccagctgcatttaagaaagatttagaaaaggaacaaaattgtgaggaaaaaaatcatgatttacctgctactgaagttgatgcatccaatataggatttggaaaaatcttccccaaacctaatttggacatcacagaggagattaaagaagactctgatgaaatgccttcagaatgtatttctagaagggaattggaaaagggcagaatttctagagaagaaatggaaacactttcagttttcagaagttatgaaccgggtgaaccaaactgtagaatttatgtaaagaatttagctaaacatgttcaagaaaaggaccttaaatatatttttggaagatatgttgacttttcatcagaaacacagcggatcatgtttgatatacgtttgatgaaagaaggtcgtatgaaaggacaagctttcattggacttcctaatgaaaaagcagcagcaaaagccttaaaggaagctaatggatatgtgctttttggaaaacccatggtggttcagtttgctcgatctgctagaccaaaacaagatcctaaggaaggaaaaagaaagtgttaaaaattaataaagaagcattcctgcgtaaatactgctgtaatactgtcatgcaaagtgtatcctttcttgtctcttgtttcttctatttgtatgtttcctaaacctaattcaataacatatgctttctgttgtgtaatatatctggtttaggtatttataatgtgtttaaaatttgggcaaaggaaatgtttttcttttaaaaagtacttacattgaaaattaagatgtctggattactatgtaaattctagagagtagcagacctctcatctgaagtcttagtgaatctcttttgacatagatagcaatagaagtatctttcttctttcccctttctttttctaaacaagagaagaaaagcgtaatagaggggagaacacataatgcccactaagggtagtgcattaaggaaaaacagtcttggcaggtatataggaatagtggtttccagactggttgatgaccgtaatcaccaagaacagtggttctcagtcttggctgcacattgcagtgatctggaacttaaatactaattytaaaagggtgcagtggctcatacctgtaatcccagcactttgcaagtccgagatgggagaatcacttgagcccaggagtttgagaccagcctgggcaatgtagggagaccctgtccctacaaaaaatacaaaaattagccaagtgtggtggcttgcacctctggtctcagctacttgggatgctaaggcaggaggattacttgagccccagaggttgaggttgcagtgaaccatgatcacaccactgcattctagcctgggtgacagagtgagaccctctccctcctaaaaaaatccttaagaaatatattgatgcttggttcctttggtcagaattttgatttaaggtgttgggagtgtagcacagatgttggaataaacctctcaaactgattttaatatacaaacaaggtcgagaaccaccaaggaagagtttttatgcataaagattcctgtactctaccctagaactaatacatctgaatctctgggaatggagtataacaatcagatttgaaaaggtttctttagtaattttaaggactgaccagtttagacactgctttgttagagtaaaatgattaggtacctagtatcaacctagccatccaaccttatattaataactaggaaaataaagggttggagcctctgtgtttctttgttgaaaaatctgctactattattagatctgtgaaaacaattgaaaattcggttattatcaccttaaaagtacaaaacctatagattttgaaaatgtaattatttttctgtaggcatagttaaaaagattttgtaaatgttataaatcagtttctttataagcggtttatttagataaattttgttatactgacatgattcactaattttctaaatataaatggttcagctcttagttatttttaaactaatgacctgtgttatacttcctatttttaatgggcttttatgatgttttaggtttttttgaatcccgtgtccttcaagtgyttkctaactttgagaggaagaaattgaccmcctggactatggaactttggttgaatctggcgatgtggaacccatggatatggagggctgactatatacaccatgttttttcctggcacatcactcaactactattagctggcgagtcaactcacgttgttggaatgactagggacaactagacttcaagtgatctttcatcccagcaaaatgaagttctttctgttgcttttcaccattgggttctgctgggctcagtattccccaaatacacaacaaggacggacatctattgttcatctgtttgaatggcgatgggttgatattgctcttgaatgtgagcgatatttagctcccaagggatttggaggggttcaggtctctccaccaaatgaaaatgttgcaattcacaaccctttcagaccttggtgggaaagataccaaccagttagctataaattatgcacaagatctggaaatgaagatgaatttagaaacatggtgactagatgtaacaatgttggggttcgtatttatgtggatgctgtaattaatcatatgtctggtaatgctgtgagtgcaggaacaagcastacctgtggaagttacttcaaccctggaagtagggactytccagcagtcccatattctggatgggatttyaatgatggtaaatgtaaaactggaagtggagatatcgagaactacaatgatgctactcaggtcagagattgtcgtctggttggtcttcttgatcttgcactggagaaagattaygtgcgttccaagattgccgaatatatgaatcatctcattgacattggtgttgcagggttcagacttgatgcttccaagcacatgtggcctggagacataaaggcaattttggacaaactgcataatctaaacagtaactggttccctgcaggaagtaaacctttcatttaccaggaggtaattgatctgggtggtgagccaattaaaagcagtgactactttggwaatggccgggtgacagaattcaagtatggtgcaaaactcggcacagttattcgcaagtggaatggagagaagatgtcttacctaaagaactggggagaaggttggggtttcatgccttctgacagagcrcttgtctttgtggataaccatgacaatcaacgaggacatggggctggaggagcctctattcttaccttctgggatgctaggctgtataaaatggcagttggatttatgcttgctcatccttayggwtttacacgagtaatgtcaagctaccgttggccaagacagtttcaaaatggaaacgatgttaaygattgggttgggccaccaaataataatggagtaaytaaagaagttactattaatccagacactacttgtggcaatgactgggtctgtgaacatcgatggcgccaaataaggaacatggttawtttccgcaatgtagtggatggccagccttttacaaactggtatgataatgggagcaaccaagtggcttttgggagaggaaacagaggattcattgttttcaacaatgatgactggacattttctttaactttgcaaactggtcttcctgctggcacatactgtgatgtcatttctggagataaaattaatggcaaytgcacaggcattaaaatytacgtttctgaygatggcaaagctcatttttctattagtaactctgctgargatccatttattgcaattcatgctgaatctaaattataaaatttaaaattaaatgcatatcctcaaaacaata

SEQ ID NO: 3762 - DNA, 1741 bp, Homo sapiens
gtcggtctgtcagggttggaaagtccaagccataggacccagtttcctttcttagcttctgttgtctgccagaacaccatgggctgttactcgccttgagttggaagcggtttgcatttatacctgaatataaatagtttctggaaaggacactgacaacttcaaagcaaaatgaagttctttctgttgcttttcaccattgggttctgctgggctcagtattccccaaatacacaacaaggacggacatctattgttcatctgtttgaatggcgatgggttgatattgctcttgaatgtgagcgatatttagctcccaagggatttggaggggttcaggtctctccaccaaatgaaaatgttgcaattcacaaccctttcagaccttggtgggaaagataccaaccagttagctataaattatgcacaagatctggaaatgaagatgaatttagaaacatggtgactagatgtaacaatgttggggttcgtatttatgtggatgctgtaattaatcatatgtctggtaatgctgtgagtgcaggaacaagcastacctgtggaagttacttcaaccctggaagtagggactytccagcagtcccatattctggatgggatttyaatgatggtaaatgtaaaactggaagtggagatatcgagaactacaatgatgctactcaggtcagagattgtcgtctggttggtcttcttgatcttgcactggagaaagattaygtgcgttccaagattgccgaatatatgaatcatctcattgacattggtgttgcagggttcagacttgatgcttccaagcacatgtggcctggagacataaaggcaattttggacaaactgcataatctaaacagtaactggttccctgcaggaagtaaacctttcatttaccaggaggtaattgatctgggtggtgagccaattaaaagcagtgactactttggwaatggccgggtgacagaattcaagtatggtgcaaaactcggcacagttattcgcaagtggaatggagagaagatgtcttacctaaagaactggggagaaggttggggtttcatgccttctgacagagcrcttgtctttgtggataaccatgacaatcaacgaggacatggggctggaggagcctctattcttaccttctgggatgctaggctgtataaaatggcagttggatttatgcttgctcatccttayggwtttacacgagtaatgtcaagctaccgttggccaagacagtttcaaaatggaaacgatgttaaygattgggttgggccaccaaataataatggagtaaytaaagaagttactattaatccagacactacttgtggcaatgactgggtctgtgaacatcgatggcgccaaataaggaacatggttawtttccgcaatgtagtggatggccagccttttacaaactggtatgataatgggagcaaccaagtggcttttgggagaggaaacagaggattcattgttttcaacaatgatgactggacattttctttaactttgcaaactggtcttcctgctggcacatactgtgatgtcatttctggagataaaattaatggcaaytgcacaggcattaaaatytacgtttctgaygatggcaaagctcatttttctattagtaactctgctgargatccatttattgcaattcatgctgaatctaaattataaaatttaaaattaaatgcatatcctcaaaacaata

SEQ ID NO: 3763 - DNA, 4780 bp, Homo sapiens
ttcctgtttccttctttgattgacaacttgtgttaaccctcgcacatctctgggccaatttttgcttaaacatacagcttttgccacattccctaatgaaaaagcagctataaaggcattgacaagactccatcaactgaaacttttaggtcatactttagtcgttgaatttgcaaaagagcaagatcgagttcactccccatgtcccacttcaggytctgaaaaaaaaaaaaggtctgatgaccctgtcgaagatgataaagaaaaaaaagaacttggttatttaacagtagaaaatggaattgcaccaaaccatgggctgacttttcctttaaattcatgcctcaagtatatgtacccaccaccttccagcacaatcctagcaaacattgtaaatgccttggcaagcgtgcctaagttctatgtacaggtccttcatcttatgaataaaatgaatttgcccacaccttttggaccaattactgcgcgacctcccatgtatgaagactatatgccattgcatgcacctcttccacccacatctcctcagccacctgaggaacctcctttgccagacgaggatgaggaattatctagtgaagaatcagaatatgaaagcactgatgatgaggaccgacagagaatgaacaaattaatggaactagcaaatcttcagcccaaaagacctaaaacaataaagcagcgccatgtgagaaaaaagagaaaaataaaggatatgttgaatacacctttgtgtccttcacacagcagtttacatccagtgctgttaccttcagatgtatttgaccaaccacaacctgtaggtaacaaaagaattgaattccatatatctaccgacatgccagctgcatttaagaaagatttagaaaaggaacaaaattgtgaggaaaaaaatcatgatttacctgctactgaagttgatgcatccaatataggatttggaaaaatcttccccaaacctaatttggacatcacagaggagattaaagaagactctgatgaaatgccttcagaatgtatttctagaagggaattggaaaagggcagaatttctagagaagaaatggaaacactttcagttttcagaagttatgaaccgggtgaaccaaactgtagaatttatgtaaagaatttagctaaacatgttcaagaaaaggaccttaaatatatttttggaagatatgttgacttttcatcagaaacacagcggatcatgtttgatatacgtttgatgaaagaaggtcgtatgaaaggacaagctttcattggacttcctaatgaaaaagcagcagcaaaagccttaaaggaagctaatggatatgtgctttttggaaaacccatggtggttcagtttgctcgatctgctagaccaaaacaagatcctaaggaaggaaaaagaaagtgttaaaaattaataaagaagcattcctgcgtaaatactgctgtaatactgtcatgcaaagtgtatcctttcttgtctcttgtttcttctatttgtatgtttcctaaacctaattcaataacatatgctttctgttgtgtaatatatctggtttaggtatttataatgtgtttaaaatttgggcaaaggaaatgtttttcttttaaaaagtacttacattgaaaattaagatgtctggattactatgtaaattctagagagtagcagacctctcatctgaagtcttagtgaatctcttttgacatagatagcaatagaagtatctttcttctttcccctttctttttctaaacaagagaagaaaagcgtaatagaggggagaacacataatgcccactaagggtagtgcattaaggaaaaacagtcttggcaggtatataggaatagtggtttccagactggttgatgaccgtaatcaccaagaacagtggttctcagtcttggctgcacattgcagtgatctggaacttaaatactaattytaaaagggtgcagtggctcatacctgtaatcccagcactttgcaagtccgagatgggagaatcacttgagcccaggagtttgagaccagcctgggcaatgtagggagaccctgtccctacaaaaaatacaaaaattagccaagtgtggtggcttgcacctctggtctcagctacttgggatgctaaggcaggaggattacttgagccccagaggttgaggttgcagtgaaccatgatcacaccactgcattctagcctgggtgacagagtgagaccctctccctcctaaaaaaatccttaagaaatatattgatgcttggttcctttggtcagaattttgatttaaggtgttgggagtgtagcacagatgttggaataaacctctcaaactgattttaatatacaaacaaggtcgagaaccaccaaggaagagtttttatgcataaagattcctgtactctaccctagaactaatacatctgaatctctgggaatggagtataacaatcagatttgaaaaggtttctttagtaattttaaggactgaccagtttagacactgctttgttagagtaaaatgattaggtacctagtatcaacctagccatccaaccttatattaataactaggaaaataaagggttggagcctctgtgtttctttgttgaaaaatctgctactattattagatctgtgaaaacaattgaaaattcggttattatcaccttaaaagtacaaaacctatagattttgaaaatgtaattatttttctgtaggcatagttaaaaagattttgtaaatgttataaatcagtttctttataagcggtttatttagataaattttgttatactgacatgattcactaattttctaaatataaatggttcagctcttagttatttttaaactaatgacctgtgttatacttcctatttttaatgggcttttatgatgttttaggtttttttgaatcccgtgtccttcaagtgyttkctaactttgagaggaagaaattgaccmcctggactatggaactttggttgaatctggcgatgtggaacccatggatatggagggctgactatatacaccatgttttttcctggcacatcactcaactactattagctggcgagtcaactcacgttgttggaatgactagggacaactagacttcaagtgatctttcatcccaggaatataaatagtttctggaaaggacactgacaacttcaaagcaaaatgaagttctttctgttgcttttcaccattgggttctgctgggctcagtattccccaaatacacaacaaggacggacatctattgttcatctgtttgaatggcgatgggttgatattgctcttgaatgtgagcgatatttagctcccaagggatttggaggggttcaggtctctccaccaaatgaaaatgttgcaattcacaaccctttcagaccttggtgggaaagataccaaccagttagctataaattatgcacaagatctggaaatgaagatgaatttagaaacatggtgactagatgtaacaatgttggggttcgtatttatgtggatgctgtaattaatcatatgtctggtaatgctgtgagtgcaggaacaagcastacctgtggaagttacttcaaccctggaagtagggactytccagcagtcccatattctggatgggatttyaatgatggtaaatgtaaaactggaagtggagatatcgagaactacaatgatgctactcaggtcagagattgtcgtctggttggtcttcttgatcttgcactggagaaagattaygtgcgttccaagattgccgaatatatgaatcatctcattgacattggtgttgcagggttcagacttgatgcttccaagcacatgtggcctggagacataaaggcaattttggacaaactgcataatctaaacagtaactggttccctgcaggaagtaaacctttcatttaccaggaggtaattgatctgggtggtgagccaattaaaagcagtgactactttggwaatggccgggtgacagaattcaagtatggtgcaaaactcggcacagttattcgcaagtggaatggagagaagatgtcttacctaaagaactggggagaaggttggggtttcatgccttctgacagagcrcttgtctttgtggataaccatgacaatcaacgaggacatggggctggaggagcctctattcttaccttctgggatgctaggctgtataaaatggcagttggatttatgcttgctcatccttayggwtttacacgagtaatgtcaagctaccgttggccaagacagtttcaaaatggaaacgatgttaaygattgggttgggccaccaaataataatggagtaaytaaagaagttactattaatccagacactacttgtggcaatgactgggtctgtgaacatcgatggcgccaaataaggaacatggttawtttccgcaatgtagtggatggccagccttttacaaactggtatgataatgggagcaaccaagtggcttttgggagaggaaacagaggattcattgttttcaacaatgatgactggacattttctttaactttgcaaactggtcttcctgctggcacatactgtgatgtcatttctggagataaaattaatggcaaytgcacaggcattaaaatytacgtttctgaygatggcaaagctcatttttctattagtaactctgctgargatccatttattgcaattcatgctgaatctaaattataaaatttaaaattaaatgcatatcctcaaaacaata

SEQ ID NO: 3764 - DNA, 3280 bp, Homo sapiens
tcttgtttcttctatttgtatgtttcctaaacctaattcaataacatatgctttctgttgtgtaatatatctggtttaggtatttataatgtgtttaaaatttgggcaaaggaaatgtttttcttttaaaaagtacttacattgaaaattaagatgtctggattactatgtaaattctagagagtagcagacctctcatctgaagtcttagtgaatctcttttgacatagatagcaatagaagtatctttcttctttcccctttctttttctaaacaagagaagaaaagcgtaatagaggggagaacacataatgcccactaagggtagtgcattaaggaaaaacagtcttggcaggtatataggaatagtggtttccagactggttgatgaccgtaatcaccaagaacagtggttctcagtcttggctgcacattgcagtgatctggaacttaaatactaattytaaaagggtgcagtggctcatacctgtaatcccagcactttgcaagtccgagatgggagaatcacttgagcccaggagtttgagaccagcctgggcaatgtagggagaccctgtccctacaaaaaatacaaaaattagccaagtgtggtggcttgcacctctggtctcagctacttgggatgctaaggcaggaggattacttgagccccagaggttgaggttgcagtgaaccatgatcacaccactgcattctagcctgggtgacagagtgagaccctctccctcctaaaaaaatccttaagaaatatattgatgcttggttcctttggtcagaattttgatttaaggtgttgggagtgtagcacagatgttggaataaacctctcaaactgattttaatatacaaacaaggtcgagaaccaccaaggaagagtttttatgcataaagattcctgtactctaccctagaactaatacatctgaatctctgggaatggagtataacaatcagatttgaaaaggtttctttagtaattttaaggactgaccagtttagacactgctttgttagagtaaaatgattaggtacctagtatcaacctagccatccaaccttatattaataactaggaaaataaagggttggagcctctgtgtttctttgttgaaaaatctgctactattattagatctgtgaaaacaattgaaaattcggttattatcaccttaaaagtacaaaacctatagattttgaaaatgtaattatttttctgtaggcatagttaaaaagattttgtaaatgttataaatcagtttctttataagcggtttatttagataaattttgttatactgacatgattcactaattttctaaatataaatggttcagctcttagttatttttaaactaatgacctgtgttatacttcctatttttaatgggcttttatgatgttttaggtttttttgaatcccgtgtccttcaagtgyttkctaactttgagaggaagaaattgaccmcctggactatggaactttggttgaatctggcgatgtggaacccatggatatggagggctgactatatacaccatgttttttcctggcacatcactcaactactattagctggcgagtcaactcacgttgttggaatgactagggacaactagacttcaagtgatctttcatcccaggaatataaatagtttctggaaaggacactgacaacttcaaagcaaaatgaagttctttctgttgcttttcaccattgggttctgctgggctcagtattccccaaatacacaacaaggacggacatctattgttcatctgtttgaatggcgatgggttgatattgctcttgaatgtgagcgatatttagctcccaagggatttggaggggttcaggtctctccaccaaatgaaaatgttgcaattcacaaccctttcagaccttggtgggaaagataccaaccagttagctataaattatgcacaagatctggaaatgaagatgaatttagaaacatggtgactagatgtaacaatgttggggttcgtatttatgtggatgctgtaattaatcatatgtctggtaatgctgtgagtgcaggaacaagcastacctgtggaagttacttcaaccctggaagtagggactytccagcagtcccatattctggatgggatttyaatgatggtaaatgtaaaactggaagtggagatatcgagaactacaatgatgctactcaggtcagagattgtcgtctggttggtcttcttgatcttgcactggagaaagattaygtgcgttccaagattgccgaatatatgaatcatctcattgacattggtgttgcagggttcagacttgatgcttccaagcacatgtggcctggagacataaaggcaattttggacaaactgcataatctaaacagtaactggttccctgcaggaagtaaacctttcatttaccaggaggtaattgatctgggtggtgagccaattaaaagcagtgactactttggwaatggccgggtgacagaattcaagtatggtgcaaaactcggcacagttattcgcaagtggaatggagagaagatgtcttacctaaagaactggggagaaggttggggtttcatgccttctgacagagcrcttgtctttgtggataaccatgacaatcaacgaggacatggggctggaggagcctctattcttaccttctgggatgctaggctgtataaaatggcagttggatttatgcttgctcatccttayggwtttacacgagtaatgtcaagctaccgttggccaagacagtttcaaaatggaaacgatgttaaygattgggttgggccaccaaataataatggagtaaytaaagaagttactattaatccagacactacttgtggcaatgactgggtctgtgaacatcgatggcgccaaataaggaacatggttawtttccgcaatgtagtggatggccagccttttacaaactggtatgataatgggagcaaccaagtggcttttgggagaggaaacagaggattcattgttttcaacaatgatgactggacattttctttaactttgcaaactggtcttcctgctggcacatactgtgatgtcatttctggagataaaattaatggcaaytgcacaggcattaaaatytacgtttctgaygatggcaaagctcatttttctattagtaactctgctgargatccatttattgcaattcatgctgaatctaaattataaaatttaaaattaaatgcatatcctcaaaacaata

SEQ ID NO: 3765 - DNA, 5353 bp, Homo sapiens
ctgtttccttctttgattgacaacttgtgttaaccctcgcacatctctgggccaatttttgcttgtaagtctttccggagacccctggaatttaaatcattagcaccgcgcccttccccgaagagtcttcgaagggttgccgcttttcggtggcgcagttctcgcgagaaggaaaatggcagctcccgagcagccgcttgcgatatcaaggggatgcacgagctcctcctcgctttccccgcctcggggcgaccgaacccttctggtcaggcacctgccggctgagcttactgctgaggagaaagaggacttgctgaagtacttcggggctcagtctgtgcgggtcctgtcagataaggggcgactgaaacatacagcttttgccacattccctaatgaaaaagcagctataaaggcattgacaagactccatcaactgaaacttttaggtcatactttagtcgttgaatttgcaaaagagcaagatcgagttcactccccatgtcccacttcaggytctgaaaaaaaaaaaaggtctgatgaccctgtcgaagatgataaagaaaaaaaagaacttggttatttaacagtagaaaatggaattgcaccaaaccatgggctgacttttcctttaaattcatgcctcaagtatatgtacccaccaccttccagcacaatcctagcaaacattgtaaatgccttggcaagcgtgcctaagttctatgtacaggtccttcatcttatgaataaaatgaatttgcccacaccttttggaccaattactgcgcgacctcccatgtatgaagactatatgccattgcatgcacctcttccacccacatctcctcagccacctgaggaacctcctttgccagacgaggatgaggaattatctagtgaagaatcagaatatgaaagcactgatgatgaggaccgacagagaatgaacaaattaatggaactagcaaatcttcagcccaaaagacctaaaacaataaagcagcgccatgtgagaaaaaagagaaaaataaaggatatgttgaatacacctttgtgtccttcacacagcagtttacatccagtgctgttaccttcagatgtatttgaccaaccacaacctgtaggtaacaaaagaattgaattccatatatctaccgacatgccagctgcatttaagaaagatttagaaaaggaacaaaattgtgaggaaaaaaatcatgatttacctgctactgaagttgatgcatccaatataggatttggaaaaatcttccccaaacctaatttggacatcacagaggagattaaagaagactctgatgaaatgccttcagaatgtatttctagaagggaattggaaaagggcagaatttctagagaagaaatggaaacactttcagttttcagaagttatgaaccgggtgaaccaaactgtagaatttatgtaaagaatttagctaaacatgttcaagaaaaggaccttaaatatatttttggaagatatgttgacttttcatcagaaacacagcggatcatgtttgatatacgtttgatgaaagaaggtcgtatgaaaggacaagctttcattggacttcctaatgaaaaagcagcagcaaaagccttaaaggaagctaatggatatgtgctttttggaaaacccatggtggttcagtttgctcgatctgctagaccaaaacaagatcctaaggaaggaaaaagaaagtgttaaaaattaataaagaagcattcctgcgtaaatactgctgtaatactgtcatgcaaagtgtatcctttcttgtcgtatcctttttggggcagtgtttttttgtttttttcctagaaatgtttgtccttcccccacctgttgatccaggttaaggaatacttttttacactttattcaaatgaaatatttctaaaattatttgtatagactgaacagatcttttatgtgtttttagatttgttgttgaattttctgtgctgtcctttatataattttttgagggaaagttagtgaatcaggtcaacttacttagagaatgtgttcatttactttaacccagaatacagtcttgtttcttctatttgtatgtttcctaaacctaattcaataacatatgctttctgttgtgtaatatatctggtttaggtatttataatgtgtttaaaatttgggcaaaggaaatgtttttcttttaaaaagtacttacattgaaaattaagatgtctggattactatgtaaattctagagagtagcagacctctcatctgaagtcttagtgaatctcttttgacatagatagcaatagaagtatctttcttctttcccctttctttttctaaacaagagaagaaaagcgtaatagaggggagaacacataatgcccactaagggtagtgcattaaggaaaaacagtcttggcaggtatataggaatagtggtttccagactggttgatgaccgtaatcaccaagaacagtggttctcagtcttggctgcacattgcagtgatctggaacttaaatactaattytaaaagggtgcagtggctcatacctgtaatcccagcactttgcaagtccgagatgggagaatcacttgagcccaggagtttgagaccagcctgggcaatgtagggagaccctgtccctacaaaaaatacaaaaattagccaagtgtggtggcttgcacctctggtctcagctacttgggatgctaaggcaggaggattacttgagccccagaggttgaggttgcagtgaaccatgatcacaccactgcattctagcctgggtgacagagtgagaccctctccctcctaaaaaaatccttaagaaatatattgatgcttggttcctttggtcagaattttgatttaaggtgttgggagtgtagcacagatgttggaataaacctctcaaactgattttaatatacaaacaaggtcgagaaccaccaaggaagagtttttatgcataaagattcctgtactctaccctagaactaatacatctgaatctctgggaatggagtataacaatcagatttgaaaaggtttctttagtaattttaaggactgaccagtttagacactgctttgttagagtaaaatgattaggtacctagtatcaacctagccatccaaccttatattaataactaggaaaataaagggttggagcctctgtgtttctttgttgaaaaatctgctactattattagatctgtgaaaacaattgaaaattcggttattatcaccttaaaagtacaaaacctatagattttgaaaatgtaattatttttctgtaggcatagttaaaaagattttgtaaatgttataaatcagtttctttataagcggtttatttagataaattttgttatactgacatgattcactaattttctaaatataaatggttcagctcttagttatttttaaactaatgacctgtgttatacttcctatttttaatgggcttttatgatgttttaggtttttttgaatcccgtgtccttcaagtgyttkctaactttgagaggaagaaattgaccmcctggactatggaactttggttgaatctggcgatgtggaacccatggatatggagggctgactatatacaccatgttttttcctggcacatcactcaactactattagctggcgagtcaactcacgttgttggaatgactagggacaactagacttcaagtgatctttcatcccaggaatataaatagtttctggaaaggacactgacaacttcaaagcaaaatgaagttctttctgttgcttttcaccattgggttctgctgggctcagtattccccaaatacacaacaaggacggacatctattgttcatctgtttgaatggcgatgggttgatattgctcttgaatgtgagcgatatttagctcccaagggatttggaggggttcaggtctctccaccaaatgaaaatgttgcaattcacaaccctttcagaccttggtgggaaagataccaaccagttagctataaattatgcacaagatctggaaatgaagatgaatttagaaacatggtgactagatgtaacaatgttggggttcgtatttatgtggatgctgtaattaatcatatgtctggtaatgctgtgagtgcaggaacaagcastacctgtggaagttacttcaaccctggaagtagggactytccagcagtcccatattctggatgggatttyaatgatggtaaatgtaaaactggaagtggagatatcgagaactacaatgatgctactcaggtcagagattgtcgtctggttggtcttcttgatcttgcactggagaaagattaygtgcgttccaagattgccgaatatatgaatcatctcattgacattggtgttgcagggttcagacttgatgcttccaagcacatgtggcctggagacataaaggcaattttggacaaactgcataatctaaacagtaactggttccctgcaggaagtaaacctttcatttaccaggaggtaattgatctgggtggtgagccaattaaaagcagtgactactttggwaatggccgggtgacagaattcaagtatggtgcaaaactcggcacagttattcgcaagtggaatggagagaagatgtcttacctaaagaactggggagaaggttggggtttcatgccttctgacagagcrcttgtctttgtggataaccatgacaatcaacgaggacatggggctggaggagcctctattcttaccttctgggatgctaggctgtataaaatggcagttggatttatgcttgctcatccttayggwtttacacgagtaatgtcaagctaccgttggccaagacagtttcaaaatggaaacgatgttaaygattgggttgggccaccaaataataatggagtaaytaaagaagttactattaatccagacactacttgtggcaatgactgggtctgtgaacatcgatggcgccaaataaggaacatggttawtttccgcaatgtagtggatggccagccttttacaaactggtatgataatgggagcaaccaagtggcttttgggagaggaaacagaggattcattgttttcaacaatgatgactggacattttctttaactttgcaaactggtcttcctgctggcacatactgtgatgtcatttctggagataaaattaatggcaaytgcacaggcattaaaatytacgtttctgaygatggcaaagctcatttttctattagtaactctgctgargatccatttattgcaattcatgctgaatctaaattataaaatttaaaattaaatgcatatcctcaaaacaata

SEQ ID NO: 3766 - DNA, 1657 bp, Homo sapiens
caagcmgcggatgaaacaggaagtctgacagcttgagtctgcagtgggacccctagtgttttcccactccatgtcctggcatcgttccccagaagtacaaacacacacacacagagctcccattgttgcagccttcctcagcccactgatcctaatatggaattcagcaggaaacccatgatttcctgacactcggcaagctggaggaagcaaagggaaaaaaactccattaaaaagcccagctttcctccatgttagatgtgacttggaaaatgagaaagatttagcaaaattccaccgtrtcttttgccaggctagagacagggagagcagagtaaaaccctcaggctgctgaaatttctaggctgttaggaagcccctcgaattctgtgaaaatgagggtttcttaactcacactgagagcggaaaggggcagacccttttcataactccctcaagtgtgtgttacctttctttaccagcatggtaagcaacaggacatatcccagcctcggacatgtctgtatgatccaaggtacccaaagtcagacagagtaaactcaagcctggcactggctttctgccgcttcatgtgctttggaaaaagcaggagaagcaatagcagcaggagtccccagcagctggagccgcaagaatgaactgcaaagagggaactgacagcagctgcggctgcaggggcaacgacgagaagaagatgttgaagtgtgtggtggtgggggacggtgccgtggggaaaacctgcctgctgatgagctacgccaacgacgccttcccagaggaatacgtgcccactgtgtttgaccactatgcagttactgtgactgtgggaggcaagcaacacttgctyggactgtatgacaccgcgggacaggaggactacaaccagctgaggccactctcctaccccaacacggatgtgtttttgatctgcttctctgtcgtaaaccctgcctcttaccacaatgtccaggaggaatgggtccccgagctcaaggactgcatgcctcaygtgccttatgtcctcatagggacccagattgatctccgtgatgacccaaaaaccttggcccgtttgctgtatatgaaagagaaacctctcacttacgagcatggtgtgaagctcgcaaaagcgatcggagcacagtgctacttggaatgttcagctctgactcagaaaggtctcaaagcggtttttgatgaagcaatcctcaccattttccaccccaagaaaaagaagaaacgctgttctgagggtcacagctgctgttcaattatctgaggttgtctgggacctgcctccaccccatccagggatgagaatggcagccaatctctgtggccaagctccagccaaaaaggagggcacgaccagaaaggaactccctttgcacggaggcttgccccatcaccctctgagccctcccaacacagcacactaaccagcctgggtaatatagtgagatcctgtgtctctataaaaaaattaaaaattagtcagttgtagtgacacatacctgtagtcccagctactcaggaggctgaggtggaaggatcacttgagcccagaaggtaaggctgcagtgagctgtgactgtgccactacactccagcctgagtgacagagaaagaacctgtc

SEQ ID NO: 3767 - DNA, 3026 bp, Homo sapiens
caagcmgcggatgaaacaggaagtctgacagcttgagtctgcagtgggacccctagtgttttcccactccatgtcctggcatcgttccccagaagtacaaacacacacacacagagctcccattgttgcagccttcctcagcccactgatcctaatatggaattcagcaggaaacccatgatttcctgacactcggcaagctggaggaagcaaagggaaaaaaactccattaaaaagcccagctttcctccatgttagatgtgacttggaaaatgagaaagatttagcaaaattccaccgtrtcttttgccaggctagagacagggagagcagagtaaaaccctcaggctgctgaaatttctaggctgttaggaagcccctcgaattctgtgaaaatgagggtttcttaactcacactgagagcggaaaggggcagacccttttcataactccctcaagtgtgtgttacctttctttaccagcatggtaagcaacaggacatatcccagcctcggacatgtctgtatgatccaaggtacccaaagtcagacagagtaaactcaagcctggcactggctttctgccgcttcatgtgctttggaaaaagcaggagaagcaatagcagcaggagtccccagcagctggagccgcaagaatgaactgcaaagagggaactgacagcagctgcggctgcaggggcaacgacgagaagaagatgttgaagtgtgtggtggtgggggacggtgccgtggggaaaacctgcctgctgatgagctacgccaacgacgccttcccagaggaatacgtgcccactgtgtttgaccactatgcagttactgtgactgtgggaggcaagcaacacttgctyggactgtatgacaccgcgggacagaaccttggcccgtttgctgtatatgaaagagaaacctctcacttacgagcatggtgtgaagctcgcaaaagcgatcggagcacagtgctacttggaatgttcagctctgactcagaaaggtctcaaagcggtttttgatgaagcaatcctcaccattttccaccccaagaaaaagaagaaacgctgttctgagggtcacagctgctgttcaattatctgaggttgtctgggacctgcctccaccccatccagggatgagaatggcagccaatctctgtggccaagctccagccaaaaaggagggcacgaccagaaaggaactccctttgcacggaggcttgccccatcaccctctgagccctcccaacacagcacactagtcagcccactgccacgacctccctgccagccagaagcatccgtactgcacgctgtctgagaatgctgggcctggattgcagacagtgccgctgctgatcgcatcaaaaacaaagtcaaaggccatctcacattttacaaatccccagctcatgaacgtgaagctgataggaaatcaccccagggaacccgaaaaagaaacttgattcctctattgctggccttacttgatgtcttttataaaacttgggactacaatactaacctttttttctgaatctgctgttctacccatgtgtctcacattcatttgtattatttcaagaaatgtactaatttccagttcactcaggccttactaatccataccaaattagcctaaagacaaggcattttatattcatttctattttcagcatgtttctaccaaagctattagaaccaacacgtacctctgaatgcccgattataagaagacatgagaagactttaaaagttttggaaatttacagagccatgatttttgaacctaattgaaagaaaaccatctgaattgttgcaggtccacatttttgccaaagatacactctatagatgcttagtagtggcctgatttttttccatgtattgccacgacaaactaaaaatgaactgtgtttaagaatgtagtatttctgtttttcatccaagttgattgggggaagaatatggcaggatccatcttttacagtattttgtattcagtaaagtggacattcctgctcctcccttcccccattgcatgccctcttcctcccttgatttcactttctctcatgcccggatccttttattctccccagttataacccagttataaaagaaagatctgagcataaagatacgtgtttaaaaataactaaaagtaaaggaaagtgccttaatttttctatttgcttcaactgaaagtgcttctcagctcgccccatgtaagttctcattccatgtaaatgacattttccagttacaactggtactgagattttgcctctctctttccttactcatcctcccaaatgtctttgtgggagccatatcagtggataccaagctctgtatccatttgtcccctgccctccacaatgtgtgacatagaacagggactttggccctgggaaagcaaaagctcccagtaaggaatcctgtgcccaatgatgtaaaacaattccaaacatccaggaatttttgtatcatagagcgaattacttcctatcttttcattagaggctatgaggacttctaattagtctyagttgcttataagtgccctggaatcacccaggtaggcacttaatttttttttcagttgcatgagcaaagtgcttcttagtagtgtgaaattacaacaactttaagactttccagattcaagctcccactgttggaaaaagccagcctttctaatctcttctgctactggaataagcacttaagaattgcgtgatagccaggcaccgtggctcatgcctgtaatcccaacacttagggaggctgaggtgggtgggccgcttgagctcaggagttcaagaccagcctgggtaatatagtgagatcctgtgtctctataaaaaaattaaaaattagtcagttgtagtgacacatacctgtagtcccagctactcaggaggctgaggtggaaggatcacttgagcccagaaggtaaggctgcagtgagctgtgactgtgccactacactccagcctgagtgacagagaaa

SEQ ID NO: 3768 - DNA, 3252 bp, Homo sapiens
tcagcttcytcccagccagccacaagcgaacagsctcgcaagcmgcggatgaaacaggaagtctgacagcttgagtctgcagtgggacccctagtgttttcccactccatgtcctggcatcgttccccagaagtacaaacacacacacacagagctcccattgttgcagccttcctcagcccactgatcctaatatggaattcagcaggaaacccatgatttcctgacactcggcaagctggaggaagcaaagggaaaaaaactccattaaaaagcccagctttcctccatgttagatgtgacttggaaaatgagaaagatttagcaaaattccaccgtrtcttttgccaggctagagacagggagagcagagtaaaaccctcaggctgctgaaatttctaggctgttaggaagcccctcgaattctgtgaaaatgagggtttcttaactcacactgagagcggaaaggggcagacccttttcataactccctcaagtgtgtgttacctttctttaccagcatggtaagcaacaggacatatcccagcctcggacatgtctgtatgatccaaggtacccaaagtcagacagagtaaactcaagcctggcactggctttctgccgcttcatgtgctttggaaaaagcaggagaagcaatagcagcaggagtccccagcagctggagccgcaagaatgaactgcaaagagggaactgacagcagctgcggctgcaggggcaacgacgagaagaagatgttgaagtgtgtggtggtgggggacggtgccgtggggaaaacctgcctgctgatgagctacgccaacgacgccttcccagaggaatacgtgcccactgtgtttgaccactatgcagttactgtgactgtgggaggcaagcaacacttgctyggactgtatgacaccgcgggacaggaggactacaaccagctgaggccactctcctaccccaacacggatgtgtttttgatctgcttctctgtcgtaaaccctgcctcttaccacaatgtccaggaggaatgggtccccgagctcaaggactgcatgcctcaygtgccttatgtcctcatagggacccagattgatctccgtgatgacccaaaaaccttggcccgtttgctgtatatgaaagagaaacctctcacttacgagcatggtgtgaagctcgcaaaagcgatcggagcacagtgctacttggaatgttcagctctgactcagaaaggtctcaaagcggtttttgatgaagcaatcctcaccattttccaccccaagaaaaagaagaaacgctgttctgagggtcacagctgctgttcaattatctgaggttgtctgggacctgcctccaccccatccagggatgagaatggcagccaatctctgtggccaagctccagccaaaaaggagggcacgaccagaaaggaactccctttgcacggaggcttgccccatcaccctctgagccctcccaacacagcacactagtcagcccactgccacgacctccctgccagccagaagcatccgtactgcacgctgtctgagaatgctgggcctggattgcagacagtgccgctgctgatcgcatcaaaaacaaagtcaaaggccatctcacattttacaaatccccagctcatgaacgtgaagctgataggaaatcaccccagggaacccgaaaaagaaacttgattcctctattgctggccttacttgatgtcttttataaaacttgggactacaatactaacctttttttctgaatctgctgttctacccatgtgtctcacattcatttgtattatttcaagaaatgtactaatttccagttcactcaggccttactaatccataccaaattagcctaaagacaaggcattttatattcatttctattttcagcatgtttctaccaaagctattagaaccaacacgtacctctgaatgcccgattataagaagacatgagaagactttaaaagttttggaaatttacagagccatgatttttgaacctaattgaaagaaaaccatctgaattgttgcaggtccacatttttgccaaagatacactctatagatgcttagtagtggcctgatttttttccatgtattgccacgacaaactaaaaatgaactgtgtttaagaatgtagtatttctgtttttcatccaagttgattgggggaagaatatggcaggatccatcttttacagtattttgtattcagtaaagtggacattcctgctcctcccttcccccattgcatgccctcttcctcccttgatttcactttctctcatgcccggatccttttattctccccagttataacccagttataaaagaaagatctgagcataaagatacgtgtttaaaaataactaaaagtaaaggaaagtgccttaatttttctatttgcttcaactgaaagtgcttctcagctcgccccatgtaagttctcattccatgtaaatgacattttccagttacaactggtactgagattttgcctctctctttccttactcatcctcccaaatgtctttgtgggagccatatcagtggataccaagctctgtatccatttgtcccctgccctccacaatgtgtgacatagaacagggactttggccctgggaaagcaaaagctcccagtaaggaatcctgtgcccaatgatgtaaaacaattccaaacatccaggaatttttgtatcatagagcgaattacttcctatcttttcattagaggctatgaggacttctaattagtctyagttgcttataagtgccctggaatcacccaggtaggcacttaatttttttttcagttgcatgagcaaagtgcttcttagtagtgtgaaattacaacaactttaagactttccagattcaagctcccactgttggaaaaagccagcctttctaatctcttctgctactggaataagcacttaagaattgcgtgatagccaggcaccgtggctcatgcctgtaatcccaacacttagggaggctgaggtgggtgggccgcttgagctcaggagttcaagaccagcctgggtaatatagtgagatcctgtgtctctataaaaaaattaaaaattagtcagttgtagtgacacatacctgtagtcccagctactcaggaggctgaggtggaaggatcacttgagcccagaaggtaaggctgcagtgagctgtgactgtgccactacactccagcctgagtgacagagaaa

SEQ ID NO: 3769 - DNA, 1218 bp, Homo sapiens
atgatccactacatctggggcttcaccaaatcttctgagcaaccctctcagaccgagaccccttccccgcgccttcgtctcccggtctcctcgtccaccccctcgcgcagcgagctccgggctgaacagcgtagcccaacttctgggctgtgcgcctggtggttgctcctctccccggagatcgaggcaagcgatcgctgtccaatcgggccggtggaatgggagaagagggtgccagagagagcagtggccagtcggaggctcacatctcggcgtctcccgctcgggtcccgaatccgggctgctggcgcggacgcggctcccggggcggaggccagcccagtgaaactggacagcaagcatccaaatcccaacatccaaagagatagtggtgaacttsactrtaatgtcggctgtcactcatacccggaggtggagcatggcaaaaagcttagaaggtggcaatattttcagccagctcttagtacagtagcagctactcatcctccacccatagctccatgtcaagaagctgtatttgtgttcctgaagcaaccttcacacagtattcaggatcaaacgagtggggraagagggaagcaaacaccggggaagggaaagaatctgatttccacaattaccacattattagattcaaaggaaatgagatgcagcagtaaagccgtgtccaccaaagaagaaaagaaagtgccgatgagctggattcctttccaaggccatctaagactgccccacccagatgtcctaaggcacatttccaaactatcactcaaacttaaagaaatttactattgggtaaaagagatggatgttgaggccagacttgcccctgtggagagaatttccaaaagatgggcagagattcacccaaaggaaattagaagagaagggaggcccaacaggcttaatcctgttgggagaagttgcccttggaaaatgtatgaactgaagcaygcttcacatatcagcargttacccaagggcaagcacagtgtcaaaggtttgggcaaaactacccctgacccttcagstagtattactctggatggtgcagaggttcctcttgggactgggatttcatctggtgtgaatgacacttgtctactrtataatgagtacattgtctatgatattgctcaggtagataaaactgacatagagaaaaggctggagagagattccatccgcatagactag

SEQ ID NO: 3770 - DNA, 4681 bp, Homo sapiens
atgatccactacatctggggcttcaccaaatcttctgagcaaccctctcagaccgagaccccttccccgcgccttcgtctcccggtctcctcgtccaccccctcgcgcagcgagctccgggctgaacagcgtagcccaacttctgggctgtgcgcctggtggttgctcctctccccggagatcgaggcaagcgatcgctgtccaatcgggccggtggaatgggagaagagggtgccagagagagcagtggccagtcggaggctcacatctcggcgtctcccgctcgggtcccgaatccgggctgctggcgcggacgcggctcccggggcggaggccagcccagtgaaactggacagcaagcatccaaatcccaacatccaaagagatagtggtgaacttsactrtaatgtcggctgtcactcatacccggaggtggagcatggcaaaaagcttagaaggtggcaatattttcagccagctcttagtacagtagcagctactcatcctccacccatagctccatgtcaagaagctgtatttgtgttcctgaagcaaccttcacacagtattcaggatcaaacgagtggggraagagggaagcaaacaccggggaagggaaagaatctgatttccacaattaccacattattagattcaaaggaaatgagatgcagcagtaaagccgtgtccaccaaagaagaaaagaaagtgccgatgagctggattcctttccaaggccatctaagactgccccacccagatgtcctaaggcacatttccaaactatcactcaaacttaaagaaatttactattgggtaaaagagatggatgttgaggccagacttgcccctgtggagagaatttccaaaagatgggcagagattcacccaaaggaaattagaagagaagggaggcccaacaggcttaatcctgttgggagaagttgcccttggaaaatgtatgaactgaagcaygcttcacatatcagcargttacccaagggcaagcacagtgtcaaaggtttgggcaaaactacccctgacccttcagstagtattactctggatggtgcagaggttcctcttgggactgggatttcatctggtgtgaatgacacttgtctactrtataatgagtacattgtctatgatattgctcagaagacacctggaggaagtaaagccattggtagaatttcagaaactgcacacctggttggaaggcagtttcaggaaagagtggctgctatgacaggccttcctagcagagtttttgctgtctctgaccaagctgaagtcagcttcytcccagccagccacaagcgaacagsctcgcaagcmgcggatgaaacaggaagtctgacagcttgagtctgcagtgggacccctagtgttttcccactccatgtcctggcatcgttccccagaagtacaaacacacacacacagagctcccattgttgcagccttcctcagcccactgatcctaatatggaattcagcaggaaacccatgatttcctgacactcggcaagctggaggaagcaaagggaaaaaaactccattaaaaagcccagctttcctccatgttagatgtgacttggaaaatgagaaagatttagcaaaattccaccgtrtcttttgccaggctagagacagggagagcagagtaaaaccctcaggctgctgaaatttctaggctgttaggaagcccctcgaattctgtgaaaatgagggtttcttaactcacactgagagcggaaaggggcagacccttttcataactccctcaagtgtgtgttacctttctttaccagcatggtaagcaacaggacatatcccagcctcggacatgtctgtatgatccaaggtacccaaagtcagacagagtaaactcaagcctggcactggctttctgccgcttcatgtgctttggaaaaagcaggagaagcaatagcagcaggagtccccagcagctggagccgcaagaatgaactgcaaagagggaactgacagcagctgcggctgcaggggcaacgacgagaagaagatgttgaagtgtgtggtggtgggggacggtgccgtggggaaaacctgcctgctgatgagctacgccaacgacgccttcccagaggaatacgtgcccactgtgtttgaccactatgcagttactgtgactgtgggaggcaagcaacacttgctyggactgtatgacaccgcgggacaggaggactacaaccagctgaggccactctcctaccccaacacggatgtgtttttgatctgcttctctgtcgtaaaccctgcctcttaccacaatgtccaggaggaatgggtccccgagctcaaggactgcatgcctcaygtgccttatgtcctcatagggacccagattgatctccgtgatgacccaaaaaccttggcccgtttgctgtatatgaaagagaaacctctcacttacgagcatggtgtgaagctcgcaaaagcgaaatgtctgaattggaagagacaagcttgggctcctcccgctccatcgaaaggcaaagcctgacatgctgtcagctgcacactgggggcaggaggatggggagtgccctgcccctcctgcaggactccaggtatcggagcacagtgctacttggaatgttcagctctgactcagaaaggtctcaaagcggtttttgatgaagcaatcctcaccattttccaccccaagaaaaagaagaaacgctgttctgagggtcacagctgctgttcaattatctgaggttgtctgggacctgcctccaccccatccagggatgagaatggcagccaatctctgtggccaagctccagccaaaaaggagggcacgaccagaaaggaactccctttgcacggaggcttgccccatcaccctctgagccctcccaacacagcacactagtcagcccactgccacgacctccctgccagccagaagcatccgtactgcacgctgtctgagaatgctgggcctggattgcagacagtgccgctgctgatcgcatcaaaaacaaagtcaaaggccatctcacattttacaaatccccagctcatgaacgtgaagctgataggaaatcaccccagggaacccgaaaaagaaacttgattcctctattgctggccttacttgatgtcttttataaaacttgggactacaatactaacctttttttctgaatctgctgttctacccatgtgtctcacattcatttgtattatttcaagaaatgtactaatttccagttcactcaggccttactaatccataccaaattagcctaaagacaaggcattttatattcatttctattttcagcatgtttctaccaaagctattagaaccaacacgtacctctgaatgcccgattataagaagacatgagaagactttaaaagttttggaaatttacagagccatgatttttgaacctaattgaaagaaaaccatctgaattgttgcaggtccacatttttgccaaagatacactctatagatgcttagtagtggcctgatttttttccatgtattgccacgacaaactaaaaatgaactgtgtttaagaatgtagtatttctgtttttcatccaagttgattgggggaagaatatggcaggatccatcttttacagtattttgtattcagtaaagtggacattcctgctcctcccttcccccattgcatgccctcttcctcccttgatttcactttctctcatgcccggatccttttattctccccagttataacccagttataaaagaaagatctgagcataaagatacgtgtttaaaaataactaaaagtaaaggaaagtgccttaatttttctatttgcttcaactgaaagtgcttctcagctcgccccatgtaagttctcattccatgtaaatgacattttccagttacaactggtactgagattttgcctctctctttccttactcatcctcccaaatgtctttgtgggagccatatcagtggataccaagctctgtatccatttgtcccctgccctccacaatgtgtgacatagaacagggactttggccctgggaaagcaaaagctcccagtaaggaatcctgtgcccaatgatgtaaaacaattccaaacatccaggaatttttgtatcatagagcgaattacttcctatcttttcattagaggctatgaggacttctaattagtctyagttgcttataagtgccctggaatcacccaggtaggcacttaatttttttttcagttgcatgagcaaagtgcttcttagtagtgtgaaattacaacaactttaagactttccagattcaagctcccactgttggaaaaagccagcctttctaatctcttctgctactggaataagcacttaagaattgcgtgatagccaggcaccgtggctcatgcctgtaatcccaacacttagggaggctgaggtgggtgggccgcttgagctcaggagttcaagaccagcctgggtaatatagtgagatcctgtgtctctataaaaaaattaaaaattagtcagttgtagtgacacatacctgtagtcccagctactcaggaggctgaggtggaaggatcacttgagcccagaaggtaaggctgcagtgagctgtgactgtgccactacactccagcctgagtgacagagaaa

SEQ ID NO: 3771 - DNA, 4549 bp, Homo sapiens
atgatccactacatctggggcttcaccaaatcttctgagcaaccctctcagaccgagaccccttccccgcgccttcgtctcccggtctcctcgtccaccccctcgcgcagcgagctccgggctgaacagcgtagcccaacttctgggctgtgcgcctggtggttgctcctctccccggagatcgaggcaagcgatcgctgtccaatcgggccggtggaatgggagaagagggtgccagagagagcagtggccagtcggaggctcacatctcggcgtctcccgctcgggtcccgaatccgggctgctggcgcggacgcggctcccggggcggaggccagcccagtgaaactggacagcaagcatccaaatcccaacatccaaagagatagtggtgaacttsactrtaatgtcggctgtcactcatacccggaggtggagcatggcaaaaagcttagaaggtggcaatattttcagccagctcttagtacagtagcagctactcatcctccacccatagctccatgtcaagaagctgtatttgtgttcctgaagcaaccttcacacagtattcaggatcaaacgagtggggraagagggaagcaaacaccggggaagggaaagaatctgatttccacaattaccacattattagattcaaaggaaatgagatgcagcagtaaagccgtgtccaccaaagaagaaaagaaagtgccgatgagctggattcctttccaaggccatctaagactgccccacccagatgtcctaaggcacatttccaaactatcactcaaacttaaagaaatttactattgggtaaaagagatggatgttgaggccagacttgcccctgtggagagaatttccaaaagatgggcagagattcacccaaaggaaattagaagagaagggaggcccaacaggcttaatcctgttgggagaagttgcccttggaaaatgtatgaactgaagcaygcttcacatatcagcargttacccaagggcaagcacagtgtcaaaggtttgggcaaaactacccctgacccttcagstagtattactctggatggtgcagaggttcctcttgggactgggatttcatctggtgtgaatgacacttgtctactrtataatgagtacattgtctatgatattgctcagaagacacctggaggaagtaaagccattggtagaatttcagaaactgcacacctggttggaaggcagtttcaggaaagagtggctgctatgacaggccttcctagcagagtttttgctgtctctgaccaagctgaagtcagcttcytcccagccagccacaagcgaacagsctcgcaagcmgcggatgaaacaggaagtctgacagcttgagtctgcagtgggacccctagtgttttcccactccatgtcctggcatcgttccccagaagtacaaacacacacacacagagctcccattgttgcagccttcctcagcccactgatcctaatatggaattcagcaggaaacccatgatttcctgacactcggcaagctggaggaagcaaagggaaaaaaactccattaaaaagcccagctttcctccatgttagatgtgacttggaaaatgagaaagatttagcaaaattccaccgtrtcttttgccaggctagagacagggagagcagagtaaaaccctcaggctgctgaaatttctaggctgttaggaagcccctcgaattctgtgaaaatgagggtttcttaactcacactgagagcggaaaggggcagacccttttcataactccctcaagtgtgtgttacctttctttaccagcatggtaagcaacaggacatatcccagcctcggacatgtctgtatgatccaaggtacccaaagtcagacagagtaaactcaagcctggcactggctttctgccgcttcatgtgctttggaaaaagcaggagaagcaatagcagcaggagtccccagcagctggagccgcaagaatgaactgcaaagagggaactgacagcagctgcggctgcaggggcaacgacgagaagaagatgttgaagtgtgtggtggtgggggacggtgccgtggggaaaacctgcctgctgatgagctacgccaacgacgccttcccagaggaatacgtgcccactgtgtttgaccactatgcagttactgtgactgtgggaggcaagcaacacttgctyggactgtatgacaccgcgggacaggaggactacaaccagctgaggccactctcctaccccaacacggatgtgtttttgatctgcttctctgtcgtaaaccctgcctcttaccacaatgtccaggaggaatgggtccccgagctcaaggactgcatgcctcaygtgccttatgtcctcatagggacccagattgatctccgtgatgacccaaaaaccttggcccgtttgctgtatatgaaagagaaacctctcacttacgagcatggtgtgaagctcgcaaaagcgatcggagcacagtgctacttggaatgttcagctctgactcagaaaggtctcaaagcggtttttgatgaagcaatcctcaccattttccaccccaagaaaaagaagaaacgctgttctgagggtcacagctgctgttcaattatctgaggttgtctgggacctgcctccaccccatccagggatgagaatggcagccaatctctgtggccaagctccagccaaaaaggagggcacgaccagaaaggaactccctttgcacggaggcttgccccatcaccctctgagccctcccaacacagcacactagtcagcccactgccacgacctccctgccagccagaagcatccgtactgcacgctgtctgagaatgctgggcctggattgcagacagtgccgctgctgatcgcatcaaaaacaaagtcaaaggccatctcacattttacaaatccccagctcatgaacgtgaagctgataggaaatcaccccagggaacccgaaaaagaaacttgattcctctattgctggccttacttgatgtcttttataaaacttgggactacaatactaacctttttttctgaatctgctgttctacccatgtgtctcacattcatttgtattatttcaagaaatgtactaatttccagttcactcaggccttactaatccataccaaattagcctaaagacaaggcattttatattcatttctattttcagcatgtttctaccaaagctattagaaccaacacgtacctctgaatgcccgattataagaagacatgagaagactttaaaagttttggaaatttacagagccatgatttttgaacctaattgaaagaaaaccatctgaattgttgcaggtccacatttttgccaaagatacactctatagatgcttagtagtggcctgatttttttccatgtattgccacgacaaactaaaaatgaactgtgtttaagaatgtagtatttctgtttttcatccaagttgattgggggaagaatatggcaggatccatcttttacagtattttgtattcagtaaagtggacattcctgctcctcccttcccccattgcatgccctcttcctcccttgatttcactttctctcatgcccggatccttttattctccccagttataacccagttataaaagaaagatctgagcataaagatacgtgtttaaaaataactaaaagtaaaggaaagtgccttaatttttctatttgcttcaactgaaagtgcttctcagctcgccccatgtaagttctcattccatgtaaatgacattttccagttacaactggtactgagattttgcctctctctttccttactcatcctcccaaatgtctttgtgggagccatatcagtggataccaagctctgtatccatttgtcccctgccctccacaatgtgtgacatagaacagggactttggccctgggaaagcaaaagctcccagtaaggaatcctgtgcccaatgatgtaaaacaattccaaacatccaggaatttttgtatcatagagcgaattacttcctatcttttcattagaggctatgaggacttctaattagtctyagttgcttataagtgccctggaatcacccaggtaggcacttaatttttttttcagttgcatgagcaaagtgcttcttagtagtgtgaaattacaacaactttaagactttccagattcaagctcccactgttggaaaaagccagcctttctaatctcttctgctactggaataagcacttaagaattgcgtgatagccaggcaccgtggctcatgcctgtaatcccaacacttagggaggctgaggtgggtgggccgcttgagctcaggagttcaagaccagcctgggtaatatagtgagatcctgtgtctctataaaaaaattaaaaattagtcagttgtagtgacacatacctgtagtcccagctactcaggaggctgaggtggaaggatcacttgagcccagaaggtaaggctgcagtgagctgtgactgtgccactacactccagcctgagtgacagagaaa

SEQ ID NO: 3772 - DNA, 383 bp, Homo sapiens
ygaaggtgaagcagtccatgtcctcggtagccacaggatagactttgccagccttcaccagggcagcacagctggcctctgcctcgatgggtgcatcaagaagcaggaagattgatggcttggtattatattacatttgagacagtgaagaaattttatacaatcagtggaaaagaaaccttatcagatctgatttccaatggaaggaagaattaaaacaagagaaatgaaagtaaattgtcttattcaggctcaactaggatgcattcccatacaagattttgctttgacacaagataccgcaaagattttcagacatggctcccgaattacaagatattttaaacagacatcccccctttggaacccagataaaagaaact

SEQ ID NO: 3773 - DNA, 4030 bp, Homo sapiens
gccagtcccgcaggtcccctaggyccctttcgctgcggcctttccccaacccggacccggcacttctcgggttccgcgactggcctcctccgccgcctcctcggagcatttcgagaagctgcacgagatcttccgcggcctccatgaagacctacaaggggtgcccgagcggctgctgggracggcggggaccgaagaaaagaagaaattgatcagggattttgakgaaaagcaacaggaagcaaatgaaacgctggcagagatggaggaggagctacgttatgcacccctgtctttccgaaacccyatgatgtctaagcttcgaaactaccggaaggaccttgctaaactccatcgggaggtgagaagcacacctttgacagccacacctggaggccgaggagacatgaaatatggcatatatgctgtagagaatgagcatatgaatcggctacagtctcaaagggcaatgcttctgcagggcactgaaagcctgaaccgggccacccaaagtattgaacgttctcatcggattgccacagagactgaccagattggctcagaaatcatagaagagctgggggaacaacgagaccagttagaacgtaccaagagtagagtaactggtaaacacaagtgaaaacttgagcaaaagtcggaagattctccgttcaatgtccagaaaagtgacaaccaacaagctgctgctttccattatcatyttactggagctcgccatcctgggaggcctrgtttactacaaattctttcgcagccattgaacttctatagggaagggtttgtggaccagaactttgaccttgtgaatgcatgatgttagggatgtggatagaataagcatattgctgctgtgggctgacagttcaaggatgcactgtatagccaggctgtgggaggagggaggaaagatgaaaaaccacttaaatgtgaaggaacaacagcaacaagaccagtatgatataccaaggtaataaatgctgtttatgacttctttaaatttacatagtactgtagcatattaataccctgtgaactgcaaaaaaccaaatacatttacagtagtattggtcaccaaaatagaggggaaactttacaattgtgagaatgtgtaaatgttctmattaaggcagtattgacccagacaaccatttagtattcatctatcccctcaatgcctcataattctggaatgcctgttgtgaaayatgtcagtgcacagtgtctcctaaattctcacacgtgcttgattttctgattcatctggtgaactgggagtaggaagttggtcatagacaatatgccctccttctcttgtctgaccaaagcttgaagcaatcacatctactgccaggttagctgtagtcttcgcctcttcctctgaggtggccaactgaggattgacttcaacaagatccagtgctgatagcaaccctggaagaacraagtgtgacaaaacctcaggttcccttgctgctactctcagtgagggtcatcccactgggacagggagaacaagccaaagtaaaaacaagagtccattttatagtagaaaatacctatttttaggaagccccttgcacctcatcctcttggccatgaatttaagttaaaacactgttgtgctatagtagattaaaagaaaccttttaagataatgaaataaaccatccctgttcaactaacataacaggcataattgtcaggcgttctggaaaaggaaaaggcttggtgttgggtgggggaggttttcatcctgcttgttggcaaaatgtatgccacctccagtatgactaggaaccttccagatgcctgcctggaaatgaatcaagtatgaaggcagaggaaatctgccacttkcactagccaaactgcattcccacttttgaactctaatgtgttatctgtatctgttagagcaccacaccatatgccctgaaatgtagttattactgcaaacttcattctcacccctgcaggcctgmgctctggaggcaggttccacatctaacaacatctttttgtctcccagcagactgacccagtgtcttgtacttgatcaagagaaaattcagccatatgttaattattttatctggacttcagttaccttctgttaaggtttgagaacttgtgtcaaagttctcggtagtgttcctttggcctggagcaagtggaagggaagcttaaaccagaagaacctatccagacctgctactatgctcacccctctaaatgcctcacttctctatagaatttaactttttagttggttattctggatgaagggtgatctgaacaagctagtattcaggaatacaagtatctaagaatatttagggtggccataaagtctggaaacacaggcaaatgtacctaatggtttattgatattacactatagtacatgatgtgctgaatgccatcatgtccgttcagcatcttcccttattagcaatgcatagttgagtgtacagtgccaaactgcaaccaacaggtgtattactgtagcatttccatcatttcctgcacatggacctgtgttcctgatttgtctctgatttccactgactaaacctgcacctttagcatatcccagaagtggtcatcaaagtttgcactattagaaatatatacatgacttatgtttccagactattgccaccctataaattaagcaaactgctttatgtatctagttgacagcattataacagtgcagtggcacaatcatggctcactgcagcctcaacctcccaagtagttgggacacctggctaattattttttgtagaaacggggtcacactatgttgcccacgctggtcttgaacccctggggtcaagtaatcctcttgccttggcctcccagagtactgggattataggtatgaaccactgtgcctagccccatgagtgtcttttggagtaaaatattgtagcataggaacaaagagacaagccatgccatatataagtgctagaggttattaacccctgctctaagtggtgtttttaggaagcaaagcagagaattgaacccccaagttctctggccaataacctaaggaccactggcaacatctaagattgcagatctgagaattagaccagtactgcctgcctttttgtactgcctaaggttctggcaggctgtggcgctaaggagaccatttctcaatgtgagtttctatcccagctagtcaagggttctctatagccctgaacctttcaatctggggtctctatctataccctagttccatcagatggttactgaagcagtatgatttggtagttctttaaattttggaatgaaaggtcatttgaagtagctttaaaaccagaagctttctgacagaaatggaaactgtttgcaaacaagtatgarttttggaaaagtagccrgtcttgataacgtagaattcatcttagtactctttccatcagccattctcatctaactgtatcccccttattagaaatcctttcaggctctagtacaagacctaccctacataaaggacccaagatattgtccagtttgcagatttcttcaagagatcagctttagctccaaattcacaactcccaatgaaccaatctcttagagtgcaaattacagccttgcactcttatcttatcttgccttcttatcttaatctgcctttagataactcaaagaactgcatcagtttgacaatttattcttgtatttaattgtttaaatatacaattttttactcattattaccttagtgtaatttggtwagagccatgtccaagcatgactctaaaggactatatcctttttattagcatggcsatataatttttagctacaaaagtttaagcaaaaacaaacyctgcaatgatgtggaatagcagaaaagatcctttgcaggcaagagactctagcatatttacctatgtagttaacaggctgcagacctggttgctacatacctgtattgtgtatttcctcagcaatatacatgccttctcgataggtt

SEQ ID NO: 3774 - DNA, 4026 bp, Homo sapiens
gccagtcccgcaggtcccctaggyccctttcgctgcggcctttccccaacccggacccggcacttctcgggttccgcgactggcctcctccgccgcctcctcggagcatttcgagaagctgcacgagatcttccgcggcctccatgaagacctacaaggggtgcccgagcggctgctgggracggcggggaccgaagaaaagaagaaattgatcagggattttgakgaaaagcaacaggaagcaaatgaaacgctggcagagatggaggaggagctacgttatgcacccctgtctttccgaaacccyatgatgtctaagcttcgaaactaccggaaggaccttgctaaactccatcgggaggtgagaagcacacctttgacagccacacctggaggccgaggagacatgaaatatggcatatatgctgtagagaatgagcatatgaatcggctacagtctcaaagggcaatgcttctgcagggcactgaaagcctgaaccgggccacccaaagtattgaacgttctcatcggattgccacagagactgaccagattggctcagaaatcatagaagagctgggggaacaacgagaccagttagaacgtaccaagagtagactggtaaacacaagtgaaaacttgagcaaaagtcggaagattctccgttcaatgtccagaaaagtgacaaccaacaagctgctgctttccattatcatyttactggagctcgccatcctgggaggcctrgtttactacaaattctttcgcagccattgaacttctatagggaagggtttgtggaccagaactttgaccttgtgaatgcatgatgttagggatgtggatagaataagcatattgctgctgtgggctgacagttcaaggatgcactgtatagccaggctgtgggaggagggaggaaagatgaaaaaccacttaaatgtgaaggaacaacagcaacaagaccagtatgatataccaaggtaataaatgctgtttatgacttctttaaatttacatagtactgtagcatattaataccctgtgaactgcaaaaaaccaaatacatttacagtagtattggtcaccaaaatagaggggaaactttacaattgtgagaatgtgtaaatgttctmattaaggcagtattgacccagacaaccatttagtattcatctatcccctcaatgcctcataattctggaatgcctgttgtgaaayatgtcagtgcacagtgtctcctaaattctcacacgtgcttgattttctgattcatctggtgaactgggagtaggaagttggtcatagacaatatgccctccttctcttgtctgaccaaagcttgaagcaatcacatctactgccaggttagctgtagtcttcgcctcttcctctgaggtggccaactgaggattgacttcaacaagatccagtgctgatagcaaccctggaagaacraagtgtgacaaaacctcaggttcccttgctgctactctcagtgagggtcatcccactgggacagggagaacaagccaaagtaaaaacaagagtccattttatagtagaaaatacctatttttaggaagccccttgcacctcatcctcttggccatgaatttaagttaaaacactgttgtgctatagtagattaaaagaaaccttttaagataatgaaataaaccatccctgttcaactaacataacaggcataattgtcaggcgttctggaaaaggaaaaggcttggtgttgggtgggggaggttttcatcctgcttgttggcaaaatgtatgccacctccagtatgactaggaaccttccagatgcctgcctggaaatgaatcaagtatgaaggcagaggaaatctgccacttkcactagccaaactgcattcccacttttgaactctaatgtgttatctgtatctgttagagcaccacaccatatgccctgaaatgtagttattactgcaaacttcattctcacccctgcaggcctgmgctctggaggcaggttccacatctaacaacatctttttgtctcccagcagactgacccagtgtcttgtacttgatcaagagaaaattcagccatatgttaattattttatctggacttcagttaccttctgttaaggtttgagaacttgtgtcaaagttctcggtagtgttcctttggcctggagcaagtggaagggaagcttaaaccagaagaacctatccagacctgctactatgctcacccctctaaatgcctcacttctctatagaatttaactttttagttggttattctggatgaagggtgatctgaacaagctagtattcaggaatacaagtatctaagaatatttagggtggccataaagtctggaaacacaggcaaatgtacctaatggtttattgatattacactatagtacatgatgtgctgaatgccatcatgtccgttcagcatcttcccttattagcaatgcatagttgagtgtacagtgccaaactgcaaccaacaggtgtattactgtagcatttccatcatttcctgcacatggacctgtgttcctgatttgtctctgatttccactgactaaacctgcacctttagcatatcccagaagtggtcatcaaagtttgcactattagaaatatatacatgacttatgtttccagactattgccaccctataaattaagcaaactgctttatgtatctagttgacagcattataacagtgcagtggcacaatcatggctcactgcagcctcaacctcccaagtagttgggacacctggctaattattttttgtagaaacggggtcacactatgttgcccacgctggtcttgaacccctggggtcaagtaatcctcttgccttggcctcccagagtactgggattataggtatgaaccactgtgcctagccccatgagtgtcttttggagtaaaatattgtagcataggaacaaagagacaagccatgccatatataagtgctagaggttattaacccctgctctaagtggtgtttttaggaagcaaagcagagaattgaacccccaagttctctggccaataacctaaggaccactggcaacatctaagattgcagatctgagaattagaccagtactgcctgcctttttgtactgcctaaggttctggcaggctgtggcgctaaggagaccatttctcaatgtgagtttctatcccagctagtcaagggttctctatagccctgaacctttcaatctggggtctctatctataccctagttccatcagatggttactgaagcagtatgatttggtagttctttaaattttggaatgaaaggtcatttgaagtagctttaaaaccagaagctttctgacagaaatggaaactgtttgcaaacaagtatgarttttggaaaagtagccrgtcttgataacgtagaattcatcttagtactctttccatcagccattctcatctaactgtatcccccttattagaaatcctttcaggctctagtacaagacctaccctacataaaggacccaagatattgtccagtttgcagatttcttcaagagatcagctttagctccaaattcacaactcccaatgaaccaatctcttagagtgcaaattacagccttgcactcttatcttatcttgccttcttatcttaatctgcctttagataactcaaagaactgcatcagtttgacaatttattcttgtatttaattgtttaaatatacaattttttactcattattaccttagtgtaatttggtwagagccatgtccaagcatgactctaaaggactatatcctttttattagcatggcsatataatttttagctacaaaagtttaagcaaaaacaaacyctgcaatgatgtggaatagcagaaaagatcctttgcaggcaagagactctagcatatttacctatgtagttaacaggctgcagacctggttgctacatacctgtattgtgtatttcctcagcaatatacatgccttctcgataggtt

SEQ ID NO: 3775 - DNA, 4446 bp, Homo sapiens
gaacctggcacccggagcaacgcgcgaccccgggacgagacgctctcgtccgagccaaactacatccyccggcgtgcactgcagcgcccgcccctcgccggccggcggggcccgggaggaaggcggccgcgctgccagtcccgcaggtcccctaggyccctttcgctgcggcctttccccaacccggacccggcacttctcgggttccgcgactgccgatcgccccggcgcggcaccgctccctcaggagtcgcctaggccgcgcagtctcccgacttctcgtcaggctttcgcgccggcgctccagcaatcactggctggagaaggtgggcgttccggctcgagaggaccctgccgcggctccggaagagcctcgtcctgggcggcggtggtgcggcggtcgccgttatggccactgggctgggcggctgacmgccgggctaggaaagggcccagggccccgaatctcggtggccgctgctccagcgcggcctgcgccatggcctcctccgccgcctcctcggagcatttcgagaagctgcacgagatcttccgcggcctccatgaagacctacaaggggtgcccgagcggctgctgggracggcggggaccgaagaaaagaagaaattgatcagggattttgakgaaaagcaacaggaagcaaatgaaacgctggcagagatggaggaggagctacgttatgcacccctgtctttccgaaacccyatgatgtctaagcttcgaaactaccggaaggaccttgctaaactccatcgggaggtgagaagcacacctttgacagccacacctggaggccgaggagacatgaaatatggcatatatgctgtagagaatgagcatatgaatcggctacagtctcaaagggcaatgcttctgcagggcactgaaagcctgaaccgggccacccaaagtattgaacgttctcatcggattgccacagagactgaccagattggctcagaaatcatagaagagctgggggaacaacgagaccagttagaacgtaccaagagtagactggtaaacacaagtgaaaacttgagcaaaagtcggaagattctccgttcaatgtccagaaaagtgacaaccaacaagctgctgctttccattatcatyttactggagctcgccatcctgggaggcctrgtttactacaaattctttcgcagccattgaacttctatagggaagggtttgtggaccagaactttgaccttgtgaatgcatgatgttagggatgtggatagaataagcatattgctgctgtgggctgacagttcaaggatgcactgtatagccaggctgtgggaggagggaggaaagatgaaaaaccacttaaatgtgaaggaacaacagcaacaagaccagtatgatataccaaggtaataaatgctgtttatgacttctttaaatttacatagtactgtagcatattaataccctgtgaactgcaaaaaaccaaatacatttacagtagtattggtcaccaaaatagaggggaaactttacaattgtgagaatgtgtaaatgttctmattaaggcagtattgacccagacaaccatttagtattcatctatcccctcaatgcctcataattctggaatgcctgttgtgaaayatgtcagtgcacagtgtctcctaaattctcacacgtgcttgattttctgattcatctggtgaactgggagtaggaagttggtcatagacaatatgccctccttctcttgtctgaccaaagcttgaagcaatcacatctactgccaggttagctgtagtcttcgcctcttcctctgaggtggccaactgaggattgacttcaacaagatccagtgctgatagcaaccctggaagaacraagtgtgacaaaacctcaggttcccttgctgctactctcagtgagggtcatcccactgggacagggagaacaagccaaagtaaaaacaagagtccattttatagtagaaaatacctatttttaggaagccccttgcacctcatcctcttggccatgaatttaagttaaaacactgttgtgctatagtagattaaaagaaaccttttaagataatgaaataaaccatccctgttcaactaacataacaggcataattgtcaggcgttctggaaaaggaaaaggcttggtgttgggtgggggaggttttcatcctgcttgttggcaaaatgtatgccacctccagtatgactaggaaccttccagatgcctgcctggaaatgaatcaagtatgaaggcagaggaaatctgccacttkcactagccaaactgcattcccacttttgaactctaatgtgttatctgtatctgttagagcaccacaccatatgccctgaaatgtagttattactgcaaacttcattctcacccctgcaggcctgmgctctggaggcaggttccacatctaacaacatctttttgtctcccagcagactgacccagtgtcttgtacttgatcaagagaaaattcagccatatgttaattattttatctggacttcagttaccttctgttaaggtttgagaacttgtgtcaaagttctcggtagtgttcctttggcctggagcaagtggaagggaagcttaaaccagaagaacctatccagacctgctactatgctcacccctctaaatgcctcacttctctatagaatttaactttttagttggttattctggatgaagggtgatctgaacaagctagtattcaggaatacaagtatctaagaatatttagggtggccataaagtctggaaacacaggcaaatgtacctaatggtttattgatattacactatagtacatgatgtgctgaatgccatcatgtccgttcagcatcttcccttattagcaatgcatagttgagtgtacagtgccaaactgcaaccaacaggtgtattactgtagcatttccatcatttcctgcacatggacctgtgttcctgatttgtctctgatttccactgactaaacctgcacctttagcatatcccagaagtggtcatcaaagtttgcactattagaaatatatacatgacttatgtttccagactattgccaccctataaattaagcaaactgctttatgtatctagttgacagcattataacagtgcagtggcacaatcatggctcactgcagcctcaacctcccaagtagttgggacacctggctaattattttttgtagaaacggggtcacactatgttgcccacgctggtcttgaacccctggggtcaagtaatcctcttgccttggcctcccagagtactgggattataggtatgaaccactgtgcctagccccatgagtgtcttttggagtaaaatattgtagcataggaacaaagagacaagccatgccatatataagtgctagaggttattaacccctgctctaagtggtgtttttaggaagcaaagcagagaattgaacccccaagttctctggccaataacctaaggaccactggcaacatctaagattgcagatctgagaattagaccagtactgcctgcctttttgtactgcctaaggttctggcaggctgtggcgctaaggagaccatttctcaatgtgagtttctatcccagctagtcaagggttctctatagccctgaacctttcaatctggggtctctatctataccctagttccatcagatggttactgaagcagtatgatttggtagttctttaaattttggaatgaaaggtcatttgaagtagctttaaaaccagaagctttctgacagaaatggaaactgtttgcaaacaagtatgarttttggaaaagtagccrgtcttgataacgtagaattcatcttagtactctttccatcagccattctcatctaactgtatcccccttattagaaatcctttcaggctctagtacaagacctaccctacataaaggacccaagatattgtccagtttgcagatttcttcaagagatcagctttagctccaaattcacaactcccaatgaaccaatctcttagagtgcaaattacagccttgcactcttatcttatcttgccttcttatcttaatctgcctttagataactcaaagaactgcatcagtttgacaatttattcttgtatttaattgtttaaatatacaattttttactcattattaccttagtgtaatttggtwagagccatgtccaagcatgactctaaaggactatatcctttttattagcatggcsatataatttttagctacaaaagtttaagcaaaaacaaacyctgcaatgatgtggaatagcagaaaagatcctttgcaggcaagagactctagcatatttacctatgtagttaacaggctgcagacctggttgctacatacctgtattgtgtatttcctcagcaatatacatgccttctcgataggtt

SEQ ID NO: 3776 - DNA, 1066 bp, Homo sapiens
aacagggccaggaggtgtgggagcgggagacactagagtaacctatgtgcacagcctctccatataccatgtgctgttgcgcctgctagtaatcgacgacattaggcaagagaaacagcggctcctcaagtcctgcccaaagacmgtccagaaaccccagcctcccgtcgccttctcgccgcctccgctgggagccgcagatcagtccaagttgacgkacaggaggcgaaatgtgcaaatgtttatggtttcatctgtatggaaaaggagctctggtaactttggccaagacttttcagtaggaaatgcttcaaaatacaaagcaagagctattttcaagaaagaccttctaaatttatattaggattaagcgtctgtaacgttgccactcgtcgctgaggctcctggtttcagcatgtctccttggttcccagccagctctgggtgttcaggtagcagctgtggctgggagtgtctctccagtccacattccttggccatgaattttgcagccctgtttatctgatgaagacctcccagtagtgaattgctcatgacattgtcacacagaccttaatgaatgatatggaaagatactgaatatttttcctcccggaatgccaaccaagcttcagtgtcccagcgccttcattccagctgatcatggcaaaggcttggtactgagatccagtgagacctttgtcctacaaaaaccacattctcactggatgcctacaagtcctctctatgggactgttacccaagcctgtttacagaattttcaacaattacatctgcccatttgctgagtctcacttctctgcactaattgttgacttcaatttatatttttaatgtacaaatgctatcaccaacttcagtgcatgaagacctctctttcttctcttcaaacccatgactttgcttggaataacagggatggctttatggcatggctttctcattatttcatgtgtcttcattttgctttcccaagccagattgtaaattccttgaaagaggagaccctgaaaactagaaatacctatacagacagatagacagt

SEQ ID NO: 3777 - DNA, 706 bp, Homo sapiens
aacagggccaggaggtgtgggagcgggagacactagagtaacctatgtgcacagcctctccatataccatgtgctgttgcgcctgctagtaatcgacgacattaggcaagagaaacagcggctcctcaagtcctgcccaaagacmgtccagaaaccccagcctcccgtcgccttctcgccgcctccgctgggagccgcagatcagtccaagttgacgkacaggaggcgaaatgtgcaaatgtttatggtttcatctgtatggaaaaggagctctggtaactttggccaagacttttcagtaggaaatgcttcaaaatacaaagcaagagctattttcaagaaagaccttctaaatttatattaggacatagtgagaagaaagccatctgaaaaccaggaagagagccctcaccagaatctgaccatgctggtgccctgatcttggactttcagcctccagaactgcaaaattctggtgtggtgtgaatgctgtggctcagtccgaacatgtttttttctgtaattttatcattattacacgattgcaatatcagttttgttttttaattggaaagcaacattttctactgttgaaagacgttttttgacaaattgacccttcctagtattgagtactaagttgaggactgcatctacttgttttttacattatagagaataaaatactattgatttgaaaaataca

SEQ ID NO: 3778 - DNA, 739 bp, Homo sapiens
aacagggccaggaggtgtgggagcgggagacactagagtaacctatgtgcacagcctctccatataccatgtgctgttgcgcctgctagtaatcgacgacattaggcaagagaaacagcggctcctcaagtcctgcccaaagacmgtccagaaaccccagcctcccgtcgccttctcgccgcctccgctgggagccgcagatcagtccaagttgacgkacaggaggcgaaatgtgcaaatgtttatggtttcatctgtatggaaaaggagctctggtaactttggccaagacttttcagtaggaaatgcttcaaaatacaaagcaagagctattttcaagaaagaccttctaaatttatattagaaccatctgatggatggcagacagctgaaccaggacatagtgagaagaaagccatctgaaaaccaggaagagagccctcaccagaatctgaccatgctggtgccctgatcttggactttcagcctccagaactgcaaaattctggtgtggtgtgaatgctgtggctcagtccgaacatgtttttttctgtaattttatcattattacacgattgcaatatcagttttgttttttaattggaaagcaacattttctactgttgaaagacgttttttgacaaattgacccttcctagtattgagtactaagttgaggactgcatctacttgttttttacattatagagaataaaatactattgatttgaaaaataca

SEQ ID NO: 3779 - DNA, 1139 bp, Homo sapiens
aacagggccaggaggtgtgggagcgggagacactagagtaacctatgtgcacagcctctccatataccatgtgctgttgcgcctgctagtaatcgacgacattaggcaagagaaacagcggctcctcaagtcctgcccaaagacmgtccagaaaccccagcctcccgtcgccttctcgccgcctccgctgggagccgcagatcagtccaagttgacgkacaggaggcgaaatgtgcaaatgtttatgggccccagtgtgtgatgttccctttcctgagtaacaccattttctatctaaatgaagaaatggaggcatggaagtttcatctgtatggaaaaggagctctggtaactttggccaagacttttcagtaggaaatgcttcaaaatacaaagcaagagctattttcaagaaagaccttctaaatttatattaggattaagcgtctgtaacgttgccactcgtcgctgaggctcctggtttcagcatgtctccttggttcccagccagctctgggtgttcaggtagcagctgtggctgggagtgtctctccagtccacattccttggccatgaattttgcagccctgtttatctgatgaagacctcccagtagtgaattgctcatgacattgtcacacagaccttaatgaatgatatggaaagatactgaatatttttcctcccggaatgccaaccaagcttcagtgtcccagcgccttcattccagctgatcatggcaaaggcttggtactgagatccagtgagacctttgtcctacaaaaaccacattctcactggatgcctacaagtcctctctatgggactgttacccaagcctgtttacagaattttcaacaattacatctgcccatttgctgagtctcacttctctgcactaattgttgacttcaatttatatttttaatgtacaaatgctatcaccaacttcagtgcatgaagacctctctttcttctcttcaaacccatgactttgcttggaataacagggatggctttatggcatggctttctcattatttcatgtgtcttcattttgctttcccaagccagattgtaaattccttgaaagaggagaccctgaaaactagaaatacctatacagacagatagacagt

SEQ ID NO: 3780 - DNA, 2356 bp, Homo sapiens
caaaagcagttgggccgaacgaagcgtgcgcgctttggtaaccggctagaaatcccgcacgcgcgcctgcctcctctccccrggcctgagctgcccctcccastgcctttccttcttcccgcgagtcagaagcttcgcgagggcccagagaggcggtggggtgggcgaccctacgccagctccgggcgggagaaagcccaccctctcccgcgccccaggaaaccgccggcgttcggcgctgcgcagagccatggaattctcctggctggagacgcgctgggcgcggcccttttacctggcgttcgtgttctgcctggccctggggctgctgcaggccattaagctgtacctgcggaggcagcggctgctgcgggacctgcgccccttcccagcgccccccacccactggttccttgggcaccagaagtttattcaggatgataacatggagaagcttgaggaaattattgaaaaataccctcgtgccttccctttctggattgggccctttcaggcatttttctgtatctatgacccagactatgcaaagacacttctgagcagaacagatcccaagtcccagtacctgcagaaattctcacctccacttcttggaaaaggactagcggctctagacggacccaagtggttccagcatcgtcgcctactaactcctggattccattttaacatcctgaaagcatacattgaggtgatggctcattctgtgaaaatgatgctggataagtgggagaagatttgcagcactcaggacacaagcgtggaggtctatgagcacatcaactcgatgtctctggatataatcatgaaatgcgctttcagcaaggagaccaactgccagacaaacagcacccatgatccttatgcaaaagccatatttgaactcagcaaaatcatatttcaccgcttgtacagtttgttgtatcacagtgacataattttcaaactcagccctcagggctaccgcttccagaagttaagccgagtgttgaatcagtacacagatacaataatccaggaaagaaagaaatccctccaggctggggtaaagcaggataacactccgaagaggaagtaccaggattttctggatattgtcctttctgccaaggatgaaagtggtagcagcttctcagatattgatgtacactctgaagtgagcacattcctgttggcaggacatgacaccttggcagcaagcatctcctggatcctttactgcctggctctgaaccctgagcatcaagagagatgccgggaggaggtcaggggcatcctgggggatgggtcttctatcacttgggaccagctgggtgagatgtcgtacaccacaatgtgcatcaaggagacgtgccgattgattcctgcagtcccstccatttccagagatctcagcaagccacttaccttcccagatggatgcacattgcctgcagggatcaccgtggttcttagtatttggggtcttcaccacaaccctgctgtctggaaaaacccaaaggtctttgaccccttgaggttctctcaggagaattctgatcagagacacccctatgcctacttaccattctcagctggatcaaggaactgcattgggcaggagtttgccatgattgagttaaaggtaaccattgccttgattctgctccacttcagagtgactccagaccccaccaggcctcttactttccccaaccattttatcctcaagcccaagaatgggatgtatttgcacctgaagaaactctctgaatgttagatctcagggtacaatgattaaacgtactttgtttttcgaagttaaatttacagctaatgatccaagcagatagaaagggatcaatgtatggtgggaggattggaggttggtgggataggggtctctgtgaagagatccaaaatcatttctaggtacacagtgtgtcagctagatctgtttctatataactttgggagattttcagatcttttctgttaaactttcactactattaatgctgtatacaccaatagactttcatatattttctgttgtttttaaaatagttttcagaattatgcaagtaataagtgcatgtatgctcactgtcaaaaattcccaacactagaaaatcatgtagaataaaaattttaaatctcacttcacttagccgacattccatgccctgaccaatcctactgcttttcctaaaaacagaataatttggtgtgcattctttcagactttttcctatacattttatatgtagaaatgtagcaatgtatttgtatagatgtgatcattcctatattgttattgatttttttcacttaataaaaattcaccttattcctt

SEQ ID NO: 3781 - DNA, 1064 bp, Homo sapiens
atgtgggctggaaacgcctggcgcgccgcgctttccggggtgccgtgcggccgcagcgcgcagtcagtactggcccagctgcgcggcattctggagggggagctggaagggatccgcggagctggcacctggaagagtgagcgggtcatcacgtcccgtcaggggcckcacatccacgtggacggcgtctccggaggaatcctcaacttaacctcggtccgcttcatccgtggaacccaaagcatccacaagaatctagaagcaaaaatagcccgcttccaccagcgggaggatgccatcctctatcccagctgttgtgacgccaacgccggcctctttgaggtcctgctgagacccgaggacgcagtcctgtcggacgagctgaactgtgcctccatcatccacggcatctgcctgtgcaaggcccacaagtaccactattgccacctggacgtggcctacctagaaaccaagcttcaggaggcccagaagcatcggctgttcctggtggccaccgatggggccttttccatggatggcgacatcgtgcccctgcagaagatctgccgcctcgcctctagatatggcgccctggtctttgtggatgaatgccatgccactggtttcctgggactcacaggacagggcacagatgagctgctgggtgtgatgggccaggtcaccatcatcaactccaccctggggaaggccctgggtggtgcatcagggggctacacgacagggcctgggcccctggtgtcactgctgctgcccagccctatctcttctccaacagtctgccacctgctgttgttggctgcacctctaaggccctagatctgctcatggagagcaacaccatcgtccagtctatggctgccaggacccagtggttctgtagtaagatggaagctgctggattcactgtctcaggagccagtcaccccatccgtcctggcaaggcccagatccggatacagatctcagcattgcacaatgaggaagacattgactaccacgtggaggccttcgtggaagtggggcggctgtacagggcactgccc

SEQ ID NO: 3782 - DNA, 1241 bp, Homo sapiens
atgtgggctggaaacgcctggcgcgccgcgctttccggggtgccgtgcggccgcagcgcgcagtcagtactggcccagctgcgcggcattctggagggggagctggaagggatccgcggagctggcacctggaagagtgagcgggtcatcacgtcccgtcaggggcckcacatccacgtggacggcgtctccggaggaatcctcaacttaacgtgccaacaactacctgggcctgagcagccaccctgaggtgattcaggcaggtctgcaggctctttggagctggccttagctcggtccgcttcatccgtggaacccaaagcatccacaagaatctagaagcaaaaatagcccgcttccaccagcgggaggatgccatcctctatcccagctgttgtgacgccaacgccggcctctttgaggtcctgctgagacccgaggacgcagtcctgtcggacgagctgaactgtgcctccatcatccacggcatctgcctgtgcaaggcccacaagtaccactattgccacctggacgtggcctacctagaaaccaagcttcaggaggcccagaagcatcggctgttcctggtggccaccgatggggccttttccatggatggcgacatcgtgcccctgcagaagatctgccgcctcgcctctagatatggcgccctggtctttgtggatgaatgccatgccactggtttcctgggactcacaggacagggcacagatgagctgctgggtgtgatgggccaggtcaccatcatcaactccaccctggggaaggccctgggtggtgcatcagggggctacacgacagggcctgggcccctggtgtcactgctgctgcccagccctatctcttctccaacagtctgccacctgctgttgttggctgcacctctaaggccctagatctgctcatggagagcaacaccatcgtccagtctatggctgccaggacccagtggttctgtagtaagatggaagctgctggattcactgtctcaggagccagtcaccccatccgtcctgtgatgctgggtgatgcccagctgaccttgcatggcggatgacatgctgaagagaggcatctttgttattgggttcagctaccctgtggtctccaagggcaaggcccagatccggatacagatctcagcattgcacaatgaggaagacattgactaccacgtggaggccttcgtggaagtggggcggctgtacagggcactgccc

SEQ ID NO: 3783 - DNA, 590 bp, Homo sapiens
gcgccttggtgagccgttggcgtggtggtcccggagtgatcctggcagccggtggggaagacaaggagggtttgagcatggcagaaggaaacaccctgatatcagtggattatgaaatttttgggaaggtgcaaggggtgtttttccgtaagcatactcaggctgagggtaaaaagctgggattggtaggctgggtccagaacactgaccggggcacagtgcaaggacaattgcaaggtcccatctccaaggtgcgtcatatgcaggaatggcttgaaacaagaggaagtcctaaatcacacatcgacaaagcaaacttcaacaatgaaaaagtcatcttgaagttggattactcagacttccaaattgtaaaataatggcctgaatttaagttttctaagataaactcagtggtttggtttttattattaatagagatagaactattgtgtgttaatrttagcattagtcaataagttattttaatgtcagatttttgaatgttattatatattacctgtatgatggaaggattaccmctgtacacaaatctaatcaataaaaacgttagaaccttctgcttagagtac

SEQ ID NO: 3784 - DNA, 521 bp, Homo sapiens
gtttgagcatggcagaaggaaacaccctgatatcagtggattatgaaatttttgggaaggtgcaaggggtgtttttccgtaagcatactcaggctgagggtaaaaagctgggattggtaggctgggtccagaacactgaccggggcacagtgcaaggacaattgcaaggtcccatctccaaggtgcgtcatatgcaggaatggcttgaaacaagaggaagtcctaaatcacacatcgacaaagcaaacttcaacaatgaaaaagtcatcttgaagttggattactcagacttccaaattgtaaaataatggcctgaatttaagttttctaagataaactcagtggtttggtttttattattaatagagatagaactattgtgtgttaatrttagcattagtcaataagttattttaatgtcagatttttgaatgttattatatattacctgtatgatggaaggattaccmctgtacacaaatctaatcaataaaaacgttagaaccttctgcttagagtac

SEQ ID NO: 3785 - DNA, 915 bp, Homo sapiens
cgccgggccgtgctcttgctcccgccgcctggcagcctcacgctcggctccagcggccaagagccggagaaagtcctgctggtgggcggccgcggggctgagggcgtccggcatcccggggccgctccggcccgggcggcgagagtgcccggcggtccatgcatccgccgccgcccgccgccgcgatggatttcagtcagaacagcctgttcggttacatggaggacctgcaggagctcaccatcatcgagaggccggtccgccggagcctcaagacaccggaagaaatagaaagattgacrgtcgatgaagacctcagtgatattgaaagggctgtttatctgctcagtkctggtcaagatgtccaaggaacaagtgtgattgcaaatctcccatttttgatgcgacagaatcccactgagacgcttcggagagtgttgccaaaagtcagagtccatgaggatgcacacttatttatccagagagtatggatctcacatatgtttgtccagagggtgtgactctgtggaggagaacacttactgtggacagtcccagatgttgaagtcagcacaacaagagaaaaacccaaatcctgataagacttgaggatttttcgaaaattaaatgcaaaatagttggggcaaatgttgctgcgggagtcaagactaagtaatacagtaagaagatatgaagttggagagcttctcatgttcttcctttgtataaagtttgcatacgtacaaaacccaggactttaatgactttaagagggggcagaattgcatctyttggaagttaacagactcatgtgaactggaatgtacgttgtggccctcacaattgattttaatatttatttgcaaagtcctttctgtttctaaataaaagctgtgccttctgaaacctgtaagt

SEQ ID NO: 3786 - DNA, 3711 bp, Homo sapiens
cgccgggccgtgctcttgctcccgccgcctggcagcctcacgctcggctccagcggccaagagccggagaaagtcctgctggtgggcggccgcggggctgagggcgtccggcatcccggggccgctccggcccgggcggcgagagtgcccggcggtccatgcatccgccgccgcccgccgccgcgatggatttcagtcagaacagcctgttcggttacatggaggacctgcaggagctcaccatcatcgagaggccggtccgccggagcctcaagacaccggaagaaatagaaagattgacrgtcgatgaagacctcagtgatattgaaagggctgtttatctgctcagtkctggtcaagatgtccaaggaacaagtgtgattgcaaatctcccatttttgatgcgacagaatcccactgagacgcttcggagagtgttgccaaaatggaaatgcagttaacggctgcgatgtcatttctgaccattctgcaggacgaatcagtgtcaattcatgcatatacccactcattcctccaagtcattctcctgcatctggagcacagggacacaggtgtcagcaatgcatggctggaaactcttctgtctgttatagaagtattgccaaaagaaaccctacggcatgagattttgaatccacttgtttccaaggcacaactttcccaaacagtccagtctcgtttagttagttgtaaaattttaggaaaattgaccaacaaatttgatgcccacaccattaagcgagaaatacttcctctggtaaaatcactctgtcaagatgtagaatatgaagttcgatcttgtatgtgtcggcaattagaaaatatagcccagggcattgggacagaacttacaaaaagtgtggtgctccctgaattaatagaactttctagggatgaaggcagcagtgtacgacttgcagcttttgaaactttggttaatctgcttgatatatttgatacagatgacagaagtcaaactatacttcccttagtgaaatcattttgtgaaaaatctttcaaagcagatgaatcaattcttatttctttatctttccatttaggaaaactatgtcatggactatatggaattttcactccagatcagcacttgagatttttggaattttataagaaactttgtacattgggtttgcaacaagaaaatggacacaatgaaaaccagattccaccccaaatcctagagcaggagaagaaatatatttcagtacggaagaactgtgcttataactttccggccatgattgtttttgttgatcctaaaaacttccacatggaactctattctacattcttctgcctttgccatgaccctgaagtaccagtcagatacactattgctatttgcttttatgaagtatctaagcttctgaattctggagtatatttaatacataaagaactaataacattattacaagatgaatcactggaggtactagatgctcttatagatcatcttccagaaatcttggaacttatgtctactggtggagaaagcagtgttcaagaaaataagttatcttctctgcctgacttgattccagcactcacagctgctgaacagcgagctgcagcctctttaaaatggagaactcatgagaagctacttcagaaatatgcctgcctgccacatgtcatatcaagcgatcagatttattaccgtttcttacaaagaatgttcacaatcatgatgacaaataatgttttacctgtccaaaaggcggcttcacgaactctatgcatttttctgcgttataatcgtaaacaagaacagagacatgaggtcattcaaaaattaattgaacaattgggccaaggaaaaagttactggaatagacttcgatttttggatacctgtgaatttattatagagatattttcaaaatcatttttctgtaaatatttctttctacctgctattgaactgacacatgatccagtagcaaatgtgagaatgaaactttgctacctgttgcccaaagtgaaatctactctgaagattcctgctgataagcatctacttcagcagttagaaatgtgtgtgaggaaactcctgtgtcaagaaaaagataaagatgttctggctattgtaaaaagaactgtattagagttggacagaatggaaatgtctatggatgcttttcagaaaaagttttatgagaaagatttgttggatcaagagaaagaaagagaagaactacttcttttgsaaatggaacaattagagaaagaaaagcaacagaatgatggaaggcccatgagtgataaaatgtttgaaaagaaacgtagagacactaagacaccaacgcaaagtctgcccaagaacatccccatttctgttcctggaccctcttctgtcaccccatcgacaagtaaagaaatcaagaaatccaaactgattcgaagccagtcttttaataatcaagcttttcatgcaaaatatggcaacttagagaaatgtgctagtaaaagttctacaacaggatatacaacttctgtctcagggttaggaaagacttctgtgctttcactagctgatgattcattccggactcgtaatgccagtagcgttccatcttccttttctcctaatactcccttaccgagtacttcccgtgggacaggtaactcagttgaccccaagagcagtggaagtaaagatacacaaccacggaaggctaccttgtaaaaaatccagaaaatccaatccttaaatcaactgcttgatgaaggaggcaaaacaaaggcagcaggagataatgtgattggtacacaaaagctaaagcagtggctggggctttgtttttaaattttgggtttttttttttgttgttgttaatgagcagaaagagagacataatgacagctgatgttaaacttttcatatttcaaattagattccctaggaggtataatatatatttcttgagtaataatgtggttacggaattccaatgttatagtgaagtgtaatgaaaaacatctctaggaatgtgctttaaccactgctgcaaaagagacaagtctgcatttatttgtgcaggaaaccagccatttaattgttctagagttttagcatttaaaaatcgtatgaaagtctacatcagctgaattgtcctagcttgataagcacttggagggggacttggaaggtgagaaagatactgcattttctcatgagtctccaagcccacttgaaaagtcacactgaaaggatgcaaatagccgtctgcgattttggcggccctccggattgtggtgacaatatgttgtacccggacattcccaaatttaaatttggcartgaaaattccacaaagatttctggtaactttgagctataaataccttaaaaataatagattgatgattttctttatttcctagagaatttattttataaatactttgtttacattttagattgtacttgtctttatttaaaatgatgaatctagtctgaatcagctgttattccaagctatcatgcttaagctatgtcaacagcatttatttgtactaatgctaatatttccatcaaaatttgcctgtggaatatatacagttcttaattttaaactgtcagttcttgagatataccgtgtgaagctattgtcagcttctctatttcaaaatgcaatcagcatataactatattgatattagaag

SEQ ID NO: 3787 - DNA, 3872 bp, Homo sapiens
cgccgggccgtgctcttgctcccgccgcctggcagcctcacgctcggctccagcggccaagagccggagaaagtcctgctggtgggcggccgcggggctgagggcgtccggcatcccggggccgctccggcccgggcggcgagagtgcccggcggtccatgcatccgccgccgcccgccgccgcgatggatttcagtcagaacagcctgttcggttacatggaggacctgcaggagctcaccatcatcgagaggccggtccgccggagcctcaagacaccggaagaaatagaaagattgacrgtcgatgaagacctcagtgatattgaaagggctgtttatctgctcagtkctggtcaagatgtccaaggaacaagtgtgattgcaaatctcccatttttgatgcgacagaatcccactgagacgcttcggagagtgttgccaaaagtcagagaagccctgcatgttgcaggagtggaaatgcagttaacggctgcgatgtcatttctgaccattctgcaggacgaatcagtgtcaattcatgcatatacccactcattcctccaagtcattctcctgcatctggagcacagggacacaggtgtcagcaatgcatggctggaaactcttctgtctgttatagaagtattgccaaaagaaaccctacggcatgagattttgaatccacttgtttccaaggcacaactttcccaaacagtccagtctcgtttagttagttgtaaaattttaggaaaattgaccaacaaatttgatgcccacaccattaagcgagaaatacttcctctggtaaaatcactctgtcaagatgtagaatatgaagttcgatcttgtatgtgtcggcaattagaaaatatagcccagggcattgggacagaacttacaaaaagtgtggtgctccctgaattaatagaactttctagggatgaaggcagcagtgtacgacttgcagcttttgaaactttggttaatctgcttgatatatttgatacagatgacagaagtcaaactatacttcccttagtgaaatcattttgtgaaaaatctttcaaagcagatgaatcaattcttatttctttatctttccatttaggaaaactatgtcatggactatatggaattttcactccagatcagcacttgagatttttggaattttataagaaactttgtacattgggtttgcaacaagaaaatggacacaatgaaaaccagattccaccccaaatcctagagcaggagaagaaatatatttcagtacggaagaactgtgcttataactttccggccatgattgtttttgttgatcctaaaaacttccacatggaactctattctacattcttctgcctttgccatgaccctgaagtaccagtcagatacactattgctatttgcttttatgaagtatctaagcttctgaattctggagtatatttaatacataaagaactaataacattattacaagatgaatcactggaggtactagatgctcttatagatcatcttccagaaatcttggaacttatgtctactggtggagaaagcagtgttcaagaaaataagttatcttctctgcctgacttgattccagcactcacagctgctgaacagcgagctgcagcctctttaaaatggagaactcatgagaagctacttcagaaatatgcctgcctgccacatgtcatatcaagcgatcagatttattaccgtttcttacaaagaatgttcacaatcatgatgacaaataatgttttacctgtccaaaaggcggcttcacgaactctatgcatttttctgcgttataatcgtaaacaagaacagagacatgaggtcattcaaaaattaattgaacaattgggccaaggaaaaagttactggaatagacttcgatttttggatacctgtgaatttattatagagatattttcaaaatcatttttctgtaaatatttctttctacctgctattgaactgacacatgatccagtagcaaatgtgagaatgaaactttgctacctgttgcccaaagtgaaatctactctgaagattcctgctgataagcatctacttcagcagttagaaatgtgtgtgaggaaactcctgtgtcaagaaaaagataaagatgttctggctattgtaaaaagaactgtattagagttggacagaatggaaatgtctatggatgcttttcagaaaaagttttatgagaaagatttgttggatcaagagaaagaaagagaagaactacttcttttgsaaatggaacaattagagaaagaaaagcaacagaatgatggaaggcccatgagtgataaaatgtttgaaaagaaacgtagagacactaagacaccaacgcaaagtctgcccaagaacatccccatttctgttcctggaccctcttctgtcaccccatcgacaagtaaagaaatcaagaaatccaaactgattcgaagccagtcttttaataatcaagcttttcatgcaaaatatggcaacttagagaaatgtgctagtaaaagttctacaacaggatatacaacttctgtctcagggttaggaaagacttctgtgctttcactagctgatgattcattccggactcgtaatgccagtagcgttccatcttccttttctcctaatactcccttaccgagtacttcccgtgggacaggtaactcagttgaccccaagagcagtggaagtaaagatacacaaccacggaaggctaccttaaaatccagaaaatccaatccttaaatcaactgcttgatgaaggaggcaaaacaaaggcagcaggagataatgtgattggtacacaaaagctaaagcagtggctggggctttgtttttaaattttgggtttttttttttgttgttgttaatgagcagaaagagagacataatgacagctgatgttaaacttttcatatttcaaattagattccctaggaggtataatatatatttcttgagtaataatgtggttacggaattccaatgttatagtgaagtgtaatgaaaaacatctctaggaatgtgctttaaccactgctgcaaaagagacaagtctgcatttatttgtgcaggaaaccagccatttaattgttctagagttttagcatttaaaaatcgtatgaaagtctacatcagctgaattgtcctagcttgataagcacttggagggggacttggaaggtgagaaagatactgcattttctcatgagtctccaagcccacttgaaaagtcacactgaaaggatgcaaatagccgtctgcgattttggcggccctccggattgtggtgacaatatgttgtacccggacattcccaaatttaaatttggcartgaaaattccacaaagatttctggtaactttgagctataaataccttaaaaataatagattgatgattttctttatttcctagagaatttattttataaatactttgtttacattttagattgtacttgtctttatttaaaatgatgaatctagtctgaatcagctgttattccaagctatcatgcttaagctatgtcaacagcatttatttgtactaatgctaatatttccatcaaaatttgcctgtggaatatatacagttcttaattttaaactgtcagttcttgagatataccgtgtgaagctattgtcagcttctctatttcaaaatgcaatcagcatataactatattgatattagaagatatttgttttttaaaatatattgatgtatgataaagatgatctaatttgtgaatgcatatgtatgtgtggttactttttataatgtgaaataatgaataatgaatttactcaaaataaaacataggttaatgagat

SEQ ID NO: 3788 - DNA, 2191 bp, Homo sapiens
gagatcaatgatctgttggttaaggaaaagattatgcaacttgtccagcagagatcacaaatccaaacccttcagaagaaggtagtaaacttrgagactgctctgagttacatgaccaaagagtttgagagtgaagttttaaaactgcagcaacacgcaatgatagagaaccaagcaggtcaggtagaaattgacaagctgcagcaccttcttcagrtgaaggacagggaaatgaatcgtgtgaagaagctggccaagaacatactggatgagagaacagaagtggaaagattctttttagatgctctgcaccaagtgaagcaacagatcctaattagcaggaagcattataagcagatagcacaagctgctttcaatttaaaaatgagagcagcatgtacaggaagaacagaatatcccaaaatcagaacatttgatggcagagagcacagcaccaatagtgtgaatcaggatcttctggaggccgaaaaatggacacatattgaaggaaatgtggatattggagatttgacctgggagcagaaggaaaaagtattgcgattgctctttgcaaaaatgaatggctgtccttctaggaaatacaaccagagttctaggcctccagttccagactatgttgtttctgacagtggggaaacaaaggaatttggggatgaaagtaagcttcaagatraaatcttcatcacccagcaaattgcaatatcagactcttctggtgaagtggtgctacccactattccaaaagaacctcargagtctgacacaggaaccttctgagaagcactgattatgacctcacagatgctgctggcagtcccttccttgcagaatccttgctcctgaatatctttaagaaaatktcttaaaggaaaagacaaaaaatttaactcaaaagttacctgtttgccatagaaattggtgtctcccctgaaggaggatcgagagccggtgaatgagaacattggcaaaggcactggaatggggacattcactcccacctaaaacagaacaaatcygtgtcatatcctaaggacaaaggaactctccatttagaaacacaaaggcatcagagaccagttttaaatacccaccttctaccctatcctctaccccatgaactttcattcctgaggaagaaatggggcaatgtgggaggtcatgggggcaatcttaaaccaatgactcaccattatttactgtttcctcttaggaaatagtaaatggatataagaatctcttaaaaattctgttcacgaacctgtccaacatccaccaagtgggcatatttccgagcagtggctccattggtggtgaagatggcagttcyatttccatatgggttgttatttacaatctggatggcttcatccaatgtttctgtctccagaaccacaagaactggaccaaaaatctcctctttgtaacaggtcatatttggctgccaggagtgatgcatccagaaaagaagtcagctttttggattctgagtattttatgcttatttggtactttcacttactacacatcatttacgtggacaactttcatattactaatctcttttcatttcaaatcacctatttaaaaaaaaagtcctctctcaagtgtattccgtcttccaagttaccaatcatataaacaacttggaattcctatcaacaataaccacacttcctttaagggactgtatctttagttcatgacccatcatcagctgcctttttaatacctgaacgactagtttcatccaattgttatcaaaaagttacatgaaaatttattttttataaatccaatctatagtaaatataccaggataatttttctctttacagaaaccccatgctgttttctgtaacataaataatccattcttattcactcctttgcctcccaamtatgtctrtatgtttatattttgatatcaggtcgcagacactcaaaacatccttcaccatgcaattaatgtttgttgctgataaacggatttttctgtatggttctgtggcaagagatttcataatttctactgcacttacattcaacacttgatgattcactattatagtaaggatatatgaatttcaaaaaatgcctcataacctcaatttttaagtcatgttagctgagagactttcaaagttttgataaataaaaattgacaagtcaa

SEQ ID NO: 3789 - DNA, 2804 bp, Homo sapiens
ggcggccgcggctgggcaactacgacagcggagcccctggggaagccaagatgccgtcgaagggaaaggacaaaaagaaaggcaagagcaaaggcaaagacacgaaattgaaaaactgaaacagcaattaaatgaaacaaaggaaaaagcccaagaggagaaggataaattggaacaaaagtataccaggcaaattaatgaactagagggacagttccatcaaaaagccaaagaaattggcatgattcacacagagctgaaagcagtaagacaattccagaagagaaaaatccaagtggagagagagttagatgatctgaaagagaatttaagaaacacagagcggatacatcaggagactcttagaaractggaaagcagattttttgaagaaaagcaccgactagaacaagaggctgaaaagaagataataatgctagcagagagagcccaccatgaggctattgtgcaattgaacgatgctggaagaaatgtttttaaagagaatgwttatcttcagaaagctctggcatatcacctgaaggaaactgacgctctacaaaaaaactcccagaagttgcaagagagtcatactttacttttacatcaaaaggagatcaatgatctgttggttaaggaaaagattatgcaacttgtccagcagagatcacaaatccaaacccttcagaagaaggtagtaaacttrgagactgctctgagttacatgaccaaagagtttgagagtgaagttttaaaactgcagcaacacgcaatgatagagaaccaagcaggtcaggtagaaattgacaagctgcagcaccttcttcagrtgaaggacagggaaatgaatcgtgtgaagaagctggccaagaacatactggatgagagaacagaagtggaaagattctttttagatgctctgcaccaagtgaagcaacagatcctaattagcaggaagcattataagcagatagcacaagctgctttcaatttaaaaatgagagcagcatgtacaggaagaacagaatatcccaaaatcagaacatttgatggcagagagcacagcaccaatagtgtgaatcaggatcttctggaggccgaaaaatggacacatattgaaggaaatgtggatattggagatttgacctgggagcagaaggaaaaagtattgcgattgctctttgcaaaaatgaatggctgtccttctaggaaatacaaccagagttctaggcctccagttccagactatgttgtttctgacagtggggaaacaaaggaatttggggatgaaagtaagcttcaagatraaatcttcatcacccagcaaattgcaatatcagactcttctggtgaagtggtgctacccactattccaaaagaacctcargagtctgacacaggaaccttctgagaagcactgattatgacctcacagatgctgctggcagtcccttccttgcagaatccttgctcctgaatatctttaagaaaatktcttaaaggaaaagacaaaaaatttaactcaaaagttacctgtttgccatagaaattggtgtctcccctgaaggaggatcgagagccggtgaatgagaacattggcaaaggcactggaatggggacattcactcccacctaaaacagaacaaatcygtgtcatatcctaaggacaaaggaactctccatttagaaacacaaaggcatcagagaccagttttaaatacccaccttctaccctatcctctaccccatgaactttcattcctgaggaagaaatggggcaatgtgggaggtcatgggggcaatcttaaaccaatgactcaccattatttactgtttcctcttaggaaatagtaaatggatataagaatctcttaaaaattctgttcacgaacctgtccaacatccaccaagtgggcatatttccgagcagtggctccattggtggtgaagatggcagttcyatttccatatgggttgttatttacaatctggatggcttcatccaatgtttctgtctccagaaccacaagaactggaccaaaaatctcctctttgtaacaggtcatatttggctgccaggagtgatgcatccagaaaagaagtcagctttttggattctgagtattttatgcttatttggtactttcacttactacacatcatttacgtggacaactttcatattactaatctcttttcatttcaaatcacctatttaaaaaaaaagtcctctctcaagtgtattccgtcttccaagttaccaatcatataaacaacttggaattcctatcaacaataaccacacttcctttaagggactgtatctttagttcatgacccatcatcagctgcctttttaatacctgaacgactagtttcatccaattgttatcaaaaagttacatgaaaatttattttttataaatccaatctatagtaaatataccaggataatttttctctttacagaaaccccatgctgttttctgtaacataaataatccattcttattcactcctttgcctcccaamtatgtctrtatgtttatattttgatatcaggtcgcagacactcaaaacatccttcaccatgcaattaatgtttgttgctgataaacggatttttctgtatggttctgtggcaagagatttcataatttctactgcacttacattcaacacttgatgattcactattatagtaaggatatatgaatttcaaaaaatgcctcataacctcaatttttaagtcatgttagctgagagactttcaaagttttgataaataaaaattgacaagtcaa

SEQ ID NO: 3790 - DNA, 1952 bp, Homo sapiens
tcgccaggccacgtcgcggttggtggtcggagagggcgaggggtcccagggggcttcggggcctgcagccaccatgctccgctccctgctgcttcactccttgaggctctgcgcccagaccgcctcgtgcctcgtgctcttcccgcgcttcctcggcacggccttcatgctctggcttctcgatttcttgtgtatccgcaagcatttcctgggccgccgccgccgggggcagcccgagcccgaagtggagctcaacagtgaaggcgaggaggtgcctcccgatgacccgcccatctgcgtgtccgacgacaaccgcctgtgcaccctggcgtcgctcaaggcggtgtggcatggccagaagttggatttcttcaagcaggcgcacgagggcggtccggcgcccaactccgaggtggttctgcccgacggcttccagagccagcacatcctcgactacgcgcaagggaaccgcccgctggttctcaatttcggcagctgcacctgaccaccgttcatggcgcgcatgagcgccttccagcgcctggtcactaagtaccagcgcgacgtcgacttcctcatcatctacatcgaggaagcgcacccctccgacggctgggtcaccacggactctccctacatcatcccacagcaccggagcctggaggaccgggtcagcgcagcgagggtactgcagcaaggtgcacccggctgcgctctggtcctcgacaccatggccaactccagcagctcggcctatggcgcctacttcgagcgtctctatgtcatccagagtggcactattatgtaccagggcggccgtggccccgacggctaccaggtctctgagctgcgcacttggttggaacgctatgatgagcaactgcacggcgctcggccccggagggtgtaaacatccaacggacaattgactgaacttggtgggctgggccttcgagccttcgaagcccacgtgcaagcgcctcaaaccaagtcacgcttggcgaggccccagtgacactgatgtgctgagccaccatttcagactgagtctgcaccctcagccacatgaacaatctcccctacctccctgggactctgcttctgtaactgtctcattcacacctgcctggctcactggaaatcctcttttgagcgcgggatatggcttgcccttgtccgtgtgcccccaggactttgcctctacagcattttcttacaccccctccccagcgtgccctcagccaagtgctttggcccggtgcttcccgcagctgcacagagaccttggccacgcccgcgcgccmtgagcgcagctgggttccaggagactctcagctcagctgagctagttgcctggcacccacctgtcgcgcgcggagagggggttccctgttgcttttgtgtctgtttcctgtccctggtaggggaagtgatgtcgkggatggggaggggtgggcagggtagtttcccccgcttgttttgggtgcacaggagccccactgctgatgacgaactatctctaactggtcttgaccacgagctagttctgaattgcaggggcctcaaagcagcacctaaaccttgagggggagggtgctctgggtttccgtgaggtaaccaccttaaatgggagggaagttggggtgtctgctttgggaccagaggaagatagcttgagaggcattggcgaggttcgcagcgccccagggagagagaaaaagctgagactcctggggaatgacgttggggtgatggagtccggggaaagagaggtggggggagagcctgaggtccccaagtgaggggagtcctaggcagagctgctgattgtggggctgggaggtggagggcccctgattcgaaggccatttggtgagtgttttgctggaaatatttcctgtatataaacttctttcaatctacaataataaaggcttgaggtaaactgcttt

SEQ ID NO: 3791 - DNA, 3390 bp, Homo sapiens
aggcctggaggatttaacccaggagagccgctggtgggaggcgcggctggcgccgctgcgcgcatgggcctgttcctggcccgcagccgccacctacccagtgaccatgatagtgtttgtcaggttcaactccagccatggtttcccagtggaggtcgattctgacaccagcatcttccagctcaaggaggtggttgctaagygacagggggttccggctgaccagttgcstgtgattttcgcagggaaggagctgaggaatgactggactgtgcagaattgtgacctggatcagcagagcattgttcacattgtgcagagaccgtggagaaaaggtcaagaaatgaatgmaactggaggcgacgaccccagaaacgcggcgggaggctgtgagcgggagccccagagcttgactcgggtggacctcagcagctcagtcctcccaggagactctgtggggctggctgtcattctgcacactgacagcaggaaggactcaccaccagctggaagtccagcaggtagatcaatctacaacagcttttatgtgtattgcaaaggcccctgtcaaagagtgcagccgggaaawctcagggtacagtgcarcacctgcaggcaggcaacgctcaccttgacccaggaatttttctttaaatgtggagcacaccccacctctgacaaggaaacatcagtagctttgcacctgatcgcaacaaatagtcggaacatcacttgcattacgtgcacagacgtcaggagccccgtcctggttttccagtgcaactcccgccacgtgatttgcttagactgtttccacttatactgwgtgacaagactcaatgatyggcagtttgttcacgaccctcaacttggctactccctgccttgtgtggctggctgtcccaactccttgattaaagagctccatcacttcaggattctgggagaagagcagtacaaccggtaccagcagtatggtgcagaggagtgtgtcctgcagatggrgggcgtgttatgccccygccctggctgtggagcggggctgctgccggagcctgaccagaggaaagtcacctgcgaagggggcaatggcctgggctgtgggtttgccttctgccgggaatgtaaagaagcgtaccatgaaggggagtgcagtgccstatttgaagcctcaggaacaactactcaggcctacagagtcgatgaaagagccgccgagcaggctcgttgggaagcagcctccaaagaaaccatcaagaaaaccamcaagccctgtccccgctgccatgtaccagtggaaaaaaatggaggctgcatgcacatgaagtgtccgcagccccagtgcaggctcgagtggtgctggaactgtggctgcgagtrgaaccgcgtctgcatgggggaccactggttcgacgtgtagccagggcggccgggcrccccatcgccacatcctgggggagcatacccagtgtctaccttcattttctaattctcttttcaaacacacacacacrcgcgcgcgcgcgcacacacactcttcaagtttttttcaaagtccaactacagccaaattgcagaagaaactcctggatccctttcactatgtccatgaaaaacagcagagtaaaattacagaagaagctcctgaatccctttcagtttgtccacacaagacagcagagccatctgcgacaccaccaacaggcgttctcagcctccggatgacacaaataccagagcacagattcaagtgcaatccatgtatctgtatgggtcattctcacctgaattcgagacaggcagaatcagtagctggagagagagttctcacatttaatatcctgccttttaccttcagtaaacaccatgaagatgccattgacaaggtgtttctctgtaaaatgaactgcagtgggttctccaaactagattcatggctttaacagtaatgttcttatttaaattttcagaaagcatctattcccaaagaaccccaggcaatagtcaaaaacatttgtttatccttaagaattccatctatataaatcgcattaatgaaataccaactatgcgtaaatcaacttgtcacaaagtgagaaattatgaaagttaatttgaatgttgaatgtttgaattacagggaagaaatcaagttaatgtactttcattccctttcatgatttgcaactttagaaagaaattgtttttctgaaagtatcaccaaaaaatctatagtttgattctgagtattcattttgcaacttggagattttgctaatacatttggctccactgtaaatttaatagataaagtgcctataaaggaaacacgtttagaaatgatttcaaaatgatattcaatcttaacaaaagtgaacattattaaatcagaatctttaaagaggagcctttccagaactaccaaaatgaagacacgcccgactctctccatcagaagggtttatacccctttggcacaccctctctgtccaatctgcaagtcccagggagctctgcataccaggggttccccaggagagaccttctcttaggacagtaaactcactagaatattccttatgttgacatggattggatttcagttcaatcaaactttcagcttttttttcagccattcacaacacaatcaaaagattaacaacactgcatgcggcaaaccgcatgctcttacccacactacgcagaagagaaagtrcaaccactatcttttgttctacctgtattgtctgacttctcaggaagatcgtgaacataactgagggcatgagtctcactagcacatggaggcccttttggatttagagaytgtaaattattaaatcggcaacagggcttctctttttagatgtagcactgaaatccttgctggagggaagagaggggatgaactcaagttttccacatcctgggacacctgtccctcttttcctaactgcctaagataacccatttcttccaaccatctgaggacagtcccgtcgtctcagaggccctgcaccggggagagactgggctctgcagcagccacatcagcattcacagcttcatgtggcttcactgtctgaaaatctaccgactccaacatggccccacggtgacaacagacctgtgacaggaagcccaaagctcacatagaaatggtggacagatcaaagtctctatagtaagggaaaaaaagagaggtggcaggcatgagccccctgcacccagtggctcgtgtccatactgagtccagaccctgatcaaggcctgacttagtgtcactggcagtcccactaaattacacttccttacactggcccgatgcgacaaatcaggtggctcccttctgtcacgtggagcacacagtgttttccatcatccatagct

SEQ ID NO: 3792 - DNA, 3474 bp, Homo sapiens
aggcctggaggatttaacccaggagagccgctggtgggaggcgcggctggcgccgctgcgcgcatgggcctgttcctggcccgcagccgccacctacccagtgaccatgatagtgtttgtcaggttcaactccagccatggtttcccagtggaggtcgattctgacaccagcatcttccagctcaaggaggtggttgctaagygacagggggttccggctgaccagttgcstgtgattttcgcagggaaggagctgaggaatgactggactgtgcagaattgtgacctggatcagcagagcattgttcacattgtgcagagaccgtggagaaaaggtcaagaaatgaatgmaactggaggcgacgaccccagaaacgcggcgggaggctgtgagcgggagccccagagcttgactcgggtggacctcagcagctcagtcctcccaggagactctgtggggctggctgtcattctgcacactgacagcaggaaggactcaccaccagctggaagtccagcaggtagatcaatctacaacagcttttatgtgtattgcaaaggcccctgtcaaagagtgcagccgggaaawctcagggtacagtgcarcacctgcaggcaggcaacgctcaccttgacccagggtccatcttgctgggatgatgttttaattccaaaccggatgagtggtgaatgccaatccccacactgccctgggactagtgcagaatttttctttaaatgtggagcacaccccacctctgacaaggaaacatcagtagctttgcacctgatcgcaacaaatagtcggaacatcacttgcattacgtgcacagacgtcaggagccccgtcctggttttccagtgcaactcccgccacgtgatttgcttagactgtttccacttatactgwgtgacaagactcaatgatyggcagtttgttcacgaccctcaacttggctactccctgccttgtgtggctggctgtcccaactccttgattaaagagctccatcacttcaggattctgggagaagagcagtacaaccggtaccagcagtatggtgcagaggagtgtgtcctgcagatggrgggcgtgttatgccccygccctggctgtggagcggggctgctgccggagcctgaccagaggaaagtcacctgcgaagggggcaatggcctgggctgtgggtttgccttctgccgggaatgtaaagaagcgtaccatgaaggggagtgcagtgccstatttgaagcctcaggaacaactactcaggcctacagagtcgatgaaagagccgccgagcaggctcgttgggaagcagcctccaaagaaaccatcaagaaaaccamcaagccctgtccccgctgccatgtaccagtggaaaaaaatggaggctgcatgcacatgaagtgtccgcagccccagtgcaggctcgagtggtgctggaactgtggctgcgagtrgaaccgcgtctgcatgggggaccactggttcgacgtgtagccagggcggccgggcrccccatcgccacatcctgggggagcatacccagtgtctaccttcattttctaattctcttttcaaacacacacacacrcgcgcgcgcgcgcacacacactcttcaagtttttttcaaagtccaactacagccaaattgcagaagaaactcctggatccctttcactatgtccatgaaaaacagcagagtaaaattacagaagaagctcctgaatccctttcagtttgtccacacaagacagcagagccatctgcgacaccaccaacaggcgttctcagcctccggatgacacaaataccagagcacagattcaagtgcaatccatgtatctgtatgggtcattctcacctgaattcgagacaggcagaatcagtagctggagagagagttctcacatttaatatcctgccttttaccttcagtaaacaccatgaagatgccattgacaaggtgtttctctgtaaaatgaactgcagtgggttctccaaactagattcatggctttaacagtaatgttcttatttaaattttcagaaagcatctattcccaaagaaccccaggcaatagtcaaaaacatttgtttatccttaagaattccatctatataaatcgcattaatgaaataccaactatgcgtaaatcaacttgtcacaaagtgagaaattatgaaagttaatttgaatgttgaatgtttgaattacagggaagaaatcaagttaatgtactttcattccctttcatgatttgcaactttagaaagaaattgtttttctgaaagtatcaccaaaaaatctatagtttgattctgagtattcattttgcaacttggagattttgctaatacatttggctccactgtaaatttaatagataaagtgcctataaaggaaacacgtttagaaatgatttcaaaatgatattcaatcttaacaaaagtgaacattattaaatcagaatctttaaagaggagcctttccagaactaccaaaatgaagacacgcccgactctctccatcagaagggtttatacccctttggcacaccctctctgtccaatctgcaagtcccagggagctctgcataccaggggttccccaggagagaccttctcttaggacagtaaactcactagaatattccttatgttgacatggattggatttcagttcaatcaaactttcagcttttttttcagccattcacaacacaatcaaaagattaacaacactgcatgcggcaaaccgcatgctcttacccacactacgcagaagagaaagtrcaaccactatcttttgttctacctgtattgtctgacttctcaggaagatcgtgaacataactgagggcatgagtctcactagcacatggaggcccttttggatttagagaytgtaaattattaaatcggcaacagggcttctctttttagatgtagcactgaaatccttgctggagggaagagaggggatgaactcaagttttccacatcctgggacacctgtccctcttttcctaactgcctaagataacccatttcttccaaccatctgaggacagtcccgtcgtctcagaggccctgcaccggggagagactgggctctgcagcagccacatcagcattcacagcttcatgtggcttcactgtctgaaaatctaccgactccaacatggccccacggtgacaacagacctgtgacaggaagcccaaagctcacatagaaatggtggacagatcaaagtctctatagtaagggaaaaaaagagaggtggcaggcatgagccccctgcacccagtggctcgtgtccatactgagtccagaccctgatcaaggcctgacttagtgtcactggcagtcccactaaattacacttccttacactggcccgatgcgacaaatcaggtggctcccttctgtcacgtggagcacacagtgttttccatcatccatagct

SEQ ID NO: 3793 - DNA, 1894 bp, Homo sapiens
gacgtgtatcgctgccgtcaagatggaggggcctttgtccgtgttcggtgaccgcagcactggggaaacgatccgctcccaaaacggcatgcccaagagaatcgtaaatgcaaaaattgcttgccttgacttcagcctgcaaaaaacaaaaatgaagcttggtgtacaggtggtcattacagaccctgaaaaactggaccaaattagacagagagaatcagatatcaccaaggagagaattcagaagatcctggcaactggtgccaatgttattctaaccactggtggaattgatgatatgtgtctgaagtattttgtggaggctggtgctatggcagttagaagagttttaaaaagggaccttaaacgcattgccaaagcttctggagcaactattctgtcaaccctggccaatttggaaggtgaagaaacttttgaagctgcaatgttgggacaggcagaagaagtggtacaggagagaatttgtgatgatgagctgatcttaatcaaaaattgtgtagtgaagagagttttggagtcaaaatctgtggttcccggtgggggtgctgtagaagcagccctttccatataccttgaaaactatgcaaccagcatggggtctcgggaacagcttgcgattgcagagtttgcaagatcacttcttgttattcccaatacactagcagttaatgctgcccaggactccacagatctggttgcaaaattaagagcttttcataatgaggcccaggttaacccagaacgtaaaaatctaaaatggattggtcttgatttgagcaatggtaaacctcgagacaacaaacaagcaggggtgtttgaaccaaccatagttaaagttaagagtttgaaatttgcaacagaagctgcaatcmccattcttcgaattgatgatcttattaaattacatccagaaagtaaagatgataaacatggaagttatgaagatgctgttcactctggagcccttwwtgattgatctgatgttccttttatttataacaatgttaratgcaattgtcttgtaccktgagttgagtattacacattaaagtaaagtacaagctgtaaacttgggtttttgtgatgtaggaaatggtttccatctgtactttggtcctctgatttcacatattgcaacctagtactttattagtttaaaaagaaattgaggttgttcaaagtttaagcaattcattctctctgaacacacattgctattcccatcccacccccaatgcacagggctgcaacaccacgayttctgcccattctctccagtgtgtgtaacagggtcacaagaattcgacagccagatgctccaagagggtggcccaaggctatagcccctccttcaatattgacggtcctattcccataatggaaggctccacacccacttgggaccaggaaactatccgtgctaaaggtgtaagyccacgtttatcagcttctgacttcttcataagaacracagctgcagcaccatcatttattcctgaagcattggctggggtgactgttcccgttccatcagtaagaaagtaaggctttagcttggacatggcttctatgttgctcccatggcgaggaaactcatctgttttaacttcaataagacctyttctagttgacaccaaaactggtacaatctctttgtcaaaatggccagctttctgtgcattctctgtcctgttctgggacagaactgcaaccttgtcctgatcttctctactcacttgccattttttggctacattttcagctgtaatacccatatgacagttgtgaaatgcatctgtaagaccatcacagagtatactgtcagtcagtggcatctcacctatctttactcctgttctcaagtaagccaagt

SEQ ID NO: 3794 - DNA, 2439 bp, Homo sapiens
cctgttgtccctgcctctttttccttcccgccgtgccccgcggccgggccggggcagccgggaagcgggtggggtggtgtgttacccagtakctcctgggacatcgctcgggtacgctccacrycgtcgcagccactgctgtggtcgccggtcgsccgaggggccgcgatactggttgcccgcggtgtaagcagaattcgacgtgtatcgctgccgtcaagatggaggggcctttgtccgtgttcggtgaccgcagcactggggaaacgatccgctcccaaaacgttatggctgcagcttcgattgccaatattgtaaaaagttctcttggtccagttggcttggataaaatgttggtggatgatattggtgatgtaaccattactaacgatggtgcaaccatcctgaagttactggaggtagaacatcctgcagctaaagttctttgtgagctggctgatctgcaagacaaagaagttggagatggaactacttcagtggttattattgcagcagaactcctaaaaaatgcagatgaattagtcaaacagaaaattcatcccacatcagttattagtggctatcgacttgcttgcaaggaagcagtgcgttatatcaatgaaaacctaattgttaacacagatgaactgggaagagattgcctgattaatgctgctaagacatccatgtcttccaaaatcattggaataaatggtgatttctttgctaacatggtagtagatgctgtacttgctattaaatacacagacataagaggccagccacgctatccagtcaactctgttaatattttgaaagcccatgggagaagtcaaatggagagtatgctcatcagtggctatgcactcaactgtgtggtgggatcccagggcatgcccaagagaatcgtaaatgcaaaaattgcttgccttgacttcagcctgcaaaaaacaaaaatgaagcttggtgtacaggtggtcattacagaccctgaaaaactggaccaaattagacagagagaatcagatatcaccaaggagagaattcagaagatcctggcaactggtgccaatgttattctaaccactggtggaattgatgatatgtgtctgaagtattttgtggaggctggtgctatggcagttagaagagttttaaaaagggaccttaaacgcattgccaaagcttctggagcaactattctgtcaaccctggccaatttggaaggtgaagaaacttttgaagctgcaatgttgggacaggcagaagaagtggtacaggagagaatttgtgatgatgagctgatcttaatcaaaaatactaaggctcgtacgtctgcatcgattatcttacgtggggcaaatgatttcatgtgtgatgagatggagcgctctttacatgatgcactttgtgtagtgaagagagttttggagtcaaaatctgtggttcccggtgggggtgctgtagaagcagccctttccatataccttgaaaactatgcaaccagcatggggtctcgggaacagcttgcgattgcagagtttgcaagatcacttcttgttattcccaatacactagcagttaatgctgcccaggactccacagatctggttgcaaaattaagagcttttcataatgaggcccaggttaacccagaacgtaaaaatctaaaatggattggtcttgatttgagcaatggtaaacctcgagacaacaaacaagcaggggtgtttgaaccaaccatagttaaagttaagagtttgaaatttgcaacagaagctgcaatcmccattcttcgaattgatgatcttattaaattacatccagaaagtaaagatgataaacatggaagttatgaagatgctgttcactctggagcccttwwtgattgatctgatgttccttttatttataacaatgttaratgcaattgtcttgtaccktgagttgagtattacacattaaagtaaagtacaagctgtaaacttgggtttttgtgatgtaggaaatggtttccatctgtactttggtcctctgatttcacatattgcaacctagtactttattagtttaaaaagaaattgaggttgttcaaagtttaagcaattcattctctctgaacacacattgctattcccatcccacccccaatgcacagggctgcaacaccacgayttctgcccattctctccagtgtgtgtaacagggtcacaagaattcgacagccagatgctccaagagggtggcccaaggctatagcccctccttcaatattgacctarcgggggagaaaagatttagattgtttattcttctgtggacacagtttaaaatcttaaacttgtctttttcctcttaatgtatcagcatgctaccctttcaaactcaaattttcattttaactgcttaggaataaatttacacctttgtgaaaattca

SEQ ID NO: 3795 - DNA, 2789 bp, Homo sapiens
cctgttgtccctgcctctttttccttcccgccgtgccccgcggccgggccggggcagccgggaagcgggtggggtggtgtgttacccagtakctcctgggacatcgctcgggtacgctccacrycgtcgcagccactgctgtggtcgccggtcgsccgaggggccgcgatactggttgcccgcggtgtaagcagaattcgacgtgtatcgctgccgtcaagatggaggggcctttgtccgtgttcggtgaccgcagcactggggaaacgatccgctcccaaaacgttatggctgcagcttcgattgccaatattgtaaaaagttctcttggtccagttggcttggataaaatgttggtggatgatattggtgatgtaaccattactaacgatggtgcaaccatcctgaagttactggaggtagaacatcctgcagctaaagttctttgtgagctggctgatctgcaagacaaagaagttggagatggaactacttcagtggttattattgcagcagaactcctaaaaaatgcagatgaattagtcaaacagaaaattcatcccacatcagttattagtggctatcgacttgcttgcaaggaagcagtgcgttatatcaatgaaaacctaattgttaacacagatgaactgggaagagattgcctgattaatgctgctaagacatccatgtcttccaaaatcattggaataaatggtgatttctttgctaacatggtagtagatgctgtacttgctattaaatacacagacataagaggccagccacgctatccagtcaactctgttaatattttgaaagcccatgggagaagtcaaatggagagtatgctcatcagtggctatgcactcaactgtgtggtgggatcccagggcatgcccaagagaatcgtaaatgcaaaaattgcttgccttgacttcagcctgcaaaaaacaaaaatgaagcttggtgtacaggtggtcattacagaccctgaaaaactggaccaaattagacagagagaatcagatatcaccaaggagagaattcagaagatcctggcaactggtgccaatgttattctaaccactggtggaattgatgatatgtgtctgaagtattttgtggaggctggtgctatggcagttagaagagttttaaaaagggaccttaaacgcattgccaaagcttctggagcaactattctgtcaaccctggccaatttggaaggtgaagaaacttttgaagctgcaatgttgggacaggcagaagaagtggtacaggagagaatttgtgatgatgagctgatcttaatcaaaaatactaaggctcgtacgtctgcatcgattatcttacgtggggcaaatgatttcatgtgtgatgagatggagcgctctttacatgatgcactttgtgtagtgaagagagttttggagtcaaaatctgtggttcccggtgggggtgctgtagaagcagccctttccatataccttgaaaactatgcaaccagcatggggtctcgggaacagcttgcgattgcagagtttgcaagatcacttcttgttattcccaatacactagcagttaatgctgcccaggactccacagatctggttgcaaaattaagagcttttcataatgaggcccaggttaacccagaacgtaaaaatctaaaatggattggtcttgatttgagcaatggtaaacctcgagacaacaaacaagcaggggtgtttgaaccaaccatagttaaagttaagagtttgaaatttgcaacagaagctgcaatcmccattcttcgaattgatgatcttattaaattacatccagaaagtaaagatgataaacatggaagttatgaagatgctgttcactctggagcccttwwtgattgatctgatgttccttttatttataacaatgttaratgcaattgtcttgtaccktgagttgagtattacacattaaagtaaagtacaagctgtaaacttgggtttttgtgatgtaggaaatggtttccatctgtactttggtcctctgatttcacatattgcaacctagtactttattagtttaaaaagaaattgaggttgttcaaagtttaagcaattcattctctctgaacacacattgctattcccatcccacccccaatgcacagggctgcaacaccacgayttctgcccattctctccagtgtgtgtaacagggtcacaagaattcgacagccagatgctccaagagggtggcccaaggctatagcccctccttcaatattgacggtcctattcccataatggaaggctccacacccacttgggaccaggaaactatccgtgctaaaggtgtaagyccacgtttatcagcttctgacttcttcataagaacracagctgcagcaccatcatttattcctgaagcattggctggggtgactgttcccgttccatcagtaagaaagtaaggctttagcttggacatggcttctatgttgctcccatggcgaggaaactcatctgttttaacttcaataagacctyttctagttgacaccaaaactggtacaatctctttgtcaaaatggccagctttctgtgcattctctgtcctgttctgggacagaactgcaaccttgtcctgatcttctctactcacttgccattttttggctacattttcagctgtaatacccatatgacagttgtgaaatgcatctgtaagaccatcacagagtatactgtcagtcagtggcatctcacctatctttactcctgttctcaagtaagccaagt

SEQ ID NO: 3796 - DNA, 291 bp, Homo sapiens
atgatggtccgcgccgccgagacgatgaccacaggatctgagcctgcattcatcttgcttctcctgccgccgtctgccctgcgctgcctgcaagctaggcaaagctcctcctcgcagcccacaggcctgccgcgggcgggacctgagctcaggactggaatcccacgggcgagaatctcgagtgcgagcccggcccgcrgcgggtctcagcacagctctgatgggtccttttgctctcggcggcttcgggaggtcctatgcgtttctcctggcgccagtcattcgctcgcg

SEQ ID NO: 3797 - DNA, 1926 bp, Homo sapiens
ccgaggtcgtccccggcaccggaagtgaccctggcgggtttgtcttcaaattctcggcgagcaggagccgcgccggcaggtggtgttgacgattgaactgggcagtactggggccgtgagcggagagcaaagtgggctggactgggtcaggccctccttcctcgctgccgggatctccactccgccaatcccctgtgcctggcgttgggcggtttcccgaggagcttgggccgccgcaggtgatgtttctttttttcttcttctttttagcttacagttgaacatgagtcttcttatgattagtgagaatgtaaaattggctcgtgaatatgcattgctgggaaactatgactctgcgatggtctattatcagggagttcttgaccaaatgaacaagtatctgtactcagtcaaagatacatacctccagcagaaatggcaacaggtttggcaggaaataaatgtggaagctaaacatgttaaagatatcatgaaaacactagagagctttaaactrgacagcactcccttgaaagcggcacagcatgaccttccagcttctgagggagaagtctggtccatgcctgtacctgttgaacgaagaccctcaccaggacctagaaaacgccaatcttctcagtacagtgaccctaaatcacatggtaatcgtccaagtacaactgtcagagttcaccgttcatctgcacagaatgttcacaatgacagagggaaagctgttcgttgtcgtgaaaagaaagaacagaataaaggaagagaggaaaagaacaaatcacctgctgcagtaacagaaccagagacaaataaatttgatagtaccggatatgataaagacttagtagaagctttggaaagagatataatttcccagaatcccaatgttcgatgggatgatatcgctgatttagtagaagctaaaaagttgcttaaggaagccgtagtgttaccaatgtggatgcccgaattctttaagggcattaggagaccatggaaaggagtactgatggtcggcccacctggcacggggaagacgctccttgctaaagcagtagctacagaatgcaagacaacattcttcaatgtctcttcatcaactttgacttccaaatacagaggagaatctgagaagcttgttcgtcttctgtttgaaatggctcgattttattctccagccaccatatttattgatgagatagactccatctgtagtcgccgagggacttctgaagaacatgaagcaagcagaagggtgaaagcggagctgctggttcagatggatggtgttggaggtacttctgaaaatgatgacccttccaaaatggttatggttctggcagctactaattttccctgggatatagatgaggctttaagacgacgccttgagaaacgaatctatattcctttgccgtcagcaaaaggcagggaggagctattacgaataagtctacgtgagttggaattggctgatgatgttgaccttgcaagtatagcagaaaacatggaaggttattcaggtgcggacattaccaacgtgtgcagggatgcgtccttgatggcaatgagaaggcgcattgaaggtttgactccagaggaaatccgaaatctttccaaagaagaaatgcacatgcctacaactatggaggatttcgagatggctttaaaaaaggtttctaagtcagtgtctgctgcagacattgaaagatacgagaaatggatatttgagtttggatcatgctaaattctcacatgtaaactgtgagaaatgtgccttaagtgtttgaatattaaatgcagtaattcattgtactgagtgctatattttttttaactttcataatggtaagatttttttwaaaaaacccttatgattctgaataaaggcaatatttttaagctgaaaatttg

SEQ ID NO: 3798 - DNA, 1728 bp, Homo sapiens
acctgacctcggtgtgtgtgtgagtgtggtgaaaatcaagtgggagggaaagtgagcaagcacctgaacaagcttacagttgaacatgagtcttcttatgattagtgagaatgtaaaattggctcgtgaatatgcattgctgggaaactatgactctgcgatggtctattatcagggagttcttgaccaaatgaacaagtatctgtactcagtcaaagatacatacctccagcagaaatggcaacaggtttggcaggaaataaatgtggaagctaaacatgttaaagatatcatgaaaacactagagagctttaaactrgacagcactcccttgaaagcggcacagcatgaccttccagcttctgagggagaagtctggtccatgcctgtacctgttgaacgaagaccctcaccaggacctagaaaacgccaatcttctcagtacagtgaccctaaatcacatggtaatcgtccaagtacaactgtcagagttcaccgttcatctgcacagaatgttcacaatgacagagggaaagctgttcgttgtcgtgaaaagaaagaacagaataaaggaagagaggaaaagaacaaatcacctgctgcagtaacagaaccagagacaaataaatttgatagtaccggatatgataaagacttagtagaagctttggaaagagatataatttcccagaatcccaatgttcgatgggatgatatcgctgatttagtagaagctaaaaagttgcttaaggaagccgtagtgttaccaatgtggatgcccgaattctttaagggcattaggagaccatggaaaggagtactgatggtcggcccacctggcacggggaagacgctccttgctaaagcagtagctacagaatgcaagacaacattcttcaatgtctcttcatcaactttgacttccaaatacagaggagaatctgagaagcttgttcgtcttctgtttgaaatggctcgattttattctccagccaccatatttattgatgagatagactccatctgtagtcgccgagggacttctgaagaacatgaagcaagcagaagggtgaaagcggagctgctggttcagatggatggtgttggaggtacttctgaaaatgatgacccttccaaaatggttatggttctggcagctactaattttccctgggatatagatgaggctttaagacgacgccttgagaaacgaatctatattcctttgccgtcagcaaaaggcagggaggagctattacgaataagtctacgtgagttggaattggctgatgatgttgaccttgcaagtatagcagaaaacatggaaggttattcaggtgcggacattaccaacgtgtgcagggatgcgtccttgatggcaatgagaaggcgcattgaaggtttgactccagaggaaatccgaaatctttccaaagaagaaatgcacatgcctacaactatggaggatttcgagatggctttaaaaaaggtttctaagtcagtgtctgctgcagacattgaaagatacgagaaatggatatttgagtttggatcatgctaaattctcacatgtaaactgtgagaaatgtgccttaagtgtttgaatattaaatgcagtaattcattgtactgagtgctatattttttttaactttcataatggtaagatttttttwaaaaaacccttatgattctgaataaaggcaatatttttaagctgaaaatttg

SEQ ID NO: 3799 - DNA, 1606 bp, Homo sapiens
acctgacctcggtgtgtgtgtgagtgtggtgaaaatcaagtgggagggaaagtgagcaagcacctgaacaagcttacagttgaacatgagtcttcttatgattagtgagaatgtaaaattggctcgtgaatatgcattgctgggaaactatgactctgcgatggtctattatcagggagttcttgaccaaatgaacaagtatctgtactcagtcaaagatacatacctccagcagaaatggcaacaggtttggcaggaaataaatgtggaagctaaacatgttaaagatatcatgaaaacactagagagctttaaactrgacagcactcccttgaaagcggcacagcatgaccttccagcttctgagggagaagtctggtccatgcctgtacctgttgaacgaagaccctcaccaggacctagaaaacgccaatcttctcagtacagtgaccctaaatcacatggtaatcgtccaagtacaactgtcagagttcaccgttcatctgcacagaatgttcacaatgacagagggaaagctgttcgttgtcgtgaaaagaaagaacagaataaaggaagagaggaaaagggatgatatcgctgatttagtagaagctaaaaagttgcttaaggaagccgtagtgttaccaatgtggatgcccgaattctttaagggcattaggagaccatggaaaggagtactgatggtcggcccacctggcacggggaagacgctccttgctaaagcagtagctacagaatgcaagacaacattcttcaatgtctcttcatcaactttgacttccaaatacagaggagaatctgagaagcttgttcgtcttctgtttgaaatggctcgattttattctccagccaccatatttattgatgagatagactccatctgtagtcgccgagggacttctgaagaacatgaagcaagcagaagggtgaaagcggagctgctggttcagatggatggtgttggaggtacttctgaaaatgatgacccttccaaaatggttatggttctggcagctactaattttccctgggatatagatgaggctttaagacgacgccttgagaaacgaatctatattcctttgccgtcagcaaaaggcagggaggagctattacgaataagtctacgtgagttggaattggctgatgatgttgaccttgcaagtatagcagaaaacatggaaggttattcaggtgcggacattaccaacgtgtgcagggatgcgtccttgatggcaatgagaaggcgcattgaaggtttgactccagaggaaatccgaaatctttccaaagaagaaatgcacatgcctacaactatggaggatttcgagatggctttaaaaaaggtttctaagtcagtgtctgctgcagacattgaaagatacgagaaatggatatttgagtttggatcatgctaaattctcacatgtaaactgtgagaaatgtgccttaagtgtttgaatattaaatgcagtaattcattgtactgagtgctatattttttttaactttcataatggtaagatttttttwaaaaaacccttatgattctgaataaaggcaatatttttaagctgaaaatttg

SEQ ID NO: 3800 - DNA, 1683 bp, Homo sapiens
tgtttctttttttcttcttctttttagcttacagttgaacatgagtcttcttatgattagtgagaatgtaaaattggctcgtgaatatgcattgctgggaaactatgactctgcgatggtctattatcagggagttcttgaccaaatgaacaagtatctgtactcagtcaaagatacatacctccagcagaaatggcaacaggtttggcaggaaataaatgtggaagctaaacatgttaaagatatcatgaaaacactagagagctttaaactrgacagcactcccttgaaagcggcacagcatgaccttccagcttctgagggagaagtctggtccatgcctgtacctgttgaacgaagaccctcaccaggacctagaaaacgccaatcttctcagtacagtgaccctaaatcacatggtaatcgtccaagtacaactgtcagagttcaccgttcatctgcacagaatgttcacaatgacagagggaaagctgttcgttgtcgtgaaaagaaagaacagaataaaggaagagaggaaaagaacaaatcacctgctgcagtaacagaaccagagacaaataaatttgatagtaccggatatgataaagacttagtagaagctttggaaagagatataatttcccagaatcccaatgttcgatgggatgatatcgctgatttagtagaagctaaaaagttgcttaaggaagccgtagtgttaccaatgtggatgcccgaattctttaagggcattaggagaccatggaaaggagtactgatggtcggcccacctggcacggggaagacgctccttgctaaagcagtagctacagaatgcaagacaacattcttcaatgtctcttcatcaactttgacttccaaatacagaggagaatctgagaagcttgttcgtcttctgtttgaaatggctcgattttattctccagccaccatatttattgatgagatagactccatctgtagtcgccgagggacttctgaagaacatgaagcaagcagaagggtgaaagcggagctgctggttcagatggatggtgttggaggtacttctgaaaatgatgacccttccaaaatggttatggttctggcagctactaattttccctgggatatagatgaggctttaagacgacgccttgagaaacgaatctatattcctttgccgtcagcaaaaggcagggaggagctattacgaataagtctacgtgagttggaattggctgatgatgttgaccttgcaagtatagcagaaaacatggaaggttattcaggtgcggacattaccaacgtgtgcagggatgcgtccttgatggcaatgagaaggcgcattgaaggtttgactccagaggaaatccgaaatctttccaaagaagaaatgcacatgcctacaactatggaggatttcgagatggctttaaaaaaggtttctaagtcagtgtctgctgcagacattgaaagatacgagaaatggatatttgagtttggatcatgctaaattctcacatgtaaactgtgagaaatgtgccttaagtgtttgaatattaaatgcagtaattcattgtactgagtgctatattttttttaactttcataatggtaagatttttttwaaaaaacccttatgattctgaataaaggcaatatttttaagctgaaaatttg

SEQ ID NO: 3801 - DNA, 6132 bp, Homo sapiens
tcttgactaacaggagcagcctccgccgagcatggagagctgccgccgcggccggccggcgacgctggcgacgctttcgcccctgaggtagtttggcgaccgcgaagaaggaaaaagggcgggcgggcggctgtcctctcaccgtcctcaccccgcgaggcccggcccgctcctccgtcgtggatttcgcggcgatccccccggcagctctttgcaaagctgcttgaaacttctcccaaactcggcatggatacgactgcggcggcggcgctgcctgcttttgtggcgctcttgctcctctctccttggcctctcctgggatcggcccaaggccagttctccgcagttttcagtgtctgtgcttgtggtcggtaacttttgctgctgttgttctgctgctgtctgccattccattcgccatctatcacgcacacagaaccctggccaggatcatgaagggcgattgaaaaggtggctgtacttttgatgatggtccaggggcctgtgattaccaccaggatctgtatgatgactttgaatgggtgcatgttagtgctcaagagcctcattatctaccacccgagatgccccaaggttcctatatgatagtggactcttcagatcacgaccctggagaaaaagccagacttcagctgcctacaatgaaggagaacgacactcactgcattgatttcagttacctattatatagccagaaaggactgaatcctggcactttgaacatattagttagggtgaataaaggacctcttgccaatccaatttggaatgtgactggattcackggtagagattggcttcgggctgagctagcagtgagcaccttttggcccaatgaatatcaggtaatatttgaagctgaagtctcaggagggagaagtggttatattgccattgatgacatccaagtactgagttatccttgtgataaatctcctcatttcctccgtctaggggatgtagaggtgaatgcagggcaaaacgctacatttcagtgcattgccacagggagagatgctgtgcataacaagttatggctccagagacgaaatggagaagatataccagtagcccagactaagaacatcaatcatagaaggtttgccgcttccttcagattgcaagaagtgacaaaaactgaccaggatttgtatcgctgtgtaactcagtcagaacgaggttcyggtgtgtccaattttgctcaacttattgtgagagaaccgccaagacccattgctcctcctcagcttcttggtgttgggcctacatatttgctgatccaactaaatgccaactcgatcattggcgatggtcctatcatcctgaaagaagtagagtaccgaatgacatcaggatcctggacagaaacccatgcagtcaatgctccaacttacaaattatggcatttagatccagataccgaatatgagatccgagttctacttacaagacctggtgaaggtggaacggggctcccaggacctccactaatcaccagaacaaaatgtgcagaacctatgagaaccccaaagacattaaagattgctgaaatacaggcaagacggattgctgtggactgggaatccttgggttacaacattacgcgttgccacacttttaatgtcactatctgctaccattacttccgtggtcacaacgagagcaaggcagactgtttggacatggaccccaaagcccctcagcatgttgtgaaccatctgccaccttatacaaatgtcagcctcaagatgatcctaaccaatccagagggaaggaaggagagtgaagagacaattattcaaactgatgaagatgtgcctggtcccgtaccagtaaaatctcttcaaggaacatcctttgaaaataagatcttcttgaactggaaagaacctttggatccaaatggaatyatcactcaatatgagatcagctatagcagtataagatcatttgatcctgcagttccagtggctggacctccccagactgtatcaaatttatggaacagtacacaccatgtctttatgcatctccaccctggaaccacgtaccagtttttcataagagccagcacggtcaaaggctttggtccagccacagccatcaatgtcaccaccaatatctcagctccaactttacctgactatgaaggagttgatgcctctctcaatgaaactgccaccacaataactgtattgttgagaccagcacaagccaaaggtgctcctatcagtgcttatcagattgttgtggaagaactgcacccacaccgaaccaagagagaagccggagccatggaatgctaccaggtkcctgtcacataccaaaatgccatgagtgggggtgcaccgtattactttgctgcagaactmcccccgggaaacctacctgagcctgccccgttcactgtgggtgacaatcggacctaccaaggcttttggaacccwcctttggctccgcgcaaaggatacaacatctatttccaggcgatgagcagtgtggagaaggaaactaaaacccagtgcgtacgcattgctacaaaagcagcagcaacagaagaaccagaagtgatcccagatcccgccaagcagacagacagagtggtgaaaatagcaggaattagtgctggaattttggtgttcatcctccttctcctagttgtcatattaattgtaaaaaagagcaaacttgctaaaaaacgcaaagatgccatggggaatacccggcaggagatgactcacatggtgaatgcaatggatcgaagttatgctgatcagagcactctgcatgcagaagatcctctttccatcaccttcatggaccaacataactttagtccaagattgcccaatgatccacttgtaccgactgctgtgttagatgagaaccacagtgctacagcagagtccagtcgccttctagacgtacctcgctacctctgtgaggggacggaatccccttaccagacaggacagctgcatccagccatcagggtagctgatttactgcagcacattaatctcatgaagacatcagacagctatgggttcaaagaggaatatgagagcttttttgaaggacagtcagcatcttgggatgtagctaaaaaagatcaaaatagagcaaaaaaccgatatggaaacattatagcatatgatcactccagagtgattttgcaacccgtagaggatgatccttcctcagattatattaatgccaactatattgatatttggctgtacagggatggctaccagagaccaagtcattacattgcaacccaaggtcccgttcatgaaacagtgtatgatttctggaggatgatttggcaagaacaatctgcttgcattgtgatggttacaaatttagttgaggttggccgggttaaatgctataaatattggcctgatgatactgaagtttatggtgacttcaaagtaacgtgtgtagaaatggaaccacttgctgaatatgtagttaggacattcaccctggaaaggagggggtacaatgaaatccgtgaagttaaacagttccatttcacgggctggcctgaccatggagtgccctaccatgctacagggctgctttcctttatccggcgagtcaagttatcaaaccctcccagtgctggccccatcgttgtacattgcagtgctggtgctggacgaactggctgctacattgtgattgacatcatgctagacatggctgaaagagagggtgttgttgatatttacaattgtgtcaaagccttaagatctcggcgtattaatatggtccagacagaggaacagtacatttttattcatgatgccattttagaagcctgcttatgtggagaaactgccatacctgtctgtgaatttaaagctgcatattttgatatgattagaatagactcccagactaactcttcacatctcaaggatgaatttcagactctgaattcagtcacscctcgactacaagctgaagactgcagtatagcgtgcctgccaaggaaccatgacaagaaccgtttcatggacatgctgccacctgacagatgtctgccttttttaattacaattgatggggagagcagtaactacatcaatgctgctcttatggacagctacaggcaaccagctgctttcatcgtcacacaataccctctgccaaacactgtaaaagacttctggagattagtgtatgattatggctgtacctccattgtgatgttaaacgaagtcgacttgtcccagggctgccctcagtactggccagaggaagggatgctacgatatggccccatccaagtggaatgtatgtcttgttcaatggactgtgatgtgatcaaccggatttttaggatatgcaatctaacaagaccacaggaaggttatctgatggtgcaacagtttcagtacctaggatgggcttctcatcgagaagtgcctggatccaaaaggtcattcttgaaactgatacttcaggtggaaaagtggcaggaggaatgcgaggaaggggaaggccggacgattatccactgcctaaatggtggcgggcgaagtggcatgttctgtgctataggcatcgttgttgaaatggtgaaacggcaaaatgttgtcgatgttttccatgcagtaaagacactgaggaacagcaagccaaacatggtggaagccccggagcaataccgtttctgctatgatgtagctttggagtacctggaatcatcttagttgggtgagactctttaaagtgcatccatgaagaaacctgtccatctrttgagccagcagctgttgtacctgttacacttgtgcagaaagattttaatgtggggggtgggagacttttacatttgagaggtaaaagtattttttttatgaagttgtgtatcttaataaaaaggactgaattagtttttattctatataaagcatcaacatttcatgccacaaacatgccaccttttttctcatggtttcagtagagcagctaccacatgttgcatgagttcatacttyctacgtggcatttttctccctttctaaaatgaaagctgatgaatcttaaaaggaagaagaaaagaaaagctgtgcaaattcatagtaaagttcgttttttatatgtttccagtgtagcagatctctatataaatatataaatatatataactggcttattttcttttaatgtgcaatgatggctggatcatttaaagttctttttagaaaataacataagccaaagactcaagtgtaaatatgtctatatggagaaagcacattatatttattggttacttacattccttttttgatggctaaaatastaccaccacacaatcatcttttttttcctgaagaaagctttttctttagctaaaatcaattgtaaacgatttttgtagattattttttgtatgttttagtgtaagtagaagataaactttttattcataaaccaggaagcaatgttctttatagtgattctcttgtgtacatgcttgtgaattaaatttgtgtaaaatcccttggcaattgggtcttttaatataggaccaaattaaaacattttgctgaatatgtatagtttttcmcaatttcattaggtaaataatggtttggtgatcatacatgagaaatgtacacattaaaaggccttgctgacaacttgcacaatgttgaacatagcctttaagcatcatttaaattttaaaggaatggagtttttcagcctgtggcccagcactggtcaagaaaacaagatggcaacatatatgctttcagggtyaaatttgagcaaactgtaaactgtcagggtgataaaatgtttctcttgatgtttacatgcacaagctttgcrttctgactataaaaagtgtgaacaaatcaatgccagattcctgttttgygcattgtcatgggattcttaagtgaacctttctaaatgtggtcttgttcacatgctccacgtagctgtaacttcacatcatcagcttgcagtttgtaattgactaaagcattccagtgtcctctttctagattgccagctcatgacatggtgcttataaagatttaattaaagtaagaatgaaataaagtttttataattataaca

SEQ ID NO: 3802 - DNA, 5008 bp, Homo sapiens
tcttgactaacaggagcagcctccgccgagcatggagagctgccgccgcggccggccggcgacgctggcgacgctttcgcccctgaggtagtttggcgaccgcgaagaaggaaaaagggcgggcgggcggctgtcctctcaccgtcctcaccccgcgaggcccggcccgctcctccgtcgtggatttcgcggcgatccccccggcagctctttgcaaagctgcttgaaacttctcccaaactcggcatggatacgactgcggcggcggcgctgcctgcttttgtggcgctcttgctcctctctccttggcctctcctgggatcggcccaaggccagttctccgcagttttcagtgtctgtgcttgtggtcggtaacttttgctgctgttgttctgctgctgtctgccattccattcgccatctatcacgcacacagaaccctggccaggatcatgaagggcgattgaaaaggtggctgtacttttgatgatggtccaggggcctgtgattaccaccaggatctgtatgatgactttgaatgggtgcatgttagtgctcaagagcctcattatctaccacccgagatgccccaaggttcctatatgatagtggactcttcagatcacgaccctggagaaaaagccagacttcagctgcctacaatgaaggagaacgacactcactgcattgatttcagttacctattatatagccagaaaggactgaatcctggcactttgaacatattagttagggtgaataaaggacctcttgccaatccaatttggaatgtgactggattcackggtagagattggcttcgggctgagctagcagtgagcaccttttggcccaatgaatatcaggtaatcatctgtacttttctgktgtatgttttgatgycatcagttctcactatatgtgtaatacatagatgtaaatatgcatctcatggtaatgagagattgccctcttgcctcccccacccccattattggggaagtgtcatacatagatatacatatgcatcccatggagggagaagtggttatattgccattgatgacatccaagtactgagttatccttgtgataaatctcctcatttcctccgtctaggggatgtagaggtgaatgcagggcaaaacgctacatttcagtgcattgccacagggagagatgctgtgcataacaagttatggctccagagacgaaatggagaagatataccagtagcccagactaagaacatcaatcatagaaggtttgccgcttccttcagattgcaagaagtgacaaaaactgaccaggatttgtatcgctgtgtaactcagtcagaacgaggttcyggtgtgtccaattttgctcaacttattgtgagagaaccgccaagacccattgctcctcctcagcttcttggtgttgggcctacatatttgctgatccaactaaatgccaactcgatcattggcgatggtcctatcatcctgaaagaagtagagtaccgaatgacatcaggatcctggacagaaacccatgcagtcaatgctccaacttacaaattatggcatttagatccagataccgaatatgagatccgagttctacttacaagacctggtgaaggtggaacggggctcccaggacctccactaatcaccagaacaaaatgtgcagaacctatgagaaccccaaagacattaaagattgctgaaatacaggcaagacggattgctgtggactgggaatccttgggttacaacattacgcgttgccacacttttaatgtcactatctgctaccattacttccgtggtcacaacgagagcaaggcagactgtttggacatggaccccaaagcccctcagcatgttgtgaaccatctgccaccttatacaaatgtcagcctcaagatgatcctaaccaatccagagggaaggaaggagagtgaagagacaattattcaaactgatgaagatgtgcctggtcccgtaccagtaaaatctcttcaaggaacatcctttgaaaataagatcttcttgaactggaaagaacctttggatccaaatggaatyatcactcaatatgagatcagctatagcagtataagatcatttgatcctgcagttccagtggctggacctccccagactgtatcaaatttatggaacagtacacaccatgtctttatgcatctccaccctggaaccacgtaccagtttttcataagagccagcacggtcaaaggctttggtccagccacagccatcaatgtcaccaccaatatctcagctccaactttacctgactatgaaggagttgatgcctctctcaatgaaactgccaccacaataactgtattgttgagaccagcacaagccaaaggtgctcctatcagtgcttatcagattgttgtggaagaactgcacccacaccgaaccaagagagaagccggagccatggaatgctaccaggtkcctgtcacataccaaaatgccatgagtgggggtgcaccgtattactttgctgcagaactmcccccgggaaacctacctgagcctgccccgttcactgtgggtgacaatcggacctaccaaggcttttggaacccwcctttggctccgcgcaaaggatacaacatctatttccaggcgatgagcagtgtggagaaggaaactaaaacccagtgcgtacgcattgctacaaaagcagcagcaacagaagaaccagaagtgatcccagatcccgccaagcagacagacagagtggtgaaaatagcaggaattagtgctggaattttggtgttcatcctccttctcctagttgtcatattaattgtaaaaaagagcaaacttgctaaaaaacgcaaagatgccatggggaatacccggcaggagatgactcacatggtgaatgcaatggatcgaagttatgctgatcagagcactctgcatgcagaagatcctctttccatcaccttcatggaccaacataactttagtccaagatatgagaaccacagtgctacagcagagtccagtcgccttctagacgtacctcgctacctctgtgaggggacggaatccccttaccagacaggacagctgcatccagccatcagggtagctgatttactgcagcacattaatctcatgaagacatcagacagctatgggttcaaagaggaatatgagagcttttttgaaggacagtcagcatcttgggatgtagctaaaaaagatcaaaatagagcaaaaaaccgatatggaaacattatagcatattatattaatgccaactatattgatggctaccagagaccaagtcattacattgcaacccaaggtcccgttcatgaaacagtgtatgatttctggaggatgatttggcaagaacaatctgcttgcattgtgatggttacaaatttagttgaggttggccgggttaaatgctataaatattggcctgatgatactgaagtttatggtgacttcaaagtaacgtgtgtagaaatggaaccacttgctgaatatgtagttaggacattcaccctggaaaggagggggtacaatgaaatccgtgaagttaaacagttccatttcacgggctggcctgaccatggagtgccctaccatgctacagggctgctttcctttatccggcgagtcaagttatcaaaccctcccagtgctggccccatcgttgtacattgcagtgctggtgctggacgaactggctgctacattgtgattgacatcatgctagacatggctgaaagagagggtgttgttgatatttacaattgtgtcaaagccttaagatctcggcgtattaatatggtccagacagaggaacagtacatttttattcatgatgccattttagaagcctgcttatgtggagaaactgccatacctgtctgtgaatttaaagctgcatattttgatatgattagaatagactcccagactaactcttcacatctcaaggatgaatttcagactctgaattcagtcacscctcgactacaagctgaagactgcagtatagcgtgcctgccaaggaaccatgacaagaaccgtttcatggacatgctgccacctgacagatgtctgccttttttaattacaattgatggggagagcagtaactacatcaatgctgctcttatggacagctacaggcaaccagctgctttcatcgtcacacaataccctctgccaaacactgtaaaagacttctggagattagtgtatgattatggctgtacctccattgtgatgttaaacgaagtcgacttgtcccagggctgccctcagtactggccagaggaagggatgctacgatatggccccatccaagtggaatgtatgtcttgttcaatggactgtgatgtgatcaaccggatttttaggatatgcaatctaacaagaccacaggaaggttatctgatggtgcaacagtttcagtacctaggatgggcttctcatcgagaagtgcctggatccaaaaggtcattcttgaaactgatacttcaggtggaaaagtggcaggaggaatgcgaggaaggggaaggccggacgattatccactgcctaaatggtggcgggcgaagtggcatgttctgtgctataggcatcgttgttgaaatggtgaaacggcaaaatgttgtcgatgttttccatgcagtaaagacactgaggaacagcaagccaaacatggtggaagccccggagcaataccgtttctgctatgatgtagctttggagtacctggaatcatcttagttgggtgagactctttaaagtgcatccatgaagaaacctgtccatctrttgagccagcagctgttgtacctgttacacttgtgcagaaagattttaatgtggggggtgggagacttttacatttgagaggtaaaagtattttttttatgaagttgtgtatcttaataaaaaggactgaattagtttttattctatataaagcatcaacatttcatgccaca

SEQ ID NO: 3803 - DNA, 6249 bp, Homo sapiens
tcttgactaacaggagcagcctccgccgagcatggagagctgccgccgcggccggccggcgacgctggcgacgctttcgcccctgaggtagtttggcgaccgcgaagaaggaaaaagggcgggcgggcggctgtcctctcaccgtcctcaccccgcgaggcccggcccgctcctccgtcgtggatttcgcggcgatccccccggcagctctttgcaaagctgcttgaaacttctcccaaactcggcatggatacgactgcggcggcggcgctgcctgcttttgtggcgctcttgctcctctctccttggcctctcctgggatcggcccaaggccagttctccgcagttttcagtgtctgtgcttgtggtcggtaacttttgctgctgttgttctgctgctgtctgccattccattcgccatctatcacgcacacagaaccctggccaggatcatgaagggcgattgaaaaggtggctgtacttttgatgatggtccaggggcctgtgattaccaccaggatctgtatgatgactttgaatgggtgcatgttagtgctcaagagcctcattatctaccacccgagatgccccaaggttcctatatgatagtggactcttcagatcacgaccctggagaaaaagccagacttcagctgcctacaatgaaggagaacgacactcactgcattgatttcagttacctattatatagccagaaaggactgaatcctggcactttgaacatattagttagggtgaataaaggacctcttgccaatccaatttggaatgtgactggattcackggtagagattggcttcgggctgagctagcagtgagcaccttttggcccaatgaatatcaggtaatcatctgtacttttctgktgtatgttttgatgycatcagttctcactatatgtgtaatacatagatgtaaatatgcatctcatggtaatgagagattgccctcttgcctcccccacccccattattggggaagtgtcatacatagatatacatatgcatcccatggagggagaagtggttatattgccattgatgacatccaagtactgagttatccttgtgataaatctcctcatttcctccgtctaggggatgtagaggtgaatgcagggcaaaacgctacatttcagtgcattgccacagggagagatgctgtgcataacaagttatggctccagagacgaaatggagaagatataccagtagcccagactaagaacatcaatcatagaaggtttgccgcttccttcagattgcaagaagtgacaaaaactgaccaggatttgtatcgctgtgtaactcagtcagaacgaggttcyggtgtgtccaattttgctcaacttattgtgagagaaccgccaagacccattgctcctcctcagcttcttggtgttgggcctacatatttgctgatccaactaaatgccaactcgatcattggcgatggtcctatcatcctgaaagaagtagagtaccgaatgacatcaggatcctggacagaaacccatgcagtcaatgctccaacttacaaattatggcatttagatccagataccgaatatgagatccgagttctacttacaagacctggtgaaggtggaacggggctcccaggacctccactaatcaccagaacaaaatgtgcagaacctatgagaaccccaaagacattaaagattgctgaaatacaggcaagacggattgctgtggactgggaatccttgggttacaacattacgcgttgccacacttttaatgtcactatctgctaccattacttccgtggtcacaacgagagcaaggcagactgtttggacatggaccccaaagcccctcagcatgttgtgaaccatctgccaccttatacaaatgtcagcctcaagatgatcctaaccaatccagagggaaggaaggagagtgaagagacaattattcaaactgatgaagatgtgcctggtcccgtaccagtaaaatctcttcaaggaacatcctttgaaaataagatcttcttgaactggaaagaacctttggatccaaatggaatyatcactcaatatgagatcagctatagcagtataagatcatttgatcctgcagttccagtggctggacctccccagactgtatcaaatttatggaacagtacacaccatgtctttatgcatctccaccctggaaccacgtaccagtttttcataagagccagcacggtcaaaggctttggtccagccacagccatcaatgtcaccaccaatatctcagctccaactttacctgactatgaaggagttgatgcctctctcaatgaaactgccaccacaataactgtattgttgagaccagcacaagccaaaggtgctcctatcagtgcttatcagattgttgtggaagaactgcacccacaccgaaccaagagagaagccggagccatggaatgctaccaggtkcctgtcacataccaaaatgccatgagtgggggtgcaccgtattactttgctgcagaactmcccccgggaaacctacctgagcctgccccgttcactgtgggtgacaatcggacctaccaaggcttttggaacccwcctttggctccgcgcaaaggatacaacatctatttccaggcgatgagcagtgtggagaaggaaactaaaacccagtgcgtacgcattgctacaaaagcagcagcaacagaagaaccagaagtgatcccagatcccgccaagcagacagacagagtggtgaaaatagcaggaattagtgctggaattttggtgttcatcctccttctcctagttgtcatattaattgtaaaaaagagcaaacttgctaaaaaacgcaaagatgccatggggaatacccggcaggagatgactcacatggtgaatgcaatggatcgaagttatgctgatcagagcactctgcatgcagaagatcctctttccatcaccttcatggaccaacataactttagtccaagatatgagaaccacagtgctacagcagagtccagtcgccttctagacgtacctcgctacctctgtgaggggacggaatccccttaccagacaggacagctgcatccagccatcagggtagctgatttactgcagcacattaatctcatgaagacatcagacagctatgggttcaaagaggaatatgagagcttttttgaaggacagtcagcatcttgggatgtagctaaaaaagatcaaaatagagcaaaaaaccgatatggaaacattatagcatatgatcactccagagtgattttgcaacccgtagaggatgatccttcctcagattatattaatgccaactatattgatggctaccagagaccaagtcattacattgcaacccaaggtcccgttcatgaaacagtgtatgatttctggaggatgatttggcaagaacaatctgcttgcattgtgatggttacaaatttagttgaggttggccgggttaaatgctataaatattggcctgatgatactgaagtttatggtgacttcaaagtaacgtgtgtagaaatggaaccacttgctgaatatgtagttaggacattcaccctggaaagggtaagtactctaaaattctattttaaaaaggggtacaatgaaatccgtgaagttaaacagttccatttcacgggctggcctgaccatggagtgccctaccatgctacagggctgctttcctttatccggcgagtcaagttatcaaaccctcccagtgctggccccatcgttgtacattgcagtgctggtgctggacgaactggctgctacattgtgattgacatcatgctagacatggctgaaagagagggtgttgttgatatttacaattgtgtcaaagccttaagatctcggcgtattaatatggtccagacagaggaacagtacatttttattcatgatgccattttagaagcctgcttatgtggagaaactgccatacctgtctgtgaatttaaagctgcatattttgatatgattagaatagactcccagactaactcttcacatctcaaggatgaatttcagactctgaattcagtcacscctcgactacaagctgaagactgcagtatagcgtgcctgccaaggaaccatgacaagaaccgtttcatggacatgctgccacctgacagatgtctgccttttttaattacaattgatggggagagcagtaactacatcaatgctgctcttatggacagctacaggcaaccagctgctttcatcgtcacacaataccctctgccaaacactgtaaaagacttctggagattagtgtatgattatggctgtacctccattgtgatgttaaacgaagtcgacttgtcccagggctgccctcagtactggccagaggaagggatgctacgatatggccccatccaagtggaatgtatgtcttgttcaatggactgtgatgtgatcaaccggatttttaggatatgcaatctaacaagaccacaggaaggttatctgatggtgcaacagtttcagtacctaggatgggcttctcatcgagaagtgcctggatccaaaaggtcattcttgaaactgatacttcaggtggaaaagtggcaggaggaatgcgaggaaggggaaggccggacgattatccactgcctaaatggtggcgggcgaagtggcatgttctgtgctataggcatcgttgttgaaatggtgaaacggcaaaatgttgtcgatgttttccatgcagtaaagacactgaggaacagcaagccaaacatggtggaagccccggagcaataccgtttctgctatgatgtagctttggagtacctggaatcatcttagttgggtgagactctttaaagtgcatccatgaagaaacctgtccatctrttgagccagcagctgttgtacctgttacacttgtgcagaaagattttaatgtggggggtgggagacttttacatttgagaggtaaaagtattttttttatgaagttgtgtatcttaataaaaaggactgaattagtttttattctatataaagcatcaacatttcatgccacaaacatgccaccttttttctcatggtttcagtagagcagctaccacatgttgcatgagttcatacttyctacgtggcatttttctccctttctaaaatgaaagctgatgaatcttaaaaggaagaagaaaagaaaagctgtgcaaattcatagtaaagttcgttttttatatgtttccagtgtagcagatctctatataaatatataaatatatataactggcttattttcttttaatgtgcaatgatggctggatcatttaaagttctttttagaaaataacataagccaaagactcaagtgtaaatatgtctatatggagaaagcacattatatttattggttacttacattccttttttgatggctaaaatastaccaccacacaatcatcttttttttcctgaagaaagctttttctttagctaaaatcaattgtaaacgatttttgtagattattttttgtatgttttagtgtaagtagaagataaactttttattcataaaccaggaagcaatgttctttatagtgattctcttgtgtacatgcttgtgaattaaatttgtgtaaaatcccttggcaattgggtcttttaatataggaccaaattaaaacattttgctgaatatgtatagtttttcmcaatttcattaggtaaataatggtttggtgatcatacatgagaaatgtacacattaaaaggccttgctgacaacttgcacaatgttgaacatagcctttaagcatcatttaaattttaaaggaatggagtttttcagcctgtggcccagcactggtcaagaaaacaagatggcaacatatatgctttcagggtyaaatttgagcaaactgtaaactgtcagggtgataaaatgtttctcttgatgtttacatgcacaagctttgcrttctgactataaaaagtgtgaacaaatcaatgccagattcctgttttgygcattgtcatgggattcttaagtgaacctttctaaatgtggtcttgttcacatgctccacgtagctgtaacttcacatcatcagcttgcagtttgtaattgactaaagcattccagtgtcctctttctagattgccagctcatgacatggtgcttataaagatttaattaaagtaagaatgaaataaagtttttataattataaca

SEQ ID NO: 3804 - DNA, 6078 bp, Homo sapiens
tcttgactaacaggagcagcctccgccgagcatggagagctgccgccgcggccggccggcgacgctggcgacgctttcgcccctgaggtagtttggcgaccgcgaagaaggaaaaagggcgggcgggcggctgtcctctcaccgtcctcaccccgcgaggcccggcccgctcctccgtcgtggatttcgcggcgatccccccggcagctctttgcaaagctgcttgaaacttctcccaaactcggcatggatacgactgcggcggcggcgctgcctgcttttgtggcgctcttgctcctctctccttggcctctcctgggatcggcccaaggccagttctccgcagttttcagtgtctgtgcttgtggtcggtaacttttgctgctgttgttctgctgctgtctgccattccattcgccatctatcacgcacacagaaccctggccaggatcatgaagggcgattgaaaaggtggctgtacttttgatgatggtccaggggcctgtgattaccaccaggatctgtatgatgactttgaatgggtgcatgttagtgctcaagagcctcattatctaccacccgagatgccccaaggttcctatatgatagtggactcttcagatcacgaccctggagaaaaagccagacttcagctgcctacaatgaaggagaacgacactcactgcattgatttcagttacctattatatagccagaaaggactgaatcctggcactttgaacatattagttagggtgaataaaggacctcttgccaatccaatttggaatgtgactggattcackggtagagattggcttcgggctgagctagcagtgagcaccttttggcccaatgaatatcaggtaatatttgaagctgaagtctcaggagggagaagtggttatattgccattgatgacatccaagtactgagttatccttgtgataaatctcctcatttcctccgtctaggggatgtagaggtgaatgcagggcaaaacgctacatttcagtgcattgccacagggagagatgctgtgcataacaagttatggctccagagacgaaatggagaagatataccagtagcccagactaagaacatcaatcatagaaggtttgccgcttccttcagattgcaagaagtgacaaaaactgaccaggatttgtatcgctgtgtaactcagtcagaacgaggttcyggtgtgtccaattttgctcaacttattgtgagagaaccgccaagacccattgctcctcctcagcttcttggtgttgggcctacatatttgctgatccaactaaatgccaactcgatcattggcgatggtcctatcatcctgaaagaagtagagtaccgaatgacatcaggatcctggacagaaacccatgcagtcaatgctccaacttacaaattatggcatttagatccagataccgaatatgagatccgagttctacttacaagacctggtgaaggtggaacggggctcccaggacctccactaatcaccagaacaaaatgtgcagaacctatgagaaccccaaagacattaaagattgctgaaatacaggcaagacggattgctgtggactgggaatccttgggttacaacattacgcgttgccacacttttaatgtcactatctgctaccattacttccgtggtcacaacgagagcaaggcagactgtttggacatggaccccaaagcccctcagcatgttgtgaaccatctgccaccttatacaaatgtcagcctcaagatgatcctaaccaatccagagggaaggaaggagagtgaagagacaattattcaaactgatgaagatgtgcctggtcccgtaccagtaaaatctcttcaaggaacatcctttgaaaataagatcttcttgaactggaaagaacctttggatccaaatggaatyatcactcaatatgagatcagctatagcagtataagatcatttgatcctgcagttccagtggctggacctccccagactgtatcaaatttatggaacagtacacaccatgtctttatgcatctccaccctggaaccacgtaccagtttttcataagagccagcacggtcaaaggctttggtccagccacagccatcaatgtcaccaccaatatctcagctccaactttacctgactatgaaggagttgatgcctctctcaatgaaactgccaccacaataactgtattgttgagaccagcacaagccaaaggtgctcctatcagtgcttatcagattgttgtggaagaactgcacccacaccgaaccaagagagaagccggagccatggaatgctaccaggtkcctgtcacataccaaaatgccatgagtgggggtgcaccgtattactttgctgcagaactmcccccgggaaacctacctgagcctgccccgttcactgtgggtgacaatcggacctaccaaggcttttggaacccwcctttggctccgcgcaaaggatacaacatctatttccaggcgatgagcagtgtggagaaggaaactaaaacccagtgcgtacgcattgctacaaaagcagcagcaacagaagaaccagaagtgatcccagatcccgccaagcagacagacagagtggtgaaaatagcaggaattagtgctggaattttggtgttcatcctccttctcctagttgtcatattaattgtaaaaaagagcaaacttgctaaaaaacgcaaagatgccatggggaatacccggcaggagatgactcacatggtgaatgcaatggatcgaagttatgctgatcagagcactctgcatgcagaagatcctctttccatcaccttcatggaccaacataactttagtccaagatatgagaaccacagtgctacagcagagtccagtcgccttctagacgtacctcgctacctctgtgaggggacggaatccccttaccagacaggacagctgcatccagccatcagggtagctgatttactgcagcacattaatctcatgaagacatcagacagctatgggttcaaagaggaatatgagagcttttttgaaggacagtcagcatcttgggatgtagctaaaaaagatcaaaatagagcaaaaaaccgatatggaaacattatagcatatgatcactccagagtgattttgcaacccgtagaggatgatccttcctcagattatattaatgccaactatattgatggctaccagagaccaagtcattacattgcaacccaaggtcccgttcatgaaacagtgtatgatttctggaggatgatttggcaagaacaatctgcttgcattgtgatggttacaaatttagttgaggttggccgggttaaatgctataaatattggcctgatgatactgaagtttatggtgacttcaaagtaacgtgtgtagaaatggaaccacttgctgaatatgtagttaggacattcaccctggaaaggagggggtacaatgaaatccgtgaagttaaacagttccatttcacgggctggcctgaccatggagtgccctaccatgctacagggctgctttcctttatccggcgagtcaagttatcaaaccctcccagtgctggccccatcgttgtacattgcagtgctggtgctggacgaactggctgctacattgtgattgacatcatgctagacatggctgaaagagagggtgttgttgatatttacaattgtgtcaaagccttaagatctcggcgtattaatatggtccagacagaggaacagtacatttttattcatgatgccattttagaagcctgcttatgtggagaaactgccatacctgtctgtgaatttaaagctgcatattttgatatgattagaatagactcccagactaactcttcacatctcaaggatgaatttcagactctgaattcagtcacscctcgactacaagctgaagactgcagtatagcgtgcctgccaaggaaccatgacaagaaccgtttcatggacatgctgccacctgacagatgtctgccttttttaattacaattgatggggagagcagtaactacatcaatgctgctcttatggacagctacaggcaaccagctgctttcatcgtcacacaataccctctgccaaacactgtaaaagacttctggagattagtgtatgattatggctgtacctccattgtgatgttaaacgaagtcgacttgtcccagggctgccctcagtactggccagaggaagggatgctacgatatggccccatccaagtggaatgtatgtcttgttcaatggactgtgatgtgatcaaccggatttttaggatatgcaatctaacaagaccacaggaaggttatctgatggtgcaacagtttcagtacctaggatgggcttctcatcgagaagtgcctggatccaaaaggtcattcttgaaactgatacttcaggtggaaaagtggcaggaggaatgcgaggaaggggaaggccggacgattatccactgcctaaatggtggcgggcgaagtggcatgttctgtgctataggcatcgttgttgaaatggtgaaacggcaaaatgttgtcgatgttttccatgcagtaaagacactgaggaacagcaagccaaacatggtggaagccccggagcaataccgtttctgctatgatgtagctttggagtacctggaatcatcttagttgggtgagactctttaaagtgcatccatgaagaaacctgtccatctrttgagccagcagctgttgtacctgttacacttgtgcagaaagattttaatgtggggggtgggagacttttacatttgagaggtaaaagtattttttttatgaagttgtgtatcttaataaaaaggactgaattagtttttattctatataaagcatcaacatttcatgccacaaacatgccaccttttttctcatggtttcagtagagcagctaccacatgttgcatgagttcatacttyctacgtggcatttttctccctttctaaaatgaaagctgatgaatcttaaaaggaagaagaaaagaaaagctgtgcaaattcatagtaaagttcgttttttatatgtttccagtgtagcagatctctatataaatatataaatatatataactggcttattttcttttaatgtgcaatgatggctggatcatttaaagttctttttagaaaataacataagccaaagactcaagtgtaaatatgtctatatggagaaagcacattatatttattggttacttacattccttttttgatggctaaaatastaccaccacacaatcatcttttttttcctgaagaaagctttttctttagctaaaatcaattgtaaacgatttttgtagattattttttgtatgttttagtgtaagtagaagataaactttttattcataaaccaggaagcaatgttctttatagtgattctcttgtgtacatgcttgtgaattaaatttgtgtaaaatcccttggcaattgggtcttttaatataggaccaaattaaaacattttgctgaatatgtatagtttttcmcaatttcattaggtaaataatggtttggtgatcatacatgagaaatgtacacattaaaaggccttgctgacaacttgcacaatgttgaacatagcctttaagcatcatttaaattttaaaggaatggagtttttcagcctgtggcccagcactggtcaagaaaacaagatggcaacatatatgctttcagggtyaaatttgagcaaactgtaaactgtcagggtgataaaatgtttctcttgatgtttacatgcacaagctttgcrttctgactataaaaagtgtgaacaaatcaatgccagattcctgttttgygcattgtcatgggattcttaagtgaacctttctaaatgtggtcttgttcacatgctccacgtagctgtaacttcacatcatcagcttgcagtttgtaattgactaaagcattccagtgtcctctttctagattgccagctcatgacatggtgcttataaagatttaattaaagtaagaatgaaataaagtttttataattataaca

SEQ ID NO: 3805 - DNA, 5936 bp, Homo sapiens
agcctccgccgagcatggagagctgccgccgcggccggccggcgacgctggcgacgctttcgcccctgaggtagtttggcgaccgcgaagaaggaaaaagggcgggcgggcggctgtcctctcaccgtcctcaccccgcgaggcccggcccgctcctccgtcgtggatttcgcggcgatccccccggcagctctttgcaaagctgcttgaaacttctcccaaactcggcatggatacgactgcggcggcggcgctgcctgcttttgtggcgctcttgctcctctctccttggcctctcctgggatcggcccaaggccagttctccgcaggtggctgtacttttgatgatggtccaggggcctgtgattaccaccaggatctgtatgatgactttgaatgggtgcatgttagtgctcaagagcctcattatctaccacccgagatgccccaaggttcctatatgatagtggactcttcagatcacgaccctggagaaaaagccagacttcagctgcctacaatgaaggagaacgacactcactgcattgatttcagttacctattatatagccagaaaggactgaatcctggcactttgaacatattagttagggtgaataaaggacctcttgccaatccaatttggaatgtgactggattcackggtagagattggcttcgggctgagctagcagtgagcaccttttggcccaatgaatatcaggtaatatttgaagctgaagtctcaggagggagaagtggttatattgccattgatgacatccaagtactgagttatccttgtgataaatctcctcatttcctccgtctaggggatgtagaggtgaatgcagggcaaaacgctacatttcagtgcattgccacagggagagatgctgtgcataacaagttatggctccagagacgaaatggagaagatataccagtagcccagactaagaacatcaatcatagaaggtttgccgcttccttcagattgcaagaagtgacaaaaactgaccaggatttgtatcgctgtgtaactcagtcagaacgaggttcyggtgtgtccaattttgctcaacttattgtgagagaaccgccaagacccattgctcctcctcagcttcttggtgttgggcctacatatttgctgatccaactaaatgccaactcgatcattggcgatggtcctatcatcctgaaagaagtagagtaccgaatgacatcaggatcctggacagaaacccatgcagtcaatgctccaacttacaaattatggcatttagatccagataccgaatatgagatccgagttctacttacaagacctggtgaaggtggaacggggctcccaggacctccactaatcaccagaacaaaatgtgcagaacctatgagaaccccaaagacattaaagattgctgaaatacaggcaagacggattgctgtggactgggaatccttgggttacaacattacgcgttgccacacttttaatgtcactatctgctaccattacttccgtggtcacaacgagagcaaggcagactgtttggacatggaccccaaagcccctcagcatgttgtgaaccatctgccaccttatacaaatgtcagcctcaagatgatcctaaccaatccagagggaaggaaggagagtgaagagacaattattcaaactgatgaagatgtgcctggtcccgtaccagtaaaatctcttcaaggaacatcctttgaaaataagatcttcttgaactggaaagaacctttggatccaaatggaatyatcactcaatatgagatcagctatagcagtataagatcatttgatcctgcagttccagtggctggacctccccagactgtatcaaatttatggaacagtacacaccatgtctttatgcatctccaccctggaaccacgtaccagtttttcataagagccagcacggtcaaaggctttggtccagccacagccatcaatgtcaccaccaatatctcagctccaactttacctgactatgaaggagttgatgcctctctcaatgaaactgccaccacaataactgtattgttgagaccagcacaagccaaaggtgctcctatcagtgcttatcagattgttgtggaagaactgcacccacaccgaaccaagagagaagccggagccatggaatgctaccaggtkcctgtcacataccaaaatgccatgagtgggggtgcaccgtattactttgctgcagaactmcccccgggaaacctacctgagcctgccccgttcactgtgggtgacaatcggacctaccaaggcttttggaacccwcctttggctccgcgcaaaggatacaacatctatttccaggcgatgagcagtgtggagaaggaaactaaaacccagtgcgtacgcattgctacaaaagcagcagcaacagaagaaccagaagtgatcccagatcccgccaagcagacagacagagtggtgaaaatagcaggaattagtgctggaattttggtgttcatcctccttctcctagttgtcatattaattgtaaaaaagagcaaacttgctaaaaaacgcaaagatgccatggggaatacccggcaggagatgactcacatggtgaatgcaatggatcgaagttatgctgatcagagcactctgcatgcagaagatcctctttccatcaccttcatggaccaacataactttagtccaagatatgagaaccacagtgctacagcagagtccagtcgccttctagacgtacctcgctacctctgtgaggggacggaatccccttaccagacaggacagctgcatccagccatcagggtagctgatttactgcagcacattaatctcatgaagacatcagacagctatgggttcaaagaggaatatgagagcttttttgaaggacagtcagcatcttgggatgtagctaaaaaagatcaaaatagagcaaaaaaccgatatggaaacattatagcatatgatcactccagagtgattttgcaacccgtagaggatgatccttcctcagattatattaatgccaactatattgatggctaccagagaccaagtcattacattgcaacccaaggtcccgttcatgaaacagtgtatgatttctggaggatgatttggcaagaacaatctgcttgcattgtgatggttacaaatttagttgaggttggccgggttaaatgctataaatattggcctgatgatactgaagtttatggtgacttcaaagtaacgtgtgtagaaatggaaccacttgctgaatatgtagttaggacattcaccctggaaaggagggggtacaatgaaatccgtgaagttaaacagttccatttcacgggctggcctgaccatggagtgccctaccatgctacagggctgctttcctttatccggcgagtcaagttatcaaaccctcccagtgctggccccatcgttgtacattgcagtgctggtgctggacgaactggctgctacattgtgattgacatcatgctagacatggctgaaagagagggtgttgttgatatttacaattgtgtcaaagccttaagatctcggcgtattaatatggtccagacagaggaacagtacatttttattcatgatgccattttagaagcctgcttatgtggagaaactgccatacctgtctgtgaatttaaagctgcatattttgatatgattagaatagactcccagactaactcttcacatctcaaggatgaatttcagactctgaattcagtcacscctcgactacaagctgaagactgcagtatagcgtgcctgccaaggaaccatgacaagaaccgtttcatggacatgctgccacctgacagatgtctgccttttttaattacaattgatggggagagcagtaactacatcaatgctgctcttatggacagctacaggcaaccagctgctttcatcgtcacacaataccctctgccaaacactgtaaaagacttctggagattagtgtatgattatggctgtacctccattgtgatgttaaacgaagtcgacttgtcccagggctgccctcagtactggccagaggaagggatgctacgatatggccccatccaagtggaatgtatgtcttgttcaatggactgtgatgtgatcaaccggatttttaggatatgcaatctaacaagaccacaggaaggttatctgatggtgcaacagtttcagtacctaggatgggcttctcatcgagaagtgcctggatccaaaaggtcattcttgaaactgatacttcaggtggaaaagtggcaggaggaatgcgaggaaggggaaggccggacgattatccactgcctaaatggtggcgggcgaagtggcatgttctgtgctataggcatcgttgttgaaatggtgaaacggcaaaatgttgtcgatgttttccatgcagtaaagacactgaggaacagcaagccaaacatggtggaagccccggagcaataccgtttctgctatgatgtagctttggagtacctggaatcatcttagttgggtgagactctttaaagtgcatccatgaagaaacctgtccatctrttgagccagcagctgttgtacctgttacacttgtgcagaaagattttaatgtggggggtgggagacttttacatttgagaggtaaaagtattttttttatgaagttgtgtatcttaataaaaaggactgaattagtttttattctatataaagcatcaacatttcatgccacaaacatgccaccttttttctcatggtttcagtagagcagctaccacatgttgcatgagttcatacttyctacgtggcatttttctccctttctaaaatgaaagctgatgaatcttaaaaggaagaagaaaagaaaagctgtgcaaattcatagtaaagttcgttttttatatgtttccagtgtagcagatctctatataaatatataaatatatataactggcttattttcttttaatgtgcaatgatggctggatcatttaaagttctttttagaaaataacataagccaaagactcaagtgtaaatatgtctatatggagaaagcacattatatttattggttacttacattccttttttgatggctaaaatastaccaccacacaatcatcttttttttcctgaagaaagctttttctttagctaaaatcaattgtaaacgatttttgtagattattttttgtatgttttagtgtaagtagaagataaactttttattcataaaccaggaagcaatgttctttatagtgattctcttgtgtacatgcttgtgaattaaatttgtgtaaaatcccttggcaattgggtcttttaatataggaccaaattaaaacattttgctgaatatgtatagtttttcmcaatttcattaggtaaataatggtttggtgatcatacatgagaaatgtacacattaaaaggccttgctgacaacttgcacaatgttgaacatagcctttaagcatcatttaaattttaaaggaatggagtttttcagcctgtggcccagcactggtcaagaaaacaagatggcaacatatatgctttcagggtyaaatttgagcaaactgtaaactgtcagggtgataaaatgtttctcttgatgtttacatgcacaagctttgcrttctgactataaaaagtgtgaacaaatcaatgccagattcctgttttgygcattgtcatgggattcttaagtgaacctttctaaatgtggtcttgttcacatgctccacgtagctgtaacttcacatcatcagcttgcagtttgtaattgactaaagcattccagtgtcctctttctagattgccagctcatgacatggtgcttataaagatttaattaaagtaagaatgaaataaagtttttataattataaca

SEQ ID NO: 3806 - DNA, 1286 bp, Homo sapiens
tcttgactaacaggagcagcctccgccgagcatggagagctgccgccgcggccggccggcgacgctggcgacgctttcgcccctgaggtagtttggcgaccgcgaagaaggaaaaagggcgggcgggcggctgtcctctcaccgtcctcaccccgcgaggcccggcccgctcctccgtcgtggatttcgcggcgatccccccggcagctctttgcaaagctgcttgaaacttctcccaaactcggcatggatacgactgcggcggcggcgctgcctgcttttgtggcgctcttgctcctctctccttggcctctcctgggatcggcccaaggccagttctccgcagttttcagtgtctgtgcttgtggtcggtaacttttgctgctgttgttctgctgctgtctgccattccattcgccatctatcacgcacacagaaccctggccaggatcatgaagggcgattgaaaaggtggctgtacttttgatgatggtccaggggcctgtgattaccaccaggatctgtatgatgactttgaatgggtgcatgttagtgctcaagagcctcattatctaccacccgagatgccccaaggttcctatatgatagtggactcttcagatcacgaccctggagaaaaagccagacttcagctgcctacaatgaaggagaacgacactcactgcattgatttcagttacctattatatagccagaaaggactgaatcctggcactttgaacatattagttagggtgaataaaggacctcttgccaatccaatttggaatgtgactggattcackggtagagattggcttcgggctgagctagcagtgagcaccttttggcccaatgaatatcaggtaatatttgaagctgaagtctcaggagggagaagtggttatattgccattgatgacatccaagtactgagttatccttgtgataaatctcctcatttcctccgtctaggggatgtagaggtgaatgcagggcaaaacgctacatttcagtgcattgccacagggagagatgctgtgcataacaagttatggctccagagacgaaatggagaagatataccagtagcccagactaagaacatcaatcatagaaggtttgccgcttccttcagattgcaagaagtgacaaaaactgaccaggatttgtatcgctgtgtaactcagtcagaacgaggttcyggtgtgtccaattttgctcaacttattgtgagaggtaaggtgaaattgttttcacttcacgaaattgcatggctttattag

SEQ ID NO: 3807 - DNA, 1673 bp, Homo sapiens
gctatctttctggcacatggacccagttttaaagagaagactgaagttgaaccatttgaaaatattgaagtctataacctaatgtgtggtaaaggagttgttgctttccagtgtaaagctactttgaactwattttttcaaaaaacagatcttctacgcattcaaccagcaccaaacaatggaacccatggtagtttaaaccatcttctgaaggtgcctttttatgagccatcccatgcagaggaggtgtcaaagttttctgtttgtggctttgctaatccattgcccacagagtctcttgactgtttctgccctcacctacaaaatagtactcagctggaacaagtgaatcagatgctaaatctcacccaagaagaaataacagcaacagtgaaagtaaatttgccatttgggaggcctagggtactgcagaagaacgtggaccactgtctcctttaccacagggaatatgtcagtggatttggaaaagctatgaggatgcccatgtggagttcatacacagtcccccagttgggagacacatcgccyctgcctcccactgtcccagactgtctgcgggctgatgtcagggttcctccttcygagagccaaaaatgttccttctatttagcagacaagaatatcacccacggcttcctctatcctcctgccagcaatagaacatcagatagccaatatgatgctttaattactagcaatttggtacctatgtatgaagaattcagaaaaatgtgggactacttccacagtgttcttcttataaaacatgccacagaaagaaatggagtamatgtggttagtggaccaatatttgattataattatgatggccattttgatgctccagatgaaattaccaaacatttagccaacactgatgttcccatcccaacacactactttgtggtgctgaccagttgtaaaaacaagagccacacaccggaaaactgccctgggtggctggatgtcctaccctttatcatccctcaccgacctaccaacgtggagagctgtcctgaaggtaaaccagaagctctttgggttgaagaaagatttacagctcacattgcccgggtccgtgatgtagaacttctcactgggcttgacttctatcaggataaagtgcagcctrtctctgaaattttgcaactaaagacatatttaccaacatttgaaaccmctatttaacttaataatgtctacttaatatataatttactgtataaagtaattttggcaaaatataagtgatttttttctggagaattgtaaaataaagttttctatttttccttaagtcccctaaaagccataatttttattattccyttttctcttttttcaattctatgaatatgtattattttaaagttatatttttcacacagagatgatgctatattacaccttcccttttttgttggtttcttaaactctaatctcatgacagattataccttccttattacttgttttatcttactcagaatctttgaatatatttttctgcccagaattatctaaacaaaagggagaacaaaagaagtatgtctcacttgggaactgaatcaactctaaatcagttttgtcacaaaactttttgtatttgactggcaatgctgattaaaattaaaaatgcacagaacttttgc

SEQ ID NO: 3808 - DNA, 3242 bp, Homo sapiens
attgcccaatcactgaagagctgtgatcttcctaaacagttaaaagtcrggcacagctatgtaactcatacagtttctctttgccagactagactaaagaaggagcactamtttattctgataaaacaggtctatgcagctaccaggacaatggaatctacgttgactttagcaacggaacaacctgttaagaagaacactcttaagaaatataaaakagcttgcattgttcttcttgctttgctggtgatcatgtcacttggattaggcctggggcttggactcaggaaactggaaaagcaaggcagctgcaggaagaagtgctttgatgcatcatttagaggactggagaactgccggtgtgatgtggcatgtaaagaccgaggtgattgctgctgggattttgaagacacctgtgtggaatcaactcgaatatggatgtgcaataaatttcgttgtggagagaccagattagaggccagcctttgctcttgttcagatgactgtttgcagaggaaagattgctgtgctgactataagagtgtttgccaaggagaaacctcatggctggaagaaaactgtgacacagcccagcagtctcagtgccyagaagggtttgacctgccaccagttatcttgttttctatggatggatttagagctgaatatttatacacatgggatactttaatgccaaatatcaataaactgaaaacatgtggaattcattcaaaatacatgagagctatgtatcctaccaaaaccttcccaaatcattacaccattgtcacgggcttgtatccrgagtcacatggcatcattgacaataatatgtatgatgtaaatctcaacaagaatttttcactttcttcaaaggaacaaaataatccagcctggtggcatgggcaaccaatgtggctgacagcaatgtatcaaggtttaaaagccgctacctacttttggcccggatcagaagtggctataaatggctcctttccttccatatacatgccttacaacggaagtgtcccatttgaagagaggatttctacactgttaaaatggctggacctgcccaaagctgaaagacccaggttttataccatgtattttgaagaacctgattcctctggacatgcaggtggaccagtcagtgccagagtaattaaagccttacaggtagtagatcatgcttttgggatgttgatggaaggcctgaagcagcggaatttgcacaactgtgtcaatatcatccttctggctgaccatggaatggaccagacttattgtaacaagatggaatacatgactgattattttcccagaataaacttcttctacatgtacgaagggcctgccccccgcatccgagctcataatatacctcatgacttttttagttttaattctgaggaaattgttagaaacctcagttgccgaaaacctgatcagcatttcaagccctatttgactcctgatttgccaaagcgactgcactatgccaagaacgtcagaatcgacaaagttcatctctttgtggatcaacagtggctggctgttaggagtaaatcaaatacaaattgtggaggaggcaaccatggttataacaatgagtttaggagcatggaggctatctttctggcacatggacccagttttaaagagaagactgaagttgaaccatttgaaaatattgaagtctataacctaatgtgtgatcttctacgcattcaaccagcaccaaacaatggaacccatggtagtttaaaccatcttctgaaggtgcctttttatgagccatcccatgcagaggaggtgtcaaagttttctgtttgtggctttgctaatccattgcccacagagtctcttgactgtttctgccctcacctacaaaatagtactcagctggaacaagtgaatcagatgctaaatctcacccaagaagaaataacagcaacagtgaaagtaaatttgccatttgggaggcctagggtactgcagaagaacgtggaccactgtctcctttaccacagggaatatgtcagtggatttggaaaagctatgaggatgcccatgtggagttcatacacagtcccccagttgggagacacatcgccyctgcctcccactgtcccagactgtctgcgggctgatgtcagggttcctccttcygagagccaaaaatgttccttctatttagcagacaagaatatcacccacggcttcctctatcctcctgccagcaatagaacatcagatagccaatatgatgctttaattactagcaatttggtacctatgtatgaagaattcagaaaaatgtgggactacttccacagtgttcttcttataaaacatgccacagaaagaaatggagtamatgtggttagtggaccaatatttgattataattatgatggccattttgatgctccagatgaaattaccaaacatttagccaacactgatgttcccatcccaacacactactttgtggtgctgaccagttgtaaaaacaagagccacacaccggaaaactgccctgggtggctggatgtcctaccctttatcatccctcaccgacctaccaacgtggagagctgtcctgaaggtaaaccagaagctctttgggttgaagaaagatttacagctcacattgcccgggtccgtgatgtagaacttctcactgggcttgacttctatcaggataaagtgcagcctrtctctgaaattttgcaactaaagacatatttaccaacatttgaaaccmctatttaacttaataatgtctacttaatatataatttactgtataaagtaattttggcaaaatataagtgatttttttctggagaattgtaaaataaagttttctatttttccttaagtcccctaaaagccataatttttattattccyttttctcttttttcaattctatgaatatgtattattttaaagttatatttttcacacagagatgatgctatattacaccttcccttttttgttggtttcttaaactctaatctcatgacagattataccttccttattacttgttttatcttactcagaatctttgaatatatttttctgcccagaattatctaaacaaaagggagaacaaaagaagtatgtctcacttgggaactgaatcaactctaaatcagttttgtcacaaaactttttgtatttgactggcaatgctgattaaaattaaaaatgcacagaacttttgc

SEQ ID NO: 3809 - DNA, 3305 bp, Homo sapiens
atacagtttctctttgccagactagactaaagaaggagcactamtttattctgataaaacaggtctatgcagctaccaggacaatggaatctacgttgactttagcaacggaacaacctgttaagaagaacactcttaagaaatataaaakagcttgcattacagggtctctctcctttgggatctcacctcaccacaacctctgtttcccaggctcaagtgatcctcctgcctcagcctcctgagtagcttggaccacaggcacatgccacaaggctcagctaagtttttgttcttcttgctttgctggtgatcatgtcacttggattaggcctggggcttggactcaggaaactggaaaagcaaggcagctgcaggaagaagtgctttgatgcatcatttagaggactggagaactgccggtgtgatgtggcatgtaaagaccgaggtgattgctgctgggattttgaagacacctgtgtggaatcaactcgaatatggatgtgcaataaatttcgttgtggagagaccagattagaggccagcctttgctcttgttcagatgactgtttgcagaggaaagattgctgtgctgactataagagtgtttgccaaggagaaacctcatggctggaagaaaactgtgacacagcccagcagtctcagtgccyagaagggtttgacctgccaccagttatcttgttttctatggatggatttagagctgaatatttatacacatgggatactttaatgccaaatatcaataaactgaaaacatgtggaattcattcaaaatacatgagagctatgtatcctaccaaaaccttcccaaatcattacaccattgtcacgggcttgtatccrgagtcacatggcatcattgacaataatatgtatgatgtaaatctcaacaagaatttttcactttcttcaaaggaacaaaataatccagcctggtggcatgggcaaccaatgtggctgacagcaatgtatcaaggtttaaaagccgctacctacttttggcccggatcagaagtggctataaatggctcctttccttccatatacatgccttacaacggaagtgtcccatttgaagagaggatttctacactgttaaaatggctggacctgcccaaagctgaaagacccaggttttataccatgtattttgaagaacctgattcctctggacatgcaggtggaccagtcagtgccagagtaattaaagccttacaggtagtagatcatgcttttgggatgttgatggaaggcctgaagcagcggaatttgcacaactgtgtcaatatcatccttctggctgaccatggaatggaccagacttattgtaacaagatggaatacatgactgattattttcccagaataaacttcttctacatgtacgaagggcctgccccccgcatccgagctcataatatacctcatgacttttttagttttaattctgaggaaattgttagaaacctcagttgccgaaaacctgatcagcatttcaagccctatttgactcctgatttgccaaagcgactgcactatgccaagaacgtcagaatcgacaaagttcatctctttgtggatcaacagtggctggctgttaggagtaaatcaaatacaaattgtggaggaggcaaccatggttataacaatgagtttaggagcatggaggctatctttctggcacatggacccagttttaaagagaagactgaagttgaaccatttgaaaatattgaagtctataacctaatgtgtgatcttctacgcattcaaccagcaccaaacaatggaacccatggtagtttaaaccatcttctgaaggtgcctttttatgagccatcccatgcagaggaggtgtcaaagttttctgtttgtggctttgctaatccattgcccacagagtctcttgactgtttctgccctcacctacaaaatagtactcagctggaacaagtgaatcagatgctaaatctcacccaagaagaaataacagcaacagtgaaagtaaatttgccatttgggaggcctagggtactgcagaagaacgtggaccactgtctcctttaccacagggaatatgtcagtggatttggaaaagctatgaggatgcccatgtggagttcatacacagtcccccagttgggagacacatcgccyctgcctcccactgtcccagactgtctgcgggctgatgtcagggttcctccttcygagagccaaaaatgttccttctatttagcagacaagaatatcacccacggcttcctctatcctcctgccagcaatagaacatcagatagccaatatgatgctttaattactagcaatttggtacctatgtatgaagaattcagaaaaatgtgggactacttccacagtgttcttcttataaaacatgccacagaaagaaatggagtamatgtggttagtggaccaatatttgattataattatgatggccattttgatgctccagatgaaattaccaaacatttagccaacactgatgttcccatcccaacacactactttgtggtgctgaccagttgtaaaaacaagagccacacaccggaaaactgccctgggtggctggatgtcctaccctttatcatccctcaccgacctaccaacgtggagagctgtcctgaaggtaaaccagaagctctttgggttgaagaaagatttacagctcacattgcccgggtccgtgatgtagaacttctcactgggcttgacttctatcaggataaagtgcagcctrtctctgaaattttgcaactaaagacatatttaccaacatttgaaaccmctatttaacttaataatgtctacttaatatataatttactgtataaagtaattttggcaaaatataagtgatttttttctggagaattgtaaaataaagttttctatttttccttaagtcccctaaaagccataatttttattattccyttttctcttttttcaattctatgaatatgtattattttaaagttatatttttcacacagagatgatgctatattacaccttcccttttttgttggtttcttaaactctaatctcatgacagattataccttccttattacttgttttatcttactcagaatctttgaatatatttttctgcccagaattatctaaacaaaagggagaacaaaagaagtatgtctcacttgggaactgaatcaactctaaatcagttttgtcacaaaactttttgtatttgactggcaatgctgattaaaattaaaaatgcacagaacttttgc

SEQ ID NO: 3810 - DNA, 4128 bp, Homo sapiens
agcggccggggccacgatggagcgcgacggctgcgcggggggcgggagccgcggcggcgagggcgggcgcgctccccgggagggcccggcggggaacggccgcgatcggggccgcagccacgctgccgaggcgcccggggacccgcaggcggccgcgtccttgctggcccctatggacgtgggggaggagccgctggagaaggcggcgcgcgcccgcactgccaaggaccccaacacctataaagtactctcgctggtattgtcagtatgtgtgttaacaacaatacttggttgtatatttgggttgaaaccaagctgtgccaaagaagttaaaagttgcaaaggtcgctgtttcgagagaacatttgggaactgtcgctgtgatgctgcctgtgttgagcttggaaactgctgtttagattaccaggagacgtgcatagaaccagaacatatatggacttgcaacaaattcaggtgtggtgagaaaaggttgaccagaagcctctgtgcctgttcagatgactgcmaggacmagggcgactgctgcatcarctacagttctgtgtgtcaaggtgagaaaagttgggtagaagaaccatgtgagagcattaatgagccacagtgcccagcagggtttgaaacgcctcctaccctcttattttctttggatggattcagggcagaatatttacacacttggggtggacttcttcctgttattagcaaactaaaaaaatgtggaacatatactaaaaacatgagaccggtatatccaacaaaaactttccccaatcactacagcattgtcaccggattgtatccagaatctcatggcataatcgacaataaaatgtatgatcccaaaatgaatgcttycttttcacttaaaagtaaagagaaatttaatcctgagtggtacaaaggagaaccaatttgggtcacagctaagtatcaaggcctcaagtctggcacatttttctggccaggatcagatgtggaaattaacggaattttcccagacatctataaaatgtataatggttcagtaccatttgaagaaaggattttagctgttcttcagtggctacagcttcctaaagatgaaagaccacacttttacactctgtatttagaagaaccagattcttcaggtcattcatatggaccagtcagcagtgaagtcatcaaagccttgcagagggttgatggtatggttggtatgctgatggatggtctgaaagagctgaacttgcacagatgcctgaacctcatccttatttcagatcatggcatggaacaaggcagttgtaagaaatacatatatctgaataaatatttgggggatgttaaaaatattaaagttatctatggacctgcagctcgattgagaccctctgatgtcccagataaatactattcatttaactatgaaggcattgcccgaaatctttcttgccgggaaccaaaccagcacttcaaaccttacctgaaacatttcttacctaagcgtttgcactttgctaagagtgatagaattgagcccttgacattctatttggaccctcagtggcaacttgcattgaatccctcagaaaggaaatattgtggaagtggatttcatggctctgacaatgtattttcaaatatgcaagccctctttgttggctatggacctggattcaagcatggcattgaggctgacacctttgaaaacattgaagtctataacttaatgtgtgatttactgaatttgacaccggctcctaataacggaactcatggaagtcttaaccaccttctaaagaatcctgtttatacgccaaagcatcccaaagaagtgcaccccctggtacagtgccccttcacaagaaaccccagagataaccttggctgctcatgtaacccttcgattttgccgattgaggattttcaaacacagttcaatctgactgtggcagaagagaagattattaagcatgaaactttaccctatggaagacctagagttctccagaaggaaaacaccatctgtcttctttcccagcaccagtttatgagtggatacagccaagacatcttaatgcccctttggacatcctataccgtggacagaaatgcaatttctctacggaagacttctccaactgtctgtaccaggactttagaattcctcttagtcctgtccataaatgttcattttataaaaataacaccaaagtgagttacgggttcctctccccaccacaactaaataaaaattcaagtggaatatattctgaagctttgcttactacaaatatagtgccaatgtaccagagttttcaagttatatggygctactttcatgacmccctactgcgaaagtatgctgaagaaagaaatggtgtcaatgtcgtcagtggtcctgtgtttgactttgattatgatggacgttgtgattccttagagaatctgaggcaaaaaagaagagtcatccgtaaccaagaaattttgattccaactcacttctttattgtgctaacaagctgtaaagatacatctcagacgcctttgcactgtgaaaacctagacaccttagctttcattttgcctcacaggactgataacagcgagagctgtgtgcatgggaagcatgactcctcatgggttgaagaattgttaatgttacacagagcrcggatcacagatgttgagcacatcactggactcagcttctatcaacaaagaaaagagccagtttcagacattttaaagttgaaaacacatttgccaacctttagccaagaagactgatatgttttttatccccaaacaccatgaatctttttgagagaaccttatattttatatagtcctctagctacactattgcattgttcagaaactgtcgaccagagttagaacrgagccctcsgtgatgcggacatctcagggaaacttgcgtactcagcacagyagtggagagtgttcctgttgaatcttgcacatatttgaatgtgtaagcattgtatacattgatcaagttcgggggaataaagacagaccacacctaaaactgcctttctgcttctcttaaaggagaagtagctgtgaacattgtctggataccagatatttgaatctttcttactattggtaataaaccttgatggcattgggcaaacagtagacttatagtaggrttggggtagcccatgttatgtgactatctttatgagaattttaaagtggttctggatatcttttaacwtggagtttcatttcttttcattgtaatcaaaaaaaaaattaacagaagccaaaatacttctgagaccttgtttcaatctttgctgtatatcccctcaaaatccaarttattaatcttatgtgttttctttttaattttttgattggatttctttagatttaatggttcaaatgagttcaactttgagggacgatctttgaatatacttacctattataaaatcttactttgtatttgtatttaaaaaagaaaaatattcctatcctgctcactggtaattaacataggtttaaaatggcttcaaatgtggccctatagacggttaaaattgtaccttatcttggcaaaacttcagagcaccagtcagtgcatgcaaggtgccattttttattgagatgcttagaatgtttctttctgtgcacaagacttaccctaccagcagcagagccattctctgttgagtggttcattttgaagttccacagattgaagagaacatgccaccaatcacctcacatcttcttggtggacatgataaatgacacaatgaacttgatttctttactaccttgactgtagctttttgtccctacctgtgaaccttcaaagactgcattaacttttaggctacataggtccaattgaggtataatatcagtacaccaaagatttttatatgtccttcgtgtgaccattctttaacggcctaagggccagctgcaaagacttttggaaaatacaatttacaactcaaaattatttaataatttaggaagttgctttttttttttttttttttcagtcctgcagtttcctgaagctctgtatatgatatttttttcagcctgcttctctctgttgttcagattaggtaattt

SEQ ID NO: 3811 - DNA, 936 bp, Homo sapiens
tttttaataaagataattacaaaagatggaaaaatcagctcagaaaggccaattacttctttaatagatcagtttttttgacataataactcacatcaattttaaatactatcacataaagcmtggtggagaaaagaaattttgcttcataattagaaaaactcacaataaaacttgccaagaaaaacaaaaacgaaaaagccatttgaaaataaatacagtccatgccaaagtagtataaaatgaagccagaagtcttcaaaaagaaaacattttcctttcaatattttctttttaatgattttctgaaattggtgagactgtcaaattcaggcctttggtatctgttttttcaccactgttgtccttggatttatcttcttccttaacgtctgtttttttgtcctctgtttctttcttatcttcttcaattctagctttctttgctcctttcttatgatcagccacatttcttcgacctccttctccttcatcctcagaatctgagaattcttcatcacaagctatccgcttgtctgatgctcgaatagaaattctcttgtctggatcttctccatcttcatctccactgtcttcatgaacagcatcttctggaatagcttgcatctggacaccaggtgcatgaggtaacatgcgcaaattttcaaacaaacgctgttttatcttttccatatattctggagtgttctggtttgtcatgtttgaaggactaatatgcagtttgaagtctggtccaaaatactcaaagtaatcattatatggcaactcattgggaatctcacaatcaagggcaactgcagtctcatatgtccaacatcgagcaacattacggattgtgtagccacctcctccaagcatcagtaatggtaagttaaaagtttttacaacttctacacatttagcatgacctaagac

SEQ ID NO: 3812 - DNA, 438 bp, Homo sapiens
acagcggacaccaggactctaagatagcgtcagttgtaccagtgaaggacaagaaacttctggaggtcaaactgggggagctgccaagctggatcttgatgggggacttcagccctagtggcattttcggagcgtttcaaagaggttactactggtactacaagtacatcaatgtgaagaaggggagcatctcgggggttaccatggtgctggcatgctacgtgctcttcagctactccttttcctacaagcatytcaagcacgagtggctccgcaaatacsacwgaagrggacacgytctgcacccccccaccccacgaccttggcccgagcccctctgtgaggaacacaatctcgatcgttgctgaattctttcatatcctaatggcaattaacctccaaataaaagatgactagttaaaaaaaaaaaaaaaaaaa

SEQ ID NO: 3813 - DNA, 2340 bp, Homo sapiens
ccaaaggcctttcaccgctgcgggccagtcctcagtcagctggagggtgggtcccacggaatcctgttagtttctaccacctcctcccccttctctggagctggtggagcttcagaagtcctgtggagcgtcggctgggatcagtwtgtctcggtgaaaattttagctttccagagtgttgaatcttccaccrgaaaacttgatcacatcaatatctgcagttccaatttcccaaaaagaagaagtagctgattttcagctttctgtggattctttattggaaaaagacaatgaccattcaagaccagatattcaagttcaagccaagagactagcagagaagctaagatgtgatacagtggtgagtgaaatcagtactggtcaaaggactgtaaatttcaaaataaacagagagctcttaacaaagacagtgctacaacaagtaattgaagatggctcaaaatatggattaaaaagtgaacttttctctggacttccccagaagaagattgtggttgaattcagttcacctaatgttgccaaaaaatttcatgttggacatttgcgttctaccatcataggaaattttatagcaaatctcaaagaagctttaggacatcaagtaataagaataaattaccttggcgattggggcatgcagtttggtcttctgggaactggcttccagctgtttggctatgaggaaaaactgcagtccaatcctctacagcatctctttgaagtttatgtacaagttaataaagaagcagcagatgataaaagtgtagcaaaagcagcacaggagttcttccaacgattggaactgggcgatrtgcaagcactttcactgtggcaaaaatttcgggacttgagcattgaagagtacattcgggtttacaagcgtctgggagtatattttgatgaatattcaggagaatcattttatcgtgaaaaatctcaagaggtcttaaagttgctggagagtaaaggactcctactgaraacaataaaaggaacggctgtagtagatctctctgggaatggcgacccctcctcaatttgtactgtaatgcgaagtgatgggacttctctctatgcaaccagagatcttgcagctgctrtagatcgaatggacaagtataattttgatacaatratatatgtgacagataaaggacaaaaaaagcattttcagcaagtattccaaatgctgaagatcatgggatatgrctgggcagaaaggtgccagcacgtgccctttggagtagtacagggaatgaagactcgaagaggagatgtcactttcctggaagatgttttaaatgagattcaattaaggatgctacagaacatggcttcaattaagacaactaaagaactcaagaacccacaagagactgcagagagggtcgggctcgcagcactcattattcaggacttcaaaggtttactcttatctgactacaagttcagctgggatcgtgttttccagagtcgcggggacacaggagtcttcctacagtacacacacgcccgcctccacagtttggaagagacttttggatgtgggtacctgaatgacttcaacactgcttgtttacaagagccacagtctgtttcaattcttcagcatcttctcaggttcgacgaggtgctttataaatcatctcaggactttcaacccaggcatatcgtcagttaccttctaactttaagtcatcttgcagctgtggcacacaaaacactacaaataaaagatagtcctcctgaagtggctggggccagacttcatcttttcaaagctgtccgttctgtcctagccaatggaatgaarcttcttggaataacacctgtatgtaggatgtaatttccattaaaatggcttttaaaatgtcaagtgaattctagttatctattctgagatgccttgctgttcagaataaatttaaattttttttttttttttttgagatggagtttcgctcttgttgcccaggctggagtgcaatggtgtgatgttggctcactgcaacctccacctcccaggttcaagcaattctcctgcctcagcctcctgagtagctgggattacaggcacgtgccatcaygccaggctaattttgtatttttagtagagacagggtttctctatgttggtcaggctggtctygcactcccgacctcaggttatctgtctgccttggcctcccaaagtgttgggattagaggcatgaaccaccacgcccagccaaagttaaactattattctgtgtcagaatctrtattaaatgtgacttgtcaagttattcagtctttatccttaaataaatgagttatctg

SEQ ID NO: 3814 - DNA, 2555 bp, Homo sapiens
agaggtggacatggcgtgcggctttcgccgcgctattgcttgccaggtatggatcccggagcgcgcagaggagtccctgaggagctagggaccccaaaggcctttcaccgctgcgggccagtcctcagtcagctggagggtgggtcccacggaatcctgttagtttctaccacctcctcccccttctctggagctggtggagcttcagaagtcctgtggagcgtcggctgggatcagtwtgtctcggtgaaaagtaaactttgaaagctttccagagtgttgaatcttccaccrgaaaacttgatcacatcaatatctgcagttccaatttcccaaaaagaagaagtagctgattttcagctttctgtggattctttattggaaaaagacaatgaccattcaagaccagatattcaagttcaagccaagagactagcagagaagctaagatgtgatacagtggtgagtgaaatcagtactggtcaaaggactgtaaatttcaaaataaacagagagctcttaacaaagacagtgctacaacaagtaattgaagatggctcaaaatatggattaaaaagtgaacttttctctggacttccccagaagaagattgtggttgaattcagttcacctaatgttgccaaaaaatttcatgttggacatttgcgttctaccatcataggaaattttatagcaaatctcaaagaagctttaggacatcaagtaataagaataaattaccttggcgattggggcatgcagtttggtcttctgggaactggcttccagctgtttggctatgaggaaaaactgcagtccaatcctctacagcatctctttgaagtttatgtacaagttaataaagaagcagcagatgataaaagtgtagcaaaagcagcacaggagttcttccaacgattggaactgggcgatrtgcaagcactttcactgtggcaaaaatttcgggacttgagcattgaagagtacattcgggtttacaagcgtctgggagtatattttgatgaatattcaggagaatcattttatcgtgaaaaatctcaagaggtcttaaagttgctggagagtaaaggactcctactgaraacaataaaaggaacggctgtagtagatctctctgggaatggcgacccctcctcaatttgtactgtaatgcgaagtgatgggacttctctctatgcaaccagagatcttgcagctgctrtagatcgaatggacaagtataattttgatacaatratatatgtgacagataaaggacaaaaaaagcattttcagcaagtattccaaatgctgaagatcatgggatatgrctgggcagaaaggtgccagcacgtgccctttggagtagtacagggaatgaagactcgaagaggagatgtcactttcctggaagatgttttaaatgagattcaattaaggatgctacagaacatggcttcaattaagacaactaaagaactcaagaacccacaagagactgcagagagggtcgggctcgcagcactcattattcaggacttcaaaggtttactcttatctgactacaagttcagctgggatcgtgttttccagagtcgcggggacacaggagtcttcctacagtacacacacgcccgcctccacagtttggaagagacttttggatgtgggtacctgaatgacttcaacactgcttgtttacaagagccacagtctgtttcaattcttcagcatcttctcaggttcgacgaggtgctttataaatcatctcaggactttcaacccaggcatatcgtcagttaccttctaactttaagatggygtctcgctctgttgtccaggctggagcgtgatctcggctcactgcaacctccacctgctggattcaagcgattstcctgcctcagcctccctagtagctgggattacagtcatcttgcagctgtggcacacaaaacactacaaataaaagatagtcctcctgaagtggctggggccagacttcatcttttcaaagctgtccgttctgtcctagccaatggaatgaarcttcttggaataacacctgtatgtaggatgtaatttccattaaaatggcttttaaaatgtcaagtgaattctagttatctattctgagatgccttgctgttcagaataaatttaaattttttttttttttttttgagatggagtttcgctcttgttgcccaggctggagtgcaatggtgtgatgttggctcactgcaacctccacctcccaggttcaagcaattctcctgcctcagcctcctgagtagctgggattacaggcacgtgccatcaygccaggctaattttgtatttttagtagagacagggtttctctatgttggtcaggctggtctygcactcccgacctcaggttatctgtctgccttggcctcccaaagtgttgggattagaggcatgaaccaccacgcccagccaaagttaaactattattctgtgtcagaatctrtattaaatgtgacttgtcaagttattcagtctttatccttaaataaatgagttatctg

SEQ ID NO: 3815 - DNA, 2565 bp, Homo sapiens
agaggtggacatggcgtgcggctttcgccgcgctattgcttgccaggtatggatcccggagcgcgcagaggagtccctgaggagctagggaccccaaaggcctttcaccgctgcgggccagtcctcagtcagctggagggtgggtcccacggaatcctgttagtttctaccacctcctcccccttctctggagctggtggagcttcagaagtcctgtggagcgtcggctgggatcagtwtgtctcggtgaaaagtaaactttgaaagctttccagagtgttgaatcttccaccrgaaaacttgatcacatcaatatctgcagttccaatttcccaaaaagaagaagtagctgattttcagctttctgtggattctttattggaaaaagacaatgaccattcaagaccagatattcaagttcaagccaagagactagcagagaagctaagatgtgatacagtggtgagtgaaatcagtactggtcaaaggactgtaaatttcaaaataaacagagagctcttaacaaagacagtgctacaacaagtaattgaagatggctcaaaatatggattaaaaagtgaacttttctctggacttccccagaagaagattgtggttgaattcagttcacctaatgttgccaaaaaatttcatgttggacatttgcgttctaccatcataggaaattttatagcaaatctcaaagaagctttaggacatcaagtaataagaataaattaccttggcgattggggcatgcagtttggtcttctgggaactggcttccagctgtttggctatgaggaaaaactgcagtccaatcctctacagcatctctttgaagtctagagacaagatcgctatgtagacacaccgtgaaccatttcccactgtgggcctgcaccaccccaggggcttcctagcttctgctcttctggaagtcttccccatctcctccccattccaggtttatgtacaagttaataaagaagcagcagatgataaaagtgtagcaaaagcagcacaggagttcttccaacgattggaactgggcgatrtgcaagcactttcactgtggcaaaaatttcgggacttgagcattgaagagtacattcgggtttacaagcgtctgggagtatattttgatgaatattcaggagaatcattttatcgtgaaaaatctcaagaggtcttaaagttgctggagagtaaaggactcctactgaraacaataaaaggaacggctgtagtagatctctctgggaatggcgacccctcctcaatttgtactgtaatgcgaagtgatgggacttctctctatgcaaccagagatcttgcagctgctrtagatcgaatggacaagtataattttgatacaatratatatgtgacagataaaggacaaaaaaagcattttcagcaagtattccaaatgctgaagatcatgggatatgrctgggcagaaaggtgccagcacgtgccctttggagtagtacagggaatgaagactcgaagaggagatgtcactttcctggaagatgttttaaatgagattcaattaaggatgctacagaacatggcttcaattaagacaactaaagaactcaagaacccacaagagactgcagagagggtcgggctcgcagcactcattattcaggacttcaaaggtttactcttatctgactacaagttcagctgggatcgtgttttccagagtcgcggggacacaggagtcttcctacagtacacacacgcccgcctccacagtttggaagagacttttggatgtgggtacctgaatgacttcaacactgcttgtttacaagagccacagtctgtttcaattcttcagcatcttctcaggttcgacgaggtgctttataaatcatctcaggactttcaacccaggcatatcgtcagttaccttctaactttaagtcatcttgcagctgtggcacacaaaacactacaaataaaagatagtcctcctgaagtggctggggccagacttcatcttttcaaagctgtccgttctgtcctagccaatggaatgaarcttcttggaataacacctgtatgtaggatgtaatttccattaaaatggcttttaaaatgtcaagtgaattctagttatctattctgagatgccttgctgttcagaataaatttaaattttttttttttttttttgagatggagtttcgctcttgttgcccaggctggagtgcaatggtgtgatgttggctcactgcaacctccacctcccaggttcaagcaattctcctgcctcagcctcctgagtagctgggattacaggcacgtgccatcaygccaggctaattttgtatttttagtagagacagggtttctctatgttggtcaggctggtctygcactcccgacctcaggttatctgtctgccttggcctcccaaagtgttgggattagaggcatgaaccaccacgcccagccaaagttaaactattattctgtgtcagaatctrtattaaatgtgacttgtcaagttattcagtctttatccttaaataaatgagttatctg

SEQ ID NO: 3816 - DNA, 2238 bp, Homo sapiens
actgcggcgcacttccgtagaggtggacatggcgtgcggctttcgccgcgctattgcttgccagctttccagagtgttgaatcttccaccrgaaaacttgatcacatcaatatctgcagttccaatttcccaaaaagaagaagtagctgattttcagctttctgtggattctttattggaaaaagacaatgaccattcaagaccagatattcaagttcaagccaagagactagcagagaagctaagatgtgatacagtggtgagtgaaatcagtactggtcaaaggactgtaaatttcaaaataaacagagagctcttaacaaagacagtgctacaacaagtaattgaagatggctcaaaatatggattaaaaagtgaacttttctctggacttccccagaagaagattgtggttgaattcagttcacctaatgttgccaaaaaatttcatgttggacatttgcgttctaccatcataggaaattttatagcaaatctcaaagaagctttaggacatcaagtaataagaataaattaccttggcgattggggcatgcagtttggtcttctgggaactggcttccagctgtttggctatgaggaaaaactgcagtccaatcctctacagcatctctttgaagtttatgtacaagttaataaagaagcagcagatgataaaagtgtagcaaaagcagcacaggagttcttccaacgattggaactgggcgatrtgcaagcactttcactgtggcaaaaatttcgggacttgagcattgaagagtacattcgggtttacaagcgtctgggagtatattttgatgaatattcaggagaatcattttatcgtgaaaaatctcaagaggtcttaaagttgctggagagtaaaggactcctactgaraacaataaaaggaacggctgtagtagatctctctgggaatggcgacccctcctcaatttgtactgtaatgcgaagtgatgggacttctctctatgcaaccagagatcttgcagctgctrtagatcgaatggacaagtataattttgatacaatratatatgtgacagataaaggacaaaaaaagcattttcagcaagtattccaaatgctgaagatcatgggatatgrctgggcagaaaggtgccagcacgtgccctttggagtagtacagggaatgaagactcgaagaggagatgtcactttcctggaagatgttttaaatgagattcaattaaggatgctacagaacatggcttcaattaagacaactaaagaactcaagaacccacaagagactgcagagagggtcgggctcgcagcactcattattcaggacttcaaaggtttactcttatctgactacaagttcagctgggatcgtgttttccagagtcgcggggacacaggagtcttcctacagtacacacacgcccgcctccacagtttggaagagacttttggatgtgggtacctgaatgacttcaacactgcttgtttacaagagccacagtctgtttcaattcttcagcatcttctcaggttcgacgaggtgctttataaatcatctcaggactttcaacccaggcatatcgtcagttaccttctaactttaagtcatcttgcagctgtggcacacaaaacactacaaataaaagatagtcctcctgaagtggctggggccagacttcatcttttcaaagctgtccgttctgtcctagccaatggaatgaarcttcttggaataacacctgtatgtaggatgtaatttccattaaaatggcttttaaaatgtcaagtgaattctagttatctattctgagatgccttgctgttcagaataaatttaaattttttttttttttttttgagatggagtttcgctcttgttgcccaggctggagtgcaatggtgtgatgttggctcactgcaacctccacctcccaggttcaagcaattctcctgcctcagcctcctgagtagctgggattacaggcacgtgccatcaygccaggctaattttgtatttttagtagagacagggtttctctatgttggtcaggctggtctygcactcccgacctcaggttatctgtctgccttggcctcccaaagtgttgggattagaggcatgaaccaccacgcccagccaaagttaaactattattctgtgtcagaatctrtattaaatgtgacttgtcaagttattcagtctttatccttaaataaatgagttatctg

SEQ ID NO: 3817 - DNA, 2441 bp, Homo sapiens
agaggtggacatggcgtgcggctttcgccgcgctattgcttgccaggtatggatcccggagcgcgcagaggagtccctgaggagctagggaccccaaaggcctttcaccgctgcgggccagtcctcagtcagctggagggtgggtcccacggaatcctgttagtttctaccacctcctcccccttctctggagctggtggagcttcagaagtcctgtggagcgtcggctgggatcagtwtgtctcggtgaaaagtaaactttgaaagctttccagagtgttgaatcttccaccrgaaaacttgatcacatcaatatctgcagttccaatttcccaaaaagaagaagtagctgattttcagctttctgtggattctttattggaaaaagacaatgaccattcaagaccagatattcaagttcaagccaagagactagcagagaagctaagatgtgatacagtggtgagtgaaatcagtactggtcaaaggactgtaaatttcaaaataaacagagagctcttaacaaagacagtgctacaacaagtaattgaagatggctcaaaatatggattaaaaagtgaacttttctctggacttccccagaagaagattgtggttgaattcagttcacctaatgttgccaaaaaatttcatgttggacatttgcgttctaccatcataggaaattttatagcaaatctcaaagaagctttaggacatcaagtaataagaataaattaccttggcgattggggcatgcagtttggtcttctgggaactggcttccagctgtttggctatgaggaaaaactgcagtccaatcctctacagcatctctttgaagtttatgtacaagttaataaagaagcagcagatgataaaagtgtagcaaaagcagcacaggagttcttccaacgattggaactgggcgatrtgcaagcactttcactgtggcaaaaatttcgggacttgagcattgaagagtacattcgggtttacaagcgtctgggagtatattttgatgaatattcaggagaatcattttatcgtgaaaaatctcaagaggtcttaaagttgctggagagtaaaggactcctactgaraacaataaaaggaacggctgtagtagatctctctgggaatggcgacccctcctcaatttgtactgtaatgcgaagtgatgggacttctctctatgcaaccagagatcttgcagctgctrtagatcgaatggacaagtataattttgatacaatratatatgtgacagataaaggacaaaaaaagcattttcagcaagtattccaaatgctgaagatcatgggatatgrctgggcagaaaggtgccagcacgtgccctttggagtagtacagggaatgaagactcgaagaggagatgtcactttcctggaagatgttttaaatgagattcaattaaggatgctacagaacatggcttcaattaagacaactaaagaactcaagaacccacaagagactgcagagagggtcgggctcgcagcactcattattcaggacttcaaaggtttactcttatctgactacaagttcagctgggatcgtgttttccagagtcgcggggacacaggagtcttcctacagtacacacacgcccgcctccacagtttggaagagacttttggatgtgggtacctgaatgacttcaacactgcttgtttacaagagccacagtctgtttcaattcttcagcatcttctcaggttcgacgaggtgctttataaatcatctcaggactttcaacccaggcatatcgtcagttaccttctaactttaagtcatcttgcagctgtggcacacaaaacactacaaataaaagatagtcctcctgaagtggctggggccagacttcatcttttcaaagctgtccgttctgtcctagccaatggaatgaarcttcttggaataacacctgtatgtaggatgtaatttccattaaaatggcttttaaaatgtcaagtgaattctagttatctattctgagatgccttgctgttcagaataaatttaaattttttttttttttttttgagatggagtttcgctcttgttgcccaggctggagtgcaatggtgtgatgttggctcactgcaacctccacctcccaggttcaagcaattctcctgcctcagcctcctgagtagctgggattacaggcacgtgccatcaygccaggctaattttgtatttttagtagagacagggtttctctatgttggtcaggctggtctygcactcccgacctcaggttatctgtctgccttggcctcccaaagtgttgggattagaggcatgaaccaccacgcccagccaaagttaaactattattctgtgtcagaatctrtattaaatgtgacttgtcaagttattcagtctttatccttaaataaatgagttatctg

SEQ ID NO: 3818 - DNA, 1727 bp, Homo sapiens
ttattttgtagggaaagggagagcttttgatttttgttaagcattacagataatgttgaagtcactgatatatatttgtttgactgcattccctaccctgcttccctagagagaactgatctcatgatgcaaatgatttattttcacgaatcagttgctttgtgtttgtttctttgtttttgtatttttttttcacctacccagtgaaaaggataaatggcattgtccatctctttaatgaactactgagtgttaagaagaatattcttctttttctcatgttgaaactcaaattacaacatttaaaaaatatgtcatttggaggtcagtggagaggtttgaattagaagcatgtatttggagtagtagaggaagcattgtagaagaggtaaagagacctgggcttttttctcartctgtttttatttgcagtaggattttaaaggagacatttagcttgccagacatcagttttcatgtctataaaataaggtggctagtataagaggaagaattttttgagactaggtsttgctctgtcacccagactggagtgcagtggcatgatctcagctcactgcaacctctgcctcctgggttcaagcaattctcgtgcctaagcctcccgagtagctgggcttaacgggcacatgccaccacgcctggctaatttttgtatttttagtagagatggggtttytccatgttggccaggctggtctcaaactcctgaccttaagtggtccacttgcctcggcctcccaaagtgctgggatctgtgcccagacagaagaggaagaattttataagatgataagaaaaacattctgaataaatactaggttatttctcattttcttgcttttaattttgttttttatttatttattttattttatttacttttttgagacagagtttcgctcttgtcacccaggctggartgcagtggcacaatcttgactcgctgcagtctccacctccaggattcaagcgattcccctgcctcagtctcccaagcagctgggattgtaggtacacacmaccatgcctggctaatttttgtgtgtgtgtgtgtatttttagtagagatggggttttaccatgtggccaggctggtctagaactcaacctcaggtgatccgcctgccttagcctcccaaagtgctgggattacaggcatgagccaccgctctcggcccccttgcttttaattttgaaagtacacataacaccttcttctggtaaaggtatgtctcaatggagaactcatagtgattagtctttgtttaacaactaatgcttttaaggtaacagttctatctyrkttcgatgtctgtctttagagaagtagctgattttcagctttctgtggattctttattggaaaaagacaatgaccattcaagaccagatattcaagttcaagccaagagactagcagagaaggtacgttagcactattatctctttttgacattgtaataaacttgttattaaaaaaagtactttgcaggctatctcagccataatagtgaatttaatagtgtttctttgaggcatcttgtgtaatataatttaaattcattttagccatgtactataaggttataatgatttttcagattagttataaagcactcctcttgagctgacattgttcaattttttgattaaccacttacaggaagactgaagtgttaattaaatttacagattgaagctgg

SEQ ID NO: 3819 - DNA, 1671 bp, Homo sapiens
gcactccccactggccgcagcctgacacgccacgcggccccccagtctcctgccgcccctcccccaggcatggcacagggcctcgcctcactatggcagcagcacggcacagcatgctcgacttcacgctcggcgccaaagctgatggtgagactgttctaaaaggcctccagtccattttccaggagcaggggatggcagagtcggtgcacacctggcaggaccatggctatttagcaacctacacaaaaaagaacggcagctttgccaatttgagaatttacccacatggattggtgttgctggaccttcagagttatgatggtgatgtgcaaggcaaagaagagatcgacagtattttgaacaaagtagaagaaagaatgaaagaattgagtcaggacagtactgggcgggtgaaacgattaccacccatagtgcgaggaggagccattgacagatactggctcaccgccgatgggcgcctggttgaatatgacatagatgaagtggtatatgacgaagattaatcttatcaaaatataaaaattctacactcgaagcagtttggaaatattctcatcgttagtggggatgttaatttggcagagagtgatttggcatatacccgggccatcatgggcagtggcgaagaagattacactggcaaagatgtactcattctgggaggtggagatggaggcatattgtgtgaaatagtcaaactaaaaccaaagatggtcactatggtagagattgacgaaatggtgattgatgggtgtaagaaatacatgcaaaaaacgtatggcgatgtcttagacaatcttaaaggagactgctatcaggttctaatagaagactgtattccggtactcaagaggtacgccaaagaagggagataatttgattatgcgattaatgatttgacagctgttccaatctccacttctccagaagaagattccacatgggagtttctcagactgattcttgaactctcaatgaaagtgttgaaacaggatgggaaatattttacacaggggaactgtgtcagtctgaccraagcactgtcgctctgtgaagaacagctggggcgcctgtattgtcctgtggaattttcaaaggagattctctgtgtcccttcatacttggaatcgtgggtattttacactgtttggaagaaagctaaaccctgacgatcaatagcccctaatcacatgtgctgcaaatagccttcctgacctccatatgctgtacatgacatcgaaatgagtcaggcaattgattgtgaattccttaaagttttcctttttttaataattatttttaatttaaaaaagcaaatggaaaatgtatattttgatgagcttagggtgttatttttttgaaagtcagatgaaggatggttagacagcacagcgaagactgctaaatgcactgatccccccattagaatgtgatttttattcctttttatttctctgtgggcttttgtttttgttttggtagaccttcaatktggatatttggaggagtgaacatcattgttttgctggagggaagatcttgatggtgtttcttttcccaaaaattgacttagatattaaaatttggtgcttataagagaaagttaaaaaaataggattacttcaattaaaattacaaaagagacca

SEQ ID NO: 3820 - DNA, 1684 bp, Homo sapiens
gaccaaccagggaggggcgggctgtcggatgggcgggacctcgcgggaggagctgcggaaagctgagctggaatcaccaaaagcagggaagagtggaaaaagttcaaaagaaggacaagacacagtagaatcagagcaaatttccgtcaggaaaaacagccttgttgctgtcccgtctacagtatctgctaaaataaaagtaccagtctctcagcccatagtgaagaaagacaaacggcaaaattcttcaaggtttagcgcaagcaataatagagaacttcaaaaactaccatccttaaaagatgttcctcctgctgatcaagagaagctttttatccagaagttacgtcagtgttgcgtcctctttgacttygtttctgatccactaagtgacctaaagtggaaggaagtaaaacgagctgctttaagtgaaatggtagaatatatcacccataatcggaatgtgatcacagagcctatttacccagaagtagtccatatgtttgcagttaacatgtttcgaacattaccaccttcctccaatcctacgggagcggaatttgacccggaggaagatgaaccaacgttagaagcagcctggcctcatctacagcttgtttatgaatttttcttaagatttttagagtctccagatttccaacctaatatagcgaagaaatatattgatcagaagtttgtattgcagcttttagagctctttgacagtgaagatcctcgggagagagattttcttaaaaccacccttcacagaatctatgggaaattcctaggcttgagagcttacatcagaaaacagataaataatatattttataggtttatttatgaaacasagcatcataatggcatagcagagttactggaaatattgggaagtataattaatggatttgccttaccactaaaagaagagcacaagattttcttattgaaggtgttactacctttgcacaaagtgaaatctctgagtgtctaccatccccagctggcatactgtgtagtgcagtttttagaaaaggacagcaccctcacggaaccrgtggtgatggcacttctcaaatactggccaaagactcacagtccaaaagaagtaatgttcttaaacgaattagaagagattttagatgtcattgaaccatcagaatttgtgaagatcatkgaacccctcttccggcagttggccaaatgtgtctccagcccacacttccaggtggcagagcgagctctctattactggaataatgaatacatcatgagtttaatcagtgacaacgcagcgaagattctgcccatcatgtttccttccttgtaccgcaactcaaagacccattggaacaagacaatacatggcttgatatacaacgccctgaagctcttcatggagatgaaccaaaagctatttgatgactgtacacaacagttcaaagcagagaaactaaaagagaagctaaaaatgaaagaacgggaagaagcatgggttaaaatagaaaatctagccaaagccaatccccaggtactaaaaaagagaataacatgaaaacgcccagggttacttgaatgtttttataagataggaatatatgtcttcaccatggggggggtctcgatttcactaacgttgtatatgaaaatgtctgcaataaaaagtacttttaaactttgt

SEQ ID NO: 3821 - DNA, 4640 bp, Homo sapiens
cgaaatcatttgtttacagtctggccaaggttgtggcctccagtattccccctaagagatgggatctttgcctaaaagttactgagaaacgaaggctgcaaaaagccggaaaatatcccagcttttaaggcacactgacagccaaacagaacgctctttccgtttgcagtttttttagtgtcattttaagttgcagcttccggccaatcagcgagcttcatgcctgctgacatcacgaaccagccagttccctccagctgcagagagcttcagtttgtctttttttttttaaactaaaatggaggctggtttcttgccttaaggagcccattgcctttcccgctgaagtctagatgttgacatgtaataaagcgggcagcaggatggtggtggatgcggccaactccaatgggcctttccagcccgtggtccttctccatattcgagatgttcctcctgctgatcaagagaagctttttatccagaagttacgtcagtgttgcgtcctctttgacttygtttctgatccactaagtgacctaaagtggaaggaagtaaaacgagctgctttaagtgaaatggtagaatatatcacccataatcggaatgtgatcacagagcctatttacccagaagtagtccatatgtttgcagttaacatgtttcgaacattaccaccttcctccaatcctacgggagcggaatttgacccggaggaagatgaaccaacgttagaagcagcctggcctcatctacagcttgtttatgaatttttcttaagatttttagagtctccagatttccaacctaatatagcgaagaaatatattgatcagaagtttgtattgcagcttttagagctctttgacagtgaagatcctcgggagagagattttcttaaaaccacccttcacagaatctatgggaaattcctaggcttgagagcttacatcagaaaacagataaataatatattttataggtttatttatgaaacasagcatcataatggcatagcagagttactggaaatattgggaagtataattaatggatttgccttaccactaaaagaagagcacaagattttcttattgaaggtgttactacctttgcacaaagtgaaatctctgagtgtctaccatccccagctggcatactgtgtagtgcagtttttagaaaaggacagcaccctcacggaaccrgtggtgatggcacttctcaaatactggccaaagactcacagtccaaaagaagtaatgttcttaaacgaattagaagagattttagatgtcattgaaccatcagaatttgtgaagatcatkgaacccctcttccggcagttggccaaatgtgtctccagcccacacttccaggtggcagagcgagctctctattactggaataatgaatacatcatgagtttaatcagtgacaacgcagcgaagattctgcccatcatgtttccttccttgtaccgcaactcaaagacccattggaacaagacaatacatggcttgatatacaacgccctgaagctcttcatggagatgaaccaaaagctatttgatgactgtacacaacagttcaaagcagagaaactaaaagagaagctaaaaatgaaagaacgggaagaagcatgggttaaaatagaaaatctagccaaagccaatccccagtacacagtgtatagtcaagccagcaccatgagcattccggttgcaatggagacagatgggcctttatttgaagatgtgcagatgctgagaaagacagtgaaggacgaggctcatcaggcacagaaagatccgaagaaggaccgtcctcttgcackccgcaagtccgagctgcctcaggacccccacaccaagaaagccttggaagctcactgcaggsccgatgagctggcctcccaggacggccgctagcctccggggcgccgcgtcggggccgggcccgccagttcttttccggattctgtagaaaatacatacttcctgtgccataccaatcagttacactcaaagctttcttggaccccgttccgtaggcaataacgtgcgtccgcctcagcgcgagattaggagttcaaacaatggtgacttcccagagcccgctggcagagccgcgggttgacgacggtgtcctcgcagtgtcgccrccaccccagcgtagtccaagtcagactatttcacaaagtcagagcgataggaaagcaccctgcccttcatcttcatgttctcccaaatggaacttaggatcttttaacataggtggttctgtgataacatcagtgttttccaaatcaaaggaacgctttaaaaaataggacctattttttaagactttacagcctttgaaatggtttccacgtgattgttacgccagcagttctcgttttgtttgtttttcaatctcagtgaaatggctctttgctttcragttctcacgcaacgtactgggcaaatgacaatcctcagccgctggtattttctaaggggtctcttcrctttgatgagtgacatgaacaccgtgtctccttctcttgtgtgtacctaaagccatatttccaagtctgtggtactccaggattccaggagtaagcctgtagaagagatttattttaaaagagattgctctgaaatttatcttaaaagagcttgctctgtctaccttgacagaaattggagttttaaaattatgtgttaatatttttatttgcagatttcgtttccgtcaacttaaacattgttgcccttcaacaaggctcttgaattaataaaattatagtctctaagaattccacattttatggaaagttagagcaaaatcattttgagttaagccagttcttagcctaatgcaaactgcagcgcctttaagcataaagtaacacaacagcattgcacggggccggcactgccgctgccttcactgaaggctgcagtgctgttctgagagcttggaggaggcaccagcgaggatgacgtttagtggagctctttctgttgaaaagagctcacgttatcaacaccttgtaaggaaaatacagtgtctgagttttcatcggtcttcacatgctgctatatattccacagagttccttgcatgtactgagcttttgttttagatggaatagcacaaggagaaaaatctttaaacttagtgctttgtctattctttatttctctcagggtggccagtattttgacttatttatcctgcttgaaagctacttgagatgtgtactgctattctaaacacgtgatctagtttctttcatctctggcataagattatataacttaatgttaagtgtcttgaggcataaaagacaaaatgtggcttattttaggatctgttttttcatcgaggtctcgggtatcctttcaaagatagtgaraagcagacactgctccttgtgcagctctggtacctsctgcccactgctgtcacttcaagccactggcaatgcttctgtcctcgtgtcttggaggaaaatcacctggggggaggggacttcttgtggtaagagcaagtgcaggtatgaaatgcgaagattgccccagctaaaagtggacaagtccgctttgtgagatgaatacttcctgagaaacttgacaagtatctctccattttaccattatgaaaactatcattaaaaaaaacagtttagatgccttctccttttgagggaaaaagggtgctttttattgtataaagcagcgtcttatgtattttgatataccattgtttgaacttccgtctttagctgatagattctcaaatatccttgattttggatgttcagtatgtttgtgagagaggtttctgggaagactctctttttgccctcgggaaaaagcaaaatatcaatgtttgggtgactgtgtaaagctcagtgtgtaagaacatctttttgtctwggttttctttctgctctttattgaagacaaacactcaccaaaaagaaaaataaaagttttcagagaaactaattttctttggcaagagtattacttaatattttggcctcctaaagtttccctagttagtactcggactcctgtgctaattgtcagcttacatatcattgtatagagactgtttattctgtaccaaactgatttcaaaagtactacattgaaaataaaccggtgactgtttttcttcataaagttctgcgtttggcatcttcactctttccaaaatgtatctgtacatcagaaatgtcacwattccaagtgtctttttagtgtggctttagtatggcttccttttaatattgtacatacattgtatctttgttttatggtaataagtaataaaaatgtagacttcatattttgtacaaaatgtcctatgtacagaataaaaaagttcatagaaacagcaaatataggtaagtggcacaattatttttctttagaaaatatctgtaactttatgcattagtgaaatgttaagtaccgacatattttttaacattttgtaattcaaaactttttgttttgacattgtttatgaagagaaacttcatacacttgccatttaatatgctcttttatctaattttcaaaaactctaaaaaacggtgtatcatatggactaaataaagaacatgtgaattttattgctca

SEQ ID NO: 3822 - DNA, 4523 bp, Homo sapiens
cgaaatcatttgtttacagtctggccaaggttgtggcctccagtattccccctaagagatgggatctttgcctaaaagttactgagaaacgaaggctgcaaaaagccggaaaatatcccagcttttaaggcacactgacagccaaacagaacgctctttccgtttgcagtttttttagtgtcattttaagttgcagcttccggccaatcagcgagcttcatgcctgctgacatcacgaaccagccagttccctccagctgcagagagcttcagtttgtctttttttttttaaactaaaatggaggctggtttcttgccttaaggagcccattgcctttcccgctgaagtctagatgttgacatgtaataaagcgggcagcaggatggtggtggatgcggccaactccaatgggcctttccagcccgtggtccttctccatattcgagatgttcctcctgctgatcaagagaagctttttatccagaagttacgtcagtgttgcgtcctctttgacttygtttctgatccactaagtgacctaaagtggaaggaagtaaaacgagctgctttaagtgaaatggtagaatatatcacccataatcggaatgtgatcacagagcctatttacccagaagtagtccatatgtttgcagttaacatgtttcgaacattaccaccttcctccaatcctacgggagcggaatttgacccggaggaagatgaaccaacgttagaagcagcctggcctcatctacagcttgtttatgaatttttcttaagatttttagagtctccagatttccaacctaatatagcgaagaaatatattgatcagaagtttgtattgcagcttttagagctctttgacagtgaagatcctcgggagagagattttcttaaaaccacccttcacagaatctatgggaaattcctaggcttgagagcttacatcagaaaacagataaataatatattttataggtttatttatgaaacasagcatcataatggcatagcagagttactggaaatattgggaagtataattaatggatttgccttaccactaaaagaagagcacaagattttcttattgaaggtgttactacctttgcacaaagtgaaatctctgagtgtctaccatccccagctggcatactgtgtagtgcagtttttagaaaaggacagcaccctcacggaaccrgtggtgatggcacttctcaaatactggccaaagactcacagtccaaaagaagtaatgttcttaaacgaattagaagagattttagatgtcattgaaccatcagaatttgtgaagatcatkgaacccctcttccggcagttggccaaatgtgtctccagcccacacttccaggtggcagagcgagctctctattactggaataatgaatacatcatgagtttaatcagtgacaacgcagcgaagattctgcccatcatgtttccttccttgtaccgcaactcaaagacccattggaacaagacaatacatggcttgatatacaacgccctgaagctcttcatggagatgaaccaaaagctatttgatgactgtacacaacagttcaaagcagagaaactaaaagagaagctaaaaatgaaagaacgggaagaagcatgggttaaaatagaaaatctagccaaagccaatccccaggcacagaaagatccgaagaaggaccgtcctcttgcackccgcaagtccgagctgcctcaggacccccacaccaagaaagccttggaagctcactgcaggsccgatgagctggcctcccaggacggccgctagcctccggggcgccgcgtcggggccgggcccgccagttcttttccggattctgtagaaaatacatacttcctgtgccataccaatcagttacactcaaagctttcttggaccccgttccgtaggcaataacgtgcgtccgcctcagcgcgagattaggagttcaaacaatggtgacttcccagagcccgctggcagagccgcgggttgacgacggtgtcctcgcagtgtcgccrccaccccagcgtagtccaagtcagactatttcacaaagtcagagcgataggaaagcaccctgcccttcatcttcatgttctcccaaatggaacttaggatcttttaacataggtggttctgtgataacatcagtgttttccaaatcaaaggaacgctttaaaaaataggacctattttttaagactttacagcctttgaaatggtttccacgtgattgttacgccagcagttctcgttttgtttgtttttcaatctcagtgaaatggctctttgctttcragttctcacgcaacgtactgggcaaatgacaatcctcagccgctggtattttctaaggggtctcttcrctttgatgagtgacatgaacaccgtgtctccttctcttgtgtgtacctaaagccatatttccaagtctgtggtactccaggattccaggagtaagcctgtagaagagatttattttaaaagagattgctctgaaatttatcttaaaagagcttgctctgtctaccttgacagaaattggagttttaaaattatgtgttaatatttttatttgcagatttcgtttccgtcaacttaaacattgttgcccttcaacaaggctcttgaattaataaaattatagtctctaagaattccacattttatggaaagttagagcaaaatcattttgagttaagccagttcttagcctaatgcaaactgcagcgcctttaagcataaagtaacacaacagcattgcacggggccggcactgccgctgccttcactgaaggctgcagtgctgttctgagagcttggaggaggcaccagcgaggatgacgtttagtggagctctttctgttgaaaagagctcacgttatcaacaccttgtaaggaaaatacagtgtctgagttttcatcggtcttcacatgctgctatatattccacagagttccttgcatgtactgagcttttgttttagatggaatagcacaaggagaaaaatctttaaacttagtgctttgtctattctttatttctctcagggtggccagtattttgacttatttatcctgcttgaaagctacttgagatgtgtactgctattctaaacacgtgatctagtttctttcatctctggcataagattatataacttaatgttaagtgtcttgaggcataaaagacaaaatgtggcttattttaggatctgttttttcatcgaggtctcgggtatcctttcaaagatagtgaraagcagacactgctccttgtgcagctctggtacctsctgcccactgctgtcacttcaagccactggcaatgcttctgtcctcgtgtcttggaggaaaatcacctggggggaggggacttcttgtggtaagagcaagtgcaggtatgaaatgcgaagattgccccagctaaaagtggacaagtccgctttgtgagatgaatacttcctgagaaacttgacaagtatctctccattttaccattatgaaaactatcattaaaaaaaacagtttagatgccttctccttttgagggaaaaagggtgctttttattgtataaagcagcgtcttatgtattttgatataccattgtttgaacttccgtctttagctgatagattctcaaatatccttgattttggatgttcagtatgtttgtgagagaggtttctgggaagactctctttttgccctcgggaaaaagcaaaatatcaatgtttgggtgactgtgtaaagctcagtgtgtaagaacatctttttgtctwggttttctttctgctctttattgaagacaaacactcaccaaaaagaaaaataaaagttttcagagaaactaattttctttggcaagagtattacttaatattttggcctcctaaagtttccctagttagtactcggactcctgtgctaattgtcagcttacatatcattgtatagagactgtttattctgtaccaaactgatttcaaaagtactacattgaaaataaaccggtgactgtttttcttcataaagttctgcgtttggcatcttcactctttccaaaatgtatctgtacatcagaaatgtcacwattccaagtgtctttttagtgtggctttagtatggcttccttttaatattgtacatacattgtatctttgttttatggtaataagtaataaaaatgtagacttcatattttgtacaaaatgtcctatgtacagaataaaaaagttcatagaaacagcaaatataggtaagtggcacaattatttttctttagaaaatatctgtaactttatgcattagtgaaatgttaagtaccgacatattttttaacattttgtaattcaaaactttttgttttgacattgtttatgaagagaaacttcatacacttgccatttaatatgctcttttatctaattttcaaaaactctaaaaaacggtgtatcatatggactaaataaagaacatgtgaattttattgctca

SEQ ID NO: 3823 - DNA, 1829 bp, Homo sapiens
cgaaatcatttgtttacagtctggccaaggttgtggcctccagtattccccctaagagatgggatctttgcctaaaagttactgagaaacgaaggctgcaaaaagccggaaaatatcccagcttttaaggcacactgacagccaaacagaacgctctttccgtttgcagtttttttagtgtcattttaagttgcagcttccggccaatcagcgagcttcatgcctgctgacatcacgaaccagccagttccctccagctgcagagagcttcagtttgtctttttttttttaaactaaaatggaggctggtttcttgccttaaggagcccattgcctttcccgctgaagtctagatgttgacatgtaataaagcgggcagcaggatggtggtggatgcggccaactccaatgggcctttccagcccgtggtccttctccatattcgagatgttcctcctgctgatcaagagaagctttttatccagaagttacgtcagtgttgcgtcctctttgacttygtttctgatccactaagtgacctaaagtggaaggaagtaaaacgagctgctttaagtgaaatggtagaatatatcacccataatcggaatgtgatcacagagcctatttacccagaagtagtccatatgtttgcagttaacatgtttcgaacattaccaccttcctccaatcctacgggagcggaatttgacccggaggaagatgaaccaacgttagaagcagcctggcctcatctacagcttgtttatgaatttttcttaagatttttagagtctccagatttccaacctaatatagcgaagaaatatattgatcagaagtttgtattgcagcttttagagctctttgacagtgaagatcctcgggagagagattttcttaaaaccacccttcacagaatctatgggaaattcctaggcttgagagcttacatcagaaaacagataaataatatattttataggtttatttatgaaacasagcatcataatggcatagcagagttactggaaatattgggaagtataattaatggatttgccttaccactaaaagaagagcacaagattttcttattgaaggtgttactacctttgcacaaagtgaaatctctgagtgtctaccatccccagctggcatactgtgtagtgcagtttttagaaaaggacagcaccctcacggaaccrgtggtgatggcacttctcaaatactggccaaagactcacagtccaaaagaagtaatgttcttaaacgaattagaagagattttagatgtcattgaaccatcagaatttgtgaagatcatkgaacccctcttccggcagttggccaaatgtgtctccagcccacacttccaggtggcagagcgagctctctattactggaataatgaatacatcatgagtttaatcagtgacaacgcagcgaagattctgcccatcatgtttccttccttgtaccgcaactcaaagacccattggaacaagacaatacatggcttgatatacaacgccctgaagctcttcatggagatgaaccaaaagctatttgatgactgtacacaacagttcaaagcagagaaactaaaagagaagctaaaaatgaaagaacgggaagaagcatgggttaaaatagaaaatctagccaaagccaatccccaggtactaaaaaagagaataacatgaaaacgcccagggttacttgaatgtttttataagataggaatatatgtcttcaccatggggggggtctcgatttcactaacgttgtatatgaaaatgtctgcaataaaaagtacttttaaactttgt

SEQ ID NO: 3824 - DNA, 1376 bp, Homo sapiens
cgaaatcatttgtttacagtctggccaaggttgtggcctccagtattccccctaagagatgggatctttgcctaaaagttactgagaaacgaaggctgcaaaaagccggaaaatatcccagcttttaaggcacactgacagccaaacagaacgctctttccgtttgcagtttttttagtgtcattttaagttgcagcttccggccaatcagcgagcttcatgcctgctgacatcacgaaccagccagttccctccagctgcagagagcttcagtttgtctttttttttttaaactaaaatggaggctggtttcttgccttaaggagcccattgcctttcccgctgaagtctagatgttgacatgtaataaagcgggcagcaggatggtggtggatgcggccaactccaatgggcctttccagcccgtggtccttctccatattcgagatgttcctcctgctgatcaagagaagctttttatccagaagttacgtcagtgttgcgtcctctttgacttygtttctgatccactaagtgacctaaagtggaaggaagtaaaacgagctgctttaagtgaaatggtagaatatatcacccataatcggaatgtgatcacagagcctatttacccagaagtagtccatatgtttgcagttaacatgtttcgaacattaccaccttcctccaatcctacgggagcggaatttgacccggaggaagatgaaccaacgttagaagcagcctggcctcatctacagcttgtttatgaatttttcttaagatttttagagtctccagatttccaacctaatatagcgaagaaatatattgatcagaagtttgtattgcagcttttagagctctttgacagtgaagatcctcgggagagagattttcttaaaaccacccttcacagaatctatgggaaattcctaggcttgagagcttacatcagaaaacagataaataatatattttataggtttatttatgaaacasagcatcataatggcatagcagagttactggaaatattgggaagtataattaatggatttgccttaccactaaaagaagagcacaagattttcttattgaaggtgttactacctttgcacaaagtgaaatctctgagtgtctaccatccccagctggcatactgtgtagtgcagtttttagaaaaggacagcaccctcacggaaccrgtggtgatggcacttctcaaatactggccaaagactcacagtccaaaagaagtaatgttcttaaacgaattagaagagattttagatgtcattgaaccatcagaatttgtgaagatcatkgaacccctcttccggcagttggccaaatgtgtctccagcccacacttccag

SEQ ID NO: 3825 - DNA, 4553 bp, Homo sapiens
ggcggccgcgggggcgcgacggccggggcgggggcgctgctgctgcgggggcaggcggcggcaggggcggcggcggcggcggcggcccgctccagccatgccgaataaaaacaagaaggagaaagaatcaccaaaagcagggaagagtggaaaaagttcaaaagaaggacaagacacagtagaatcagagcaaatttccgtcaggaaaaacagccttgttgctgtcccgtctacagtatctgctaaaataaaagtaccagtctctcagcccatagtgaagaaagacaaacggcaaaattcttcaaggtttagcgcaagcaataatagagaacttcaaaaactaccatccttaaaagatgttcctcctgctgatcaagagaagctttttatccagaagttacgtcagtgttgcgtcctctttgacttygtttctgatccactaagtgacctaaagtggaaggaagtaaaacgagctgctttaagtgaaatggtagaatatatcacccataatcggaatgtgatcacagagcctatttacccagaagtagtccatatggtaatttgcagttaacatgtttcgaacattaccaccttcctccaatcctacgggagcggaatttgacccggaggaagatgaaccaacgttagaagcagcctggcctcatctacagcttgtttatgaatttttcttaagatttttagagtctccagatttccaacctaatatagcgaagaaatatattgatcagaagtttgtattgcagcttttagagctctttgacagtgaagatcctcgggagagagattttcttaaaaccacccttcacagaatctatgggaaattcctaggcttgagagcttacatcagaaaacagataaataatatattttataggtttatttatgaaacasagcatcataatggcatagcagagttactggaaatattgggaagtataattaatggatttgccttaccactaaaagaagagcacaagattttcttattgaaggtgttactacctttgcacaaagtgaaatctctgagtgtctaccatccccagctggcatactgtgtagtgcagtttttagaaaaggacagcaccctcacggaaccrgtggtgatggcacttctcaaatactggccaaagactcacagtccaaaagaagtaatgttcttaaacgaattagaagagattttagatgtcattgaaccatcagaatttgtgaagatcatkgaacccctcttccggcagttggccaaatgtgtctccagcccacacttccaggtggcagagcgagctctctattactggaataatgaatacatcatgagtttaatcagtgacaacgcagcgaagattctgcccatcatgtttccttccttgtaccgcaactcaaagacccattggaacaagacaatacatggcttgatatacaacgccctgaagctcttcatggagatgaaccaaaagctatttgatgactgtacacaacagttcaaagcagagaaactaaaagagaagctaaaaatgaaagaacgggaagaagcatgggttaaaatagaaaatctagccaaagccaatccccagtacacagtgtatagtcaagccagcaccatgagcattccggttgcaatggagacagatgggcctttatttgaagatgtgcagatgctgagaaagacagtgaaggacgaggctcatcaggcacagaaagatccgaagaaggaccgtcctcttgcackccgcaagtccgagctgcctcaggacccccacaccaagaaagccttggaagctcactgcaggsccgatgagctggcctcccaggacggccgctagcctccggggcgccgcgtcggggccgggcccgccagttcttttccggattctgtagaaaatacatacttcctgtgccataccaatcagttacactcaaagctttcttggaccccgttccgtaggcaataacgtgcgtccgcctcagcgcgagattaggagttcaaacaatggtgacttcccagagcccgctggcagagccgcgggttgacgacggtgtcctcgcagtgtcgccrccaccccagcgtagtccaagtcagactatttcacaaagtcagagcgataggaaagcaccctgcccttcatcttcatgttctcccaaatggaacttaggatcttttaacataggtggttctgtgataacatcagtgttttccaaatcaaaggaacgctttaaaaaataggacctattttttaagactttacagcctttgaaatggtttccacgtgattgttacgccagcagttctcgttttgtttgtttttcaatctcagtgaaatggctctttgctttcragttctcacgcaacgtactgggcaaatgacaatcctcagccgctggtattttctaaggggtctcttcrctttgatgagtgacatgaacaccgtgtctccttctcttgtgtgtacctaaagccatatttccaagtctgtggtactccaggattccaggagtaagcctgtagaagagatttattttaaaagagattgctctgaaatttatcttaaaagagcttgctctgtctaccttgacagaaattggagttttaaaattatgtgttaatatttttatttgcagatttcgtttccgtcaacttaaacattgttgcccttcaacaaggctcttgaattaataaaattatagtctctaagaattccacattttatggaaagttagagcaaaatcattttgagttaagccagttcttagcctaatgcaaactgcagcgcctttaagcataaagtaacacaacagcattgcacggggccggcactgccgctgccttcactgaaggctgcagtgctgttctgagagcttggaggaggcaccagcgaggatgacgtttagtggagctctttctgttgaaaagagctcacgttatcaacaccttgtaaggaaaatacagtgtctgagttttcatcggtcttcacatgctgctatatattccacagagttccttgcatgtactgagcttttgttttagatggaatagcacaaggagaaaaatctttaaacttagtgctttgtctattctttatttctctcagggtggccagtattttgacttatttatcctgcttgaaagctacttgagatgtgtactgctattctaaacacgtgatctagtttctttcatctctggcataagattatataacttaatgttaagtgtcttgaggcataaaagacaaaatgtggcttattttaggatctgttttttcatcgaggtctcgggtatcctttcaaagatagtgaraagcagacactgctccttgtgcagctctggtacctsctgcccactgctgtcacttcaagccactggcaatgcttctgtcctcgtgtcttggaggaaaatcacctggggggaggggacttcttgtggtaagagcaagtgcaggtatgaaatgcgaagattgccccagctaaaagtggacaagtccgctttgtgagatgaatacttcctgagaaacttgacaagtatctctccattttaccattatgaaaactatcattaaaaaaaacagtttagatgccttctccttttgagggaaaaagggtgctttttattgtataaagcagcgtcttatgtattttgatataccattgtttgaacttccgtctttagctgatagattctcaaatatccttgattttggatgttcagtatgtttgtgagagaggtttctgggaagactctctttttgccctcgggaaaaagcaaaatatcaatgtttgggtgactgtgtaaagctcagtgtgtaagaacatctttttgtctwggttttctttctgctctttattgaagacaaacactcaccaaaaagaaaaataaaagttttcagagaaactaattttctttggcaagagtattacttaatattttggcctcctaaagtttccctagttagtactcggactcctgtgctaattgtcagcttacatatcattgtatagagactgtttattctgtaccaaactgatttcaaaagtactacattgaaaataaaccggtgactgtttttcttcataaagttctgcgtttggcatcttcactctttccaaaatgtatctgtacatcagaaatgtcacwattccaagtgtctttttagtgtggctttagtatggcttccttttaatattgtacatacattgtatctttgttttatggtaataagtaataaaaatgtagacttcatattttgtacaaaatgtcctatgtacagaataaaaaagttcatagaaacagcaaatataggtaagtggcacaattatttttctttagaaaatatctgtaactttatgcattagtgaaatgttaagtaccgacatattttttaacattttgtaattcaaaactttttgttttgacattgtttatgaagagaaacttcatacacttgccatttaatatgctcttttatctaattttcaaaaactctaaaaaacggtgtatcatatggactaaataaagaacatgtgaattttattgctca

SEQ ID NO: 3826 - DNA, 2246 bp, Homo sapiens
ggagctggtgacagagaccagataccggaccagcacttgggttttctgactcacggttctgggctcacccctctctgagcatgcactgagcctgctcttgcaggtttctttatcacagggatctatctacacggtactttctgctctcagctttttacagtggtgtagagtgcagtgcagctgaaaccaggttagttgatcttatggtgtcatctagaaaaacaagagatgcagattctgggtcacgaagatgttcctcctgctgatcaagagaagctttttatccagaagttacgtcagtgttgcgtcctctttgacttygtttctgatccactaagtgacctaaagtggaaggaagtaaaacgagctgctttaagtgaaatggtagaatatatcacccataatcggaatgtgatcacagagcctatttacccagaagtagtccatatggtttgcagttaacatgtttcgaacattaccaccttcctccaatcctacgggagcggaatttgacccggaggaagatgaaccaacgttagaagcagcctggcctcatctacaggtatcgggctctgggtgatagactcggagggcactggtgacacatgggaatggcctgggatccacagagcgggcgcactggtctggccagatggacctctcctcctcagtagcatgggcctcgtaaacccatatgtacaagaaaaatatttcagcagaataaagttaatgtgtgtgtttgaccactttacaacagccagtgaagatgtgtaattgtgagtatgttctcagtgaagatggcckctgtgttgatggccgttgaattgaattcaggcccagaggtcctaagccaacaatctcccagtttttgctcctcatatttaataggtgcctgctgggcccccaggtcctgcgctggccactgcctttccccagggcatttgtaaggcagaaggttggttggcaaggaggcgccagggtcggcatgagcagagcgggrgccaggtgtgcgggtgggagggccatccatccgtgacaggcggcccacgctgtcccacccagcatgtctgcacagggaaagaattgtcccagctccaggaggtcatgattctgggtccacatcttagggccctcttacctggcagccccagagttcctgtgtatttggttggctctgcgccttggcattgtgggacactcctaggcgacaggctgcaaatcccccctgcagagttgggtcatggcttggtttgtggcatctgtgccctgtagtccctgaacagtgtactataactgatgacatcagccatggagatcattttgtttaaatgccgtttaagggtgtagtctgtgggtttcaccaaataaaataattaccatcaccatttatcattgaattaagccatgtaatttagcattaattctgtagatatgtggctttgagaggctaatatttgcataccaataaagattcaatttctggtatattttaayckccattcaataaaatctcatgttatttgactcattgttttttttcctcctagcttgtttatgaatttttcttaagatttttagagtctccagatttccaacctaatatagcgaagaaatatattgatcagaagtttgtattgcagcttttagagctctttgacagtgaagatcctcgggagagagattttcttaaaaccacccttcacagaatctatgggaaattcctaggcttgagagcttacatcagaaaacagataaataatatattttataggtttatttatgaaacasagcatcataatggcatagcagagttactggaaatattgggaagtataattaatggatttgccttaccactaaaagaagagcacaagattttcttattgaaggtgttactacctttgcacaaagtgaaatctctgagtgtctaccatccccagctggcatactgtgtagtgcagtttttagaaaaggacagcaccctcacggaaccrtggctgaacaattcaccaaatgccacattgcgtttaccacagacagaggctgctcccacctaagccactgtcccagcatctctatcccgccatccactgtctgtcagcctgaccctaaccttctccaccgagggctcggtgaatgagcctcaccctattctctcttccaccgaaaagtaacacaaaagcagagaatgtttgtaaaagtttttaattcccactaatatagtaaataaagtgaatatcactttg

SEQ ID NO: 3827 - DNA, 2003 bp, Homo sapiens
atccagtccgggttttgcggcggagcgggcgggctgcgcgtgcggcggcttcaactgtcgcggtaggcagcagcaggctgaagggatcatggtgcagtacgagctgtgggccgcgctgcctggcgcctccggggtcgccctggcctgctgcttcgtggcggcggccgtggccctgcgctggtccgggcgccggacggcgcggggcgcggtggtccgggcgcgacagaggcagcgagcgggcctggagaacatggacagggcggcgcagcgcttccggctccagaacccagacctggactcagaggcgctgctagccctgcccctgcctcagctggtgcagaagttacacagtagagagctggcccctgaggccgtgctcttcacctatgtgggaaaggcctgggaagtgaacaaagggaccaactgtgtgacctcctatctggctgactgtgagactcagctgtctcaggccmcaaggcagggcctgctctatggcgtccctgtgagcctcaaggagtgcttcacctacaagggccaggactccacgctgggcttgagcctgaatgaaggggtgccggcggagtgcgacagcgtagtggtgcatgtgctgaagctgcagggtgccgtgcccttcgtgcacaccaatgttccacagtccatgttcagctatgactgcagtaaccccctctttggccagaccgtgaacccatgraagtcctccaaaagcccagggggctcctcagggggtgaaggggccctcatcgggtctggaggctcccccctgggcttaggcactgatatcggaggcagcatccgcttcccctcctccttctgcggcatctgcggcctcaagcccacagggaaccgcctcagcaagagtggcctgaagggctgtgtctatggacaggaggcagtgcgtctctccgtgggccccatggcccgggacgtggagagcctggcactgtgcctgcgagccctgctgtgygaggacatgttccgcttggaccccactgtgcctcccttgcccttcagagaagaggtctacaccagctctcagcccctgcgtgtggggtactatgagactgacaactataccatgccctccccggccatgaggcgggccgtgctggagaccaaacagagccttgaggctgcggggcacacgctggttcccttcttgccaagcaacataccccatgctctggagaccctgtcaacaggtgggctcttcagtgatggtggccacaccttcctacagaacttcaaaggtgatttcgtggacccctgcctgggggacctggtctcaattctgaagcttccccaatggcttaaaggactgctggccttcctggtgaagcctctgctgccaaggctgtcagctttcctcagcaacatgaagtctcgttcggctggaaaactctgggaactgcagcacgagatcgaggtgtaccgcaaaaccgtgattgcccagtggagggcgctggacctggatgtggtgctgacccccatgctggcccctgctctggacttgaatgccccaggcagggccacaggggccgtcagctacactatgctgtacaactgcctggacttccctgcaggggtggtgcctgtcaccacggtgactgctgaggacgaggcccagatggaacattacaggggctactttggggatatctgggacaagatgctgcagaagggcatgaagaagagtgtggggctgccggtggccgtgcagtgtgtggctctgccctggcaagaagagttgtgtctgcggttcatgcgggaggtggagcgactgatgacccctgaaaagcagtcatcctgatggctctggctccagaggacctgagactcacactctctgcagcccagcctagtcagggcacagctgccctgctgccacagcaaggaaatgtcctgcatggggcagaggcttccgtgtcctctcccccaagtggcagcccatgggtatgacataggccaaggcccaactaacagtc

SEQ ID NO: 3828 - DNA, 2870 bp, Homo sapiens
cctcagcttcccgagtagctgggactgcaggcgccagcaacctcgcccggctaattttttgtatttttggtagagacggggtttcaccgtgttagccaggagggtctcgatctcctgacctcgtgatctgctcgcctcggcctcccaaagtgctgggattacaggcgtgagccaccacgcccggccaggtcccgaaacttaagcttcatttgtttcactgcaaatctgcttctgcctacaagcctrgtctcattttcctctacctaaggatcttcctccatgcaatttcggcctaggaggcccttcccgccccttttcgcctagctaactctttcggtactcaaccaccaactcctaatcctccctggtcccccaagtgggctaggggcttcttkggagtccctcgcactgctctaagcatccaggcagagtcattattccgggtgccaggttgctctttttccagcagccttcaggggactcctggctgggcggagtctgtagaggcgcgcggagtcctgggagagcgtcagatgtatttcctttcccttttttcgctcgtgtcccgccgggtggcgctcaccacctccccggaacacgcgagtctcctgtcgcggttccggtcggaattaccccgtggagcacgccgatatggctgcgctgacactgaggggtgtccgggagctgctgaagcgtgtggacctcgcgacggtcccgcggagacatcgatataagaagaaatggcccggtcgccctcacccctcggaaaataccatagcgaccttgcctgcactcctgggtctccgccgccttgcaggaaaggattcagccccttcctcaacctcgagctgcctctggcgaccgggcaaggttacagcgaccaccctgtccatactgccggcccaaaccctggcaaaaggctgccacagagcccaaattccctgctgttcgactggctttgcagaattttgacatgrcttacagtgtgcagtttggagatctttggccatcaatccgtgtcagtctcctctcagagcagaagtatggtgcactggtcaataactttgctgcctgggatcatgtaagtgctaagctggagcagctgagtgccaaggaytttgtgaatgaagccatctcccactgggaactgcagtctgagggtggccaatctgcagccccatcccctgcctcctgggcctgcagtccgaamcttcgatgcttcacttttgacagaggggatatcagtcgcttccctcctgccagacctggcagcctgggtgtcatggagtactacctgatggatgctgcctccttgctgcctgttctggccctcggcctgcagcctggggacatcgtgcttgacctatgtgcagctcctgggggaaagacactagcgttgcttcagactggctgttgccgcaatcttgctgccaatgatctctccccgtcccgaatagccagactacagaagatccttcacagctatgtgcctgaagagatcagggatggaaatcaagttcgagttacctcatgggatggcaggaaatggggagaactggagggggacacctatgaccgggtgctggtggatgtgccctgtaccacagaccgccactcccttcatgaggaggagaacaacatctttaagcggtcaaggaagaaggagcgacagatattgcctgtgctgcaagtgcagcttcttgcggctggactccttgccaccaaaccaggaggccatgttgtctattctacctgctcactctcacacttacagaacgagtatgtggtgcaaggtgccattgagctcctggccaatcaatacagcatccaggtacaggtggaagatctgactcacttccgaagggttttcatggacacattttgtttcttctcatcctgtcaggttggggagctggtartaccaaacctcatggccaattttggcccyatgtacttctgcaaaatgcgtaggctgacatagtatcacccaatccctgaagcaagaatacaaagggtatactctgttggatgcaccagaaactggaaactgggaccagtggcagagatgcactctcggtcctgtctccatcctgttcgtgtctttctgcagttttcggcaataagaagtagaagatttgctgtcctgctgtccaattgtggagcatcagcaggtttccaactcactcattamcccctaccccatctccaggcctgtactaaagtttgctgccygcttaggggcttagaaggagaagccagtgagcaggctcacactaagttgtaaacataggagaagcatttggccaataaagttgttgaaactctatagacctggggctgcagttggggacttcatgtcagtgcaaatgccattagttccatttgtaccagccagttactgagcccctgtcacccttgaagtgagttccacctgaccagtcttgagcagccaacaggctcaattaagcccgcctggtttttccatatggctcatgatctaatttaaggaacaagtaactaaaaatgttaagccagtgcaaaataatctgcttacctactcacattggaaaaaccctctgagctgaataattctggccattcctgctgtcaacaatactgctgcccaaatgtggcttaggaggctgcttctgccacaaaaccgtcatactcttgtgcgtgccttgttctttgttcattcatctagcaggtattcccagacctcgtgtatgacaggtagctagggagctcttggagatgtagcagttgggattgtgggagattactgggcttcctcatcctttagaatggtaactctccttttgctttctgaacacctaggaatttcctgatgttttgttttgttggattcc

SEQ ID NO: 3829 - DNA, 2099 bp, Homo sapiens
atccagtccgggttttgcggcggagcgggcgggctgcgcgtgcggcggcttcaactgtcgcggtaggcagcagcaggctgaagggatcatggtgcagtacgagctgtgggccgcgctgcctggcgcctccggggtcgccctggcctgctgcttcgtggcggcggccgtggccctgcgctggtccgggcgccggacggcgcggggcgcggtggtccgggcgcgacagaggcagcgagcgggcctggagaacatggacagggcggcgcagcgcttccggctccagaacccagacctggactcagaggcgctgctagccctgcccctgcctcagctggtgcagaagttacacagtagagagctggcccctgaggccgtgctcttcacctatgtgggaaaggcctgggaagtgaacaaagggaccaactgtgtgacctcctatctggctgactgtgagactcagctgtctcaggccmcaaggcagggcctgctctatggcgtccctgtgagcctcaaggagtgcttcacctacaagggccaggactccacgctgggcttgagcctgaatgaaggggtgccggcggagtgcgacagcgtagtggtgcatgtgctgaagctgcagggtgccgtgcccttcgtgcacaccaatgttccacagtccatgttcagctatgactgcagtaaccccctctttggccagaccgtgaacccatgraagtcctccaaaagcccagggggctcctcagggggtgaaggggccctcatcgggtctggaggctcccccctgggcttaggcactgatatcggaggcagcatccgcttcccctcctccttctgcggcatctgcggcctcaagcccacagggaaccgcctcagcaagagtggcctgaagggctgtgtctatggacaggaggcagtgcgtctctccgtgggccccatggcccgggacgtggagagcctggcactgtgcctgcgagccctgctgtgygaggacatgttccgcttggaccccactgtgcctcccttgcccttcagagaagaggtctacaccagctctcagcccctgcgtgtggggtactatgagactgacaactataccatgccctccccggccatgaggcgggccgtgctggagaccaaacagagccttgaggctgcggggcacacgctggttcccttcttgccaagcaacataccccatgctctggagaccctgtcaacaggtgggctcttcagtgatggtggccacaccttcctacagaacttcaaaggtgatttcgtggacccctgcctgggggacctggtctcaattctgaagcttccccaatggcttaaaggactgctggccttcctggtgaagcctctgctgccaaggctgtcagctttcctcagcaacatgaagtctcgttcggctggaaaactctgggaactgcagcacgagatcgaggtgtaccgcaaaaccgtgattgcccagtggagggcgctggacctggatgtggtgctgacccccatgctggcccctgctctggacttgaatgccccaggcagggccacaggggccgtcagctacactatgctgtacaactgcctggacttccctgcaggggtggtgcctgtcaccacggtgactgctgaggacgaggcccagatggaacattacaggggctactttggggatatctgggacaagatgctgcagaagggcatgaagaagagtgtggggctgccggtggccgtgcagtgtgtggctctgccctggcaagaagagttgtgtctgcggttcatgcgggaggtggagcgactgatgacccctgaaaagcagtcatcctgatggctctggctccagaggacctgagactcacactctctgcagcccagcctagtcagggcacagctgccctgctgccacagcaaggaaatgtcctgcatggggcagaggcttccgtgtcctctcccccaaccccctgcaagaagcgccgactccctgagtctggacctccatccctgctctggtcccctctcttcgtcctgatccctccacccccatgtggcagcccatgggtatgacataggccaaggcccaactaacagtcaagaaacag

SEQ ID NO: 3830 - DNA, 3358 bp, Homo sapiens
cctcagcttcccgagtagctgggactgcaggcgccagcaacctcgcccggctaattttttgtatttttggtagagacggggtttcaccgtgttagccaggagggtctcgatctcctgacctcgtgatctgctcgcctcggcctcccaaagtgctgggattacaggcgtgagccaccacgcccggccaggtcccgaaacttaagcttcatttgtttcactgcaaatctgcttctgcctacaagcctrgtctcattttcctctacctaaggatcttcctccatgcaatttcggcctaggaggcccttcccgccccttttcgcctagctaactctttcggtactcaaccaccaactcctaatcctccctggtcccccaagtgggctaggggcttcttkggagtccctcgcactgctctaagcatccaggcagagtcattattccgggtgccaggttgctctttttccagcagccttcaggggactcctggctgggcggagtctgtagaggcgcgcggagtcctgggagagcgtcagatgtatttcctttcccttttttcgctcgtgtcccgccgggtggcgctcaccacctccccggaacacgcgagtctcctgtcgcggttccggtcggaattaccccgtggagcacgccgatatggctgcgctgacactgaggggtgtccgggagctgctgaagcgtgtggacctcgcgacggtcccgcggagacatcgatataagaagaaatggcccggtcgccctcacccctcggaaaataccatagcgaccttgcctgcactcctgggtctccgccgccttgcaggaaaggattcagccccttcctcaacctcgagctgcctctggcgaccgggcaaggttacagcgaccaccctgtccatactgccggcccaaaccctggcaaaaggctgccacagagcccaaattccctgctgttcgactggctttgcagaattttgacatgrcttacagtgtgcagtttggagatctttggccatcaatccgtgtcagtctcctctcagagcagaagtatggtgcactggtcaataactttgctgcctgggatcatgtaagtgctaagctggagcagctgagtgccaaggaytttgtgaatgaagccatctcccactgggaactgcagtctgagggtggccaatctgcagccccatcccctgcctcctgggcctgcagtccgaamcttcgatgcttcacttttgacagaggggatatcagtcgcttccctcctgccagacctggcagcctgggtgtcatggagtactacctgatggatgctgcctccttgctgcctgttctggccctcggcctgcagcctggggacatcgtgcttgacctatgtgcagctcctgggggaaagacactagcgttgcttcagactggctgttgccgtaagcaatcttgctgccaatgatctctccccgtcccgaatagccagactacagaagatccttcacagctatgtgcctgaagagatcagggatggaaatcaagttcgagttacctcatgggatggcaggaaatggggagaactggagggggacacctatgaccgggtgctggtggatgtgccctgtaccacagaccgccactcccttcatgaggaggagaacaacatctttaagcggtcaaggaagaaggagcgacagatattgcctgtgctgcaagtgcagcttcttgcggctggactccttgccaccaaaccaggaggccatgttgtctattctacctgctcactctcacacttacagaacgagtatgtggtgcaaggtgccattgagctcctggccaatcaatacagcatccagaacccagacctggactcagaggcgctgctagccctgcccctgcctcagctggtgcagaagttacacagtagagagctggcccctgaggccgtgctcttcacctatgtgggaaaggcctgggaagtgaacaaagggaccaactgtgtgacctcctatctggctgactgtgagactcagctgtctcaggccmcaaggcagggcctgctctatggcgtccctgtgagcctcaaggagtgcttcacctacaagggccaggactccacgctgggcttgagcctgaatgaaggggtgccggcggagtgcgacagcgtagtggtgcatgtgctgaagctgcagggtgccgtgcccttcgtgcacaccaatgttccacagtccatgttcagaccgtgaacccatgraagtcctccaaaagcccagggggctcctcagggggtgaaggggccctcatcgggtctggaggctcccccctgggcttaggcactgatatcggaggcagcatccgcttcccctcctccttctgcggcatctgcggcctcaagcccacagggaaccgcctcaggtctacaccagctctcagcccctgcgtgtggggtactatgagactgacaactataccatgccctccccggccatgaggcgggccgtgctggagaccaaacagagccttgaggctgcggggcacacgctggttcccttcttgccaagcaacataccccatgctctggagaccctgtcaacaggtgggctcttcagtgatggtggccacaccttcctacagaacttcaaaggtgatttcgtggacccctgcctgggggacctggtctcaattctgaagcttccccaatggcttaaaggactgctggccttcctggtgaagcctctgctgccaaggctgtcagctttcctcagcaacatgaagtctcgttcggctggaaaactctgggaactgcagcacgagatcgaggtgtaccgcaaaaccgtgattgcccagtggagggcgctggacctggatgtggtgctgacccccatgctggcccctgctctggacttgaatgccccaggcagggccacaggggccgtcagctacactatgctgtacaactgcctggacttccctgcaggggtggtgcctgtcaccacggtgactgctgaggacgaggcccagatggaacattacaggggctactttggggatatctgggacaagatgctgcagaagggcatgaagaagagtgtggggctgccggtggccgtgcagtgtgtggctctgccctggcaagaagagttgtgtctgcggttcatgcgggaggtggagcgactgatgacccctgaaaagcagtcatcctgatggctctggctccagaggacctgagactcacactctctgcagcccagcctagtcagggcacagctgccctgctgccacagcaaggaaatgtcctgcatggggcagaggcttccgtgtcctctcccccaagtggcagcccatgggtatgacataggccaaggcccaactaacagtc

SEQ ID NO: 3831 - DNA, 2464 bp, Homo sapiens
ctgcctacaagcctrgtctcattttcctctacctaaggatcttcctccatgcaatttcggcctaggaggcccttcccgccccttttcgcctagctaactctttcggtactcaaccaccaactcctaatcctccctggtcccccaagtgggctaggggcttcttkggagtccctcgcactgctctaagcatccaggcagagtcattattccgggtgccaggttgctctttttccagcagccttcaggggactcctggctgggcggagtctgtagaggcgcgcggagtcctgggagagcgtcagatgtatttcctttcccttttttcgctcgtgtcccgccgggtggcgctcaccacctccccggaacacgcgagtctcctgtcgcggttccggtcggaattaccccgtggagcacgccgatatggctgcgctgacactgaggggtgtccgggagctgctgaagcgtgtggacctcgcgacggtcccgcggagacatcgatataagaagaaatgggctgccacagagcccaaattccctgctgttcgactggctttgcagaattttgacatgrcttacagtgtgcagtttggagatctttggccatcaatccgtgtcagtctcctctcagagcagaagtatggtgcactggtcaataactttgctgcctgggatcatgtaagtgctaagctggagcagctgagtgccaaggaytttgtgaatgaagccatctcccactgggaactgcagtctgagggtggccaatctgcagccccatcccctgcctcctgggcctgcagtccgaamcttcgatgcttcacttttgacagaggggatatcagtcgcttccctcctgccagacctggcagcctgggtgtcatggagtactacctgatggatgctgcctccttgctgcctgttctggccctcggcctgcagcctggggacatcgtgcttgacctatgtgcagctcctgggggaaagacactagcgttgcttcagactggctgttgccgcaatcttgctgccaatgatctctccccgtcccgaatagccagactacagaagatccttcacagctatgtgcctgaagagatcagggatggaaatcaagttcgagttacctcatgggatggcaggaaatggggagaactggagggggacacctatgaccgggtgctggtggatgtgccctgtaccacagaccgccactcccttcatgaggaggagaacaacatctttaagcggtcaaggaagaaggagcgacagatattgcctgtgctgcaagtgcagcttcttgcggctggactccttgccaccaaaccaggaggccatgttgtctattctacctgctcactctcacacttacagaacgagtatgtggtgcaaggtgccattgagctcctggccaatcaatacagcatccaggtacaggtggaagatctgactcacttccgaagggttttcatggacacattttgtttcttctcatcctgtcaggttggggagctggtartaccaaacctcatggccaattttggcccyatgtacttctgcaaaatgcgtaggctgacatagtatcacccaatccctgaagcaagaatacaaagggtatactctgttggatgcaccagaaactggaaactgggaccagtggcagagatgcactctcggtcctgtctccatcctgttcgtgtctttctgcagttttcggcaataagaagtagaagatttgctgtcctgctgtccaattgtggagcatcagcaggtttccaactcactcattamcccctaccccatctccaggcctgtactaaagtttgctgccygcttaggggcttagaaggagaagccagtgagcaggctcacactaagttgtaaacataggagaagcatttggccaataaagttgttgaaactctatagacctggggctgcagttggggacttcatgtcagtgcaaatgccattagttccatttgtaccagccagttactgagcccctgtcacccttgaagtgagttccacctgaccagtcttgagcagccaacaggctcaattaagcccgcctggtttttccatatggctcatgatctaatttaaggaacaagtaactaaaaatgttaagccagtgcaaaataatctgcttacctactcacattggaaaaaccctctgagctgaataattctggccattcctgctgtcaacaatactgctgcccaaatgtggcttaggaggctgcttctgccacaaaaccgtcatactcttgtgcgtgccttgttctttgttcattcatctagcaggtattcccagacctcgtgtatgacaggtagctagggagctcttggagatgtagcagttgggattgtgggagattactgggcttcctcatcctttagaatggtaactctccttttgctttctgaacacctaggaatttcctgatgttttgttttgttggattcc

SEQ ID NO: 3832 - DNA, 1809 bp, Homo sapiens
atccagtccgggttttgcggcggagcgggcgggctgcgcgtgcggcggcttcaactgtcgcggtaggcagcagcaggctgaagggatcatggtgcagtacgagctgtgggccgcgctgcctggcgcctccggggtcgccctggcctgctgcttcgtggcggcggccgtggccctgcgctggtccgggcgccggacggcgcggggcgcggtggtccgggcgcgacagaggcagcgagcgggcctggagaacatggacagggcggcgcagcgcttccggctccagaacccagacctggactcagaggcgctgctagccctgcccctgcctcagctggtgcagaagttacacagtagagagctggcccctgaggccgtgctcttcacctatgtgggaaaggtaaggccagccaaggccagcccctccctgggaaaggcctgggaagtgaacaaagggaccaactgtgtgacctcctatctggctgactgtgagactcagctgtctcaggccmcaaggcagggcctgctctatggcgtccctgtgagcctcaaggagtgcttcacctacaagggccaggactccacgctgggcttgagcctgaatgaaggggtgccggcggagtgcgacagcgtagtggtgcatgtgctgaagctgcagggtgccgtgcccttcgtgcacaccaatgttccacagtccatgttcagctatgactgcagtaaccccctctttggccagaccgtgaacccatgraagtcctccaaaagcccagggggctcctcagggggtgaaggggccctcatcgggtctggaggctcccccctgggcttaggcactgatatcggaggcagcatccgcttcccctcctccttctgcggcatctgcggcctcaagcccacagggaaccgcctcaggtaaggtgggtggagggcgcttctgggcccctcgctgtgtgaccttggcctagcttccaacctctctgggctccaggcggggattcggtctccggggttttgctgggaggaagcattacagtaccactggccgggcgtgggtcctagtttccaaagcggtgagtgttcagagctgctctgtgggtgtggggatggcggcgggtggccatttcctgtttccagcatcttatgtttcttatccagcaagagtggcctgaagggctgtgtctatggacaggaggcagtgcgtctctccgtgggccccatggcccgggacgtggagagcctggcactgtgcctgcgagccctgctgtgygaggacatgttccgcttggaccccactgtgcctcccttgcccttcagagaagaggtctacaccagctctcagcccctgcgtgtggggtactatgagactgacaactataccatgccctccccggccatgaggcgggccgtgctggagaccaaacagagccttgaggctgcggggcacacgctggttcccttcttgccaagcaacataccccatgctctggagaccctgtcaacaggtgggctcttcagtgatggtggccacaccttcctacagaacttgtgagtgatagtgggctttggggtcttggtgggatcagacaagtaggcagacctgggggagcagcagggtgtggtgatgcctggatgggccttagctgaatccaacaaaggcctgagcactctgggcagggacctcgctgtccctccagctgggcacattgagcctggagatcccttgccagggtgccagcccgagkggaggctgggttgagtatctgtggcctacccctgatctgagcttgttgtgaggtaggaggtgggcaggag

SEQ ID NO: 3833 - DNA, 1008 bp, Homo sapiens
cctcagcttcccgagtagctgggactgcaggcgccagcaacctcgcccggctaattttttgtatttttggtagagacggggtttcaccgtgttagccaggagggtctcgatctcctgacctcgtgatctgctcgcctcggcctcccaaagtgctgggattacaggcgtgagccaccacgcccggccaggtcccgaaacttaagcttcatttgtttcactgcaaatctgcttctgcctacaagcctrgtctcattttcctctacctaaggatcttcctccatgcaatttcggcctaggaggcccttcccgccccttttcgcctagctaactctttcggtactcaaccaccaactcctaatcctccctggtcccccaagtgggctaggggcttcttkggagtccctcgcactgctctaagcatccaggcagagtcattattccgggtgccaggttgctctttttccagcagccttcaggggactcctggctgggcggagtctgtagaggcgcgcggagtcctgggagagcgtcagatgtatttcctttcccttttttcgctcgtgtcccgccgggtggcgctcaccacctccccggaacacgcgagtctcctgtcgcggttccggtcggaattaccccgtggagcacgccgatatggctgcgctgacactgaggggtgtccgggagctgctgaagcgtgtggacctcgcgacggtcccgcggagacatcgatataagaagaaatggcccggtcgccctcacccctcggaaaataccatagcgaccttgcctgcactcctgggtctccgccgccttgcaggaaaggattcagccccttcctcaacctcgagctgcctctggcgaccgggcaaggttacagcgaccaccctgtccatactgccggcccaaaccctggcaaaaggtgcaacgaatcctctcatcctctggactctccttgcttctccagagaccctttttcttgcctcactggaagccctggaatttcttcta

SEQ ID NO: 3834 - DNA, 1826 bp, Homo sapiens
atccagtccgggttttgcggcggagcgggcgggctgcgcgtgcggcggcttcaactgtcgcggtaggcagcagcaggctgaagggatcatggtgcagtacgagctgtgggccgcgctgcctggcgcctccggggtcgccctggcctgctgcttcgtggcggcggccgtggccctgcgctggtccgggcgccggacggcgcggggcgcggtggtccgggcgcgacagaggcagcgagcgggcctggagaacatggacagggcggcgcagcgcttccggctccagaacccagacctggactcagaggcgctgctagccctgcccctgcctcagctggtgcagaagttacacagtagagagctggcccctgaggccgtgctcttcacctatgtgggaaaggcctgggaagtgaacaaagggaccaactgtgtgacctcctatctggctgactgtgagactcagctgtctcaggccmcaaggcagggcctgctctatggcgtccctgtgagcctcaaggagtgcttcacctacaagggccaggactccacgctgggcttgagcctgaatgaaggggtgccggcggagtgcgacagcgtagtggtgcatgtgctgaagctgcagggtgccgtgcccttcgtgcacaccaatgttccacagtccatgttcagctatgactgcagtaaccccctctttggccagaccgtgaacccatgraagtcctccaaaagcccagggggctcctcagggggtgaaggggccctcatcgggtctggaggctcccccctgggcttaggcactgatatcggaggcagcatccgcttcccctcctccttctgcggcatctgcggcctcaagcccacagggaaccgcctcagcaagagtggcctgaagggctgtgtctatggacaggaggcagtgcgtctctccgtgggccccatggcccgggacgtggagagcctggcactgtgcctgcgagccctgctgtgygaggacatgttccgcttggaccccactgtgcctcccttgcccttcagagaagaggtctacaccagctctcagcccctgcgtgtggggtactatgagactgacaactataccatgccctccccggccatgaggcgggccgtgctggagaccaaacagagccttgaggctgcggggcacacgctggttcccttcttgccaagcaacataccccatgctctggagaccctgtcaacaggtgggctcttcagtgatggtggccacaccttcctacagaacttcaaaggtgatttcgtggacccctgcctgggggacctggtctcaattctgaagcttccccaatggcttaaaggactgctggccttcctggtgaagcctctggtgagggcacaaggagtggaggggctaggatggctgggggggaacctagggcctcctatcgcatgatcccccatggcctccctcagcctctcttggtttgggcaggcatggcctcctcttctctccagtccccacccagactgctctcctcctctgtcccctgcgatcttcagccaacccgcatgctgaaaggggtgccgacctgggccctggggggaggcatggagggaggggtccccagtggcttggcctgaagaaggttgacgtctgccgtggcccagagctgagtcaccgaccctgcgtctgtcctgtgcagctgccaaggctgtcagctttcctcagcaacatgaagtctcggtaagggttcttctgtgtctagctgccggcccctgcctgtcctgatccgagtctgggtctgggtagtttctgacaggaaaggacttgagggaagtagcctctgagg

SEQ ID NO: 3835 - DNA, 2135 bp, Homo sapiens
atccagtccgggttttgcggcggagcgggcgggctgcgcgtgcggcggcttcaactgtcgcggtaggcagcagcaggctgaagggatcatggtgcagtacgagctgtgggccgcgctgcctggcgcctccggggtcgccctggcctgctgcttcgtggcggcggccgtggccctgcgctggtccgggcgccggacggcgcggggcgcggtggtccgggcgcgacagaggcagcgagcgggcctggagaacatggacagggcggcgcagcgcttccggctccagaacccagacctggactcagaggcgctgctagccctgcccctgcctcagctggtgcagaagttacacagtagagagctggcccctgaggccgtgctcttcacctatgtgggaaaggtaaggccagccaaggccagcccctccctgggaaaggcctgggaagtgaacaaagggaccaactgtgtgacctcctatctggctgactgtgagactcagctgtctcaggccmcaaggcagggcctgctctatggcgtccctgtgagcctcaaggagtgcttcacctacaagggccaggactccacgctgggcttgagcctgaatgaaggggtgccggcggagtgcgacagcgtagtggtgcatgtgctgaagctgcagggtgccgtgcccttcgtgcacaccaatgttccacagtccatgttcagctatgactgcagtaaccccctctttggccagaccgtgaacccatgraagtcctccaaaagcccagggggctcctcagggggtgaaggggccctcatcgggtctggaggctcccccctgggcttaggcactgatatcggaggcagcatccgcttcccctcctccttctgcggcatctgcggcctcaagcccacagggaaccgcctcagcaagagtggcctgaagggctgtgtctatggacaggaggcagtgcgtctctccgtgggccccatggcccgggacgtggagagcctggcactgtgcctgcgagccctgctgtgygaggacatgttccgcttggaccccactgtgcctcccttgcccttcagagaagaggtctacaccagctctcagcccctgcgtgtggggtactatgagactgacaactataccatgccctccccggccatgaggcgggccgtgctggagaccaaacagagccttgaggctgcggggcacacgctggttcccttcttgccaagcaacataccccatgctctggagaccctgtcaacaggtgggctcttcagtgatggtggccacaccttcctacagaacttcaaaggtgatttcgtggacccctgcctgggggacctggtctcaattctgaagcttccccaatggcttaaaggactgctggccttcctggtgaagcctctgctgccaaggctgtcagctttcctcagcaacatgaagtctcgttcggctggaaaactctgggaactgcagcacgagatcgaggtgtaccgcaaaaccgtgattgcccagtggagggcgctggacctggatgtggtgctgacccccatgctggcccctgctctggacttgaatgccccaggcagggccacaggggccgtcagctacactatgctgtacaactgcctggacttccctgcaggggtggtgcctgtcaccacggtgactgctgaggacgaggcccagatggaacattacaggggctactttggggatatctgggacaagatgctgcagaagggcatgaagaagagtgtggggctgccggtggccgtgcagtgtgtggctctgccctggcaagaagagttgtgtctgcggttcatgcgggaggtggagcgactgatgacccctgaaaagcagtcatcctgatggctctggctccagaggacctgagactcacactctctgcagcccagcctagtcagggcacagctgccctgctgccacagcaaggaaatgtcctgcatggggcagaggcttccgtgtcctctcccccaaccccctgcaagaagcgccgactccctgagtctggacctccatccctgctctggtcccctctcttcgtcctgatccctccacccccatgtggcagcccatgggtatgacataggccaaggcccaactaacagtcaagaaacag

SEQ ID NO: 3836 - DNA, 6826 bp, Homo sapiens
gtcccggcgctgggctgaggggaggggttgtcttaaaagtctctccttccccctgtaggggcggccggcgagtcccagtgagagcggagggtgccagaggtagggggccgagaaacaaagttcccggggcttcctccggggccgcggtcggggctgckcgtttgaccgcccccctcctcgcgaaggcaatggcttccaaactcctgcgcgcggtcatcctcgggccgcccggctcgggcaagggcaccgtgwgccagaggatcgcccagaactttggtctccagcatctctccagcggccacttcttgcgggagaacatcaaggccagcaccgaagttggtgagatggcaaagcagtatatagagaaaagtcttttggttccagaccatgtgatcacacgcctaatgatgtccgagttggagaacaggcgtggccagcactggctccttgatggttttcctaggacattaggacaagccgaagccctggacaaaatctgtgaagtggatctagtgatcagtttgaatattccatttgaaacacttaaagatcgtctcagccgccgttggattcaccctcctagcggaagggtatataacctggacttcaatccacctcatgtacatggtattgatgaygtcactggtgaaccrttagtccagcaggaggatgataaacccgaagcagttgctgccaggctaagacagtacaaagacgtggcaaagccagtcattgaattatacaagagccgaggagtgctccaccaattttccggaacggagacgaacaaaatctggccctacgtttacacacttttctcaaacaagatcacacctattcagtccaaagaagcatattgaccctgcccaatggaagaaccaggaagatgtggtcattcattcaatagtgtgtgtagtattggtgctgtgtccaaattagaagctagctgaggtagcttgcagcatcttttctagttgaaatggtgaactgataggaaaacaaatgagtagaaagagttcatgaagaggccctcctctgcctttcaaaaggctggtcacctacacatgtttaaggtgtctctgcacatgtctcaagcccatcacaagaaagcaagtacagtgtggatttcaaatggtgtgtaacttcagctccagctggtttttgacagctgttgctgtggtaatatttttgacatgtgatggtgatagtctctggttctccccatccccacaaaggctgttgaaccacagcaccaggaagcctgagaatgaatcctgagggctctagcccaggctttgtcccaggctttctggtgtgtgccctcctggtaacagtgaaattgaagctacttactcatagtggttgtttctctggtcttgagtgactgtgtccacagttcatttttttccggtaggaataactccttttctacatccacgctccatagagtctctccttttcagacatcctgggatgaaagaatttggcttttttttttttttttttttggacatctgttttcactcttaggcttttaaacaatagttattgctyttatccctctcagattctaataactgagagcgatggggctatattgaatctctgtatgcactgagaactgagctatgaagaggatcttattaaactgctggtctgactttatggattgacactgttcmtttcttttattgtgaaaaaaaaaaaaaaaccctgaaagtcttgggaaccccctaaagtcttttgggaatcctcaaaaagcatgggaagttaagtatttagctacataaatgttgtaagatcatatcttatgtatagaagtaataagaccatttggaattactggactaattgaatagttaaggtttctattcgggacaataaaatgtattttgaaagtgctgctaactattgatgctgacagtgtttcactcctatgagtgacccaaacatattataaatatgtggtaaagggaatggagcctgtggggttgagcagaatgttgtactagctgtgcctggactgagtataacagctttatgattatgagaaaacaaattctttatttttttttctgttccaaagattcatcctatggggtggccataaagtctagaattagatactaatattttgtcattcattataacatatcaataaaccatttgttaaaagatttgcctggtttccagacttggtggccaccttgaataattcttgctgtcttctgggaaggatgatgaaatttattcctgctgccttaaaaatatgtatcccttcttcacccatcatgactgtccccagtgagtgtcctttactattcttgggagtgactcctgtctaacttttcatactggcgagaagaaaagaagcctattttaacactttagtggtgttgaaacacattacttactttctgaagatgtcccagtgaatcctctgtcaattcactgccatatgtaatctatatgataaggaawgcatcttccttctaagtactgcccaaactcttgccagctcctctcccattgtcccttcatgtgaatatttcttggctaccttagtggaaatatagatcagtyttctccccatccatcctctcaaacataatgagattgtttactttttagatttatgcagtgaaaatgcccagtcaggtctgaatcgtcagtgcattatattgacyctgagcactttagaatttagagttgcaattgaatgccagctgtggagatggggtgcatatcagatatataaataaagctcaggtttgctagggaaccaggtatagagaaaaataagtctgatatgaggaaaattgcacaatttagagtagttatgccgtagagaaaatttccacaaactaggaaatgtagagagttattctatagaatactcaaaagaggaaagtatgtgatttttggaaacaggaaaatcttcaaacttctttcttcacttccctttgtgtttagctgaccctccaatgtgatcattgcctttggagtttgggagaggtaygggaagtggcctgatccctgcttccatacttcactcctccatccatccttccctccctcttcccctccagctaaatggacaattctagccaacattgagtcactcaataagtctcaacagtgggtgtgtttgctgagattgtccagcggttgagcagtttggtctcacctccctcgctagttgagaccaaaaagagacaaataactttttcatggtctttgaaacataatgcttatttcgtggtcaatggctttaaaaaaatctgtttcttgttttcttcaacaaactcactagttttcccttaaatgatattgtaaaaattaaagtaatcttgaaaatgttttgacaaaagtaaaattaaagggacatcttttcttgttttgttttttttttttctattgccacacatgaccgttccttcacctttaagcaaagagagtggttcagatggtttctaagatgccaacctgacctcgcattctgtcattctacccagctcttaattcaatttgcttccattatcctaacaggcttctttcttacttagaacttggaaaggctgctgtatttaataccctccaacactaacgcagacttaagataggtactgtttattgaaaacctactgagtgaaatgtgcggttttaggaccttcataaacatctcatttaatctttctagcatcctgtgaaacagccatgatttcacgttgataaacaaagaagacaggggtcccagggatgtgaagcatcttgcccaggcttctgctgctggtgaccagtgtagccaggactccarcccaggttttcctgactcagaagactgagctttttcctggatgttattaatagctaattgtgtccaagcaaccaagggccttgagtctgcttggttctgcttatggcctcacatcaagaaatggagctagtccatgtctgtagtcccartgctttgggaagccatgatgggaaggttgtcggaggccaaaagttcaagaccaggctgggcaatatcacaagactccatctctacggaaaagtaaaaaattagccagtcatggtggtgtacacttatggtcctagttactcaggagacttaggcaggaggattgcttgatcctaggaattcgaggctgcagtgagctatgattgcacctctgcacccaagcctgggcgacacagcgagaccctctctcttaaaaaaaaaaaatagcagagctcaccaaagtgatgttcacctttttatgacattcctttttcttagcttaagaaaagaaagctgctagatgagagtcttagttttcctgcataagacctcctttatgaatagaataaaagactgtcaaagtaggctgggcttgggcccaggctaatctatgaaggaagcaagctcgtgttccttacctatccttttggtgtccattggattgtgccccgaagtggcctttacccttgagccgtccccagccatggtgctcacacataggcttttgagctccttggagctatccagatcctgctcacttttccttcctgagatcagaacaaatcacccccttactcccactccaaacaaggccttgatgataaactaatccttcctaaaatgctggtaggtaaacaagcaatgatgaagcattgaacacaggttaactcctgacttttgtaccattgtctattccattacacattaacatgactctgaatgccagatccaaacctttgcccaccatctgcttgtcgtgcaacagttgaggcagtaaccaggggagattcacttcctgtcttgtccttccccagggatcacccccctgctgccctctagcagccaarctcagatgagttccattgttaccctaggtgtgcccatctctttggtagggaaggagaaaggtaagaatagccatcartgaggaaggattcttggagcgaggagccactgtggtttttcctgctatttaagatgttgagaccggataactttagaaagatacctgcacaaacccataaatastgcttttataaagtttagttcaccggaacctgagttcagtatttgacattagctttttgtccaaagagttgaagcctgctggaggtctttgctcaaataataaataccacatatttccaagtgtgttcaggtataggcactaggtactgtctgtttacttcatgttaggcacattacatgcattggctaatcaaatcctcatcaattacatatgtaataatctaaacttgcctccttgtattataaatggaaataatcctgtttatttaaacgggttttcatgtacctgtagggattaggaaactcaaatggcctttttaatacctttccctagtttgagctccctgttctctttaacagataaaacaacatatttgcttcagcctggaatctgtttttggtgctttggtgcagagacaggaaatgggcactcagagtcacactggtagttgcacactgtatctacagagggcgtgtctcatctgtactctgctgggttacaggatttcagtaggtatttgtgtccacctgagaattctgtttattacctttcatttgacagtgtctttcctttctgcagttgattttgctagagaggcaattcataaggtgaggtcctgttcatagtatgacttgctttctcaatatctccttcaatttttagtaactcttggtctatttggtgtctttaaaaaaaataacctagtaataaagacttcttttaatgtggaaatgtggtctggtagtaagttatttctttccacatgtaactgacccaatctggtttccaaatgagaagtgtgcaggccccagaggttgagaagccatatttcaactgtgaaaaaaatctgcttcctgcatctgttgaaatatagttgttcatacttgccatcccttatctttcttgtaacaatttgcacagttcttgccagaataaatgccattatctgtatgtttcagggagttccccaatttgatcatttttgtgtgtgtgtggtgtgtgtgtgagagagagagatactgcagtaaaacatttctaaaggatgaaagctcttgtatggcatagatatgaattccttcctctggtaataattaggttattcccagaagcacagtgtcattctttaaataaaagctttcctgtttaaagcttttcaaaggagcagaccaccttgaagattccccctagggttgatatgtgtctaattcattttataaaaattattcttgtcttcattttaaagctttggctatatagtcagaaatgtcctaaataacaaactattttgtatttaatttagggaagactaaagggaagaaaaatgaaaactcagtctttatgtaagctccaaggatattagggcttaaagggcttttctagttttatgagaatttgtactactgatttttatatattcctgtttttgagatgracagatctctggggaaattgttgagttacaatggcatttcactgtgatccctctcaagctcagatcagttctataacccaatgacaacctgtctctttggtttactgtcctgtgaaatgtcagctcaagtttcccagaagtcgtgtgtttatgatgagtcagagtgcttttcctcggtgggacagttgctggccctcttaattttggtgtatgtgcttccaagtatctaaacctccagtctgatctgtatatgctatcctaactgttaattgtattattgattatgttgattatcttgcttgaaggttcatacttttcaatttgatagaaataaagtttttttctgcttatagctagcgaa

SEQ ID NO: 3837 - DNA, 6543 bp, Homo sapiens
cgcagcctcgcgcctctccagcccctccacgcagcctcgggcctcggggcagagccctgggtggctttgaaaggcctgtctgttcgttgtcgccttctaagaagttggtgagatggcaaagcagtatatagagaaaagtcttttggttccagaccatgtgatcacacgcctaatgatgtccgagttggagaacaggcgtggccagcactggctccttgatggttttcctaggacattaggacaagccgaagccctggacaaaatctatcgtctcagccgccgttggattcaccctcctagcggaagggtatataacctggacttcaatccacctcatgtacatggtattgatgaygtcactggtgaaccrttagtccagcaggaggatgataaacccgaagcagttgctgccaggctaagacagtacaaagacgtggcaaagccagtcattgaattatacaagagccgaggagtgctccaccaattttccggaacggagacgaacaaaatctggccctacgtttacacacttttctcaaacaagatcacacctattcagtccaaagaagcatattgaccctgcccaatggaagaaccaggaagatgtggtcattcattcaatagtgtgtgtagtattggtgctgtgtccaaattagaagctagctgaggtagcttgcagcatcttttctagttgaaatggtgaactgataggaaaacaaatgagtagaaagagttcatgaagaggccctcctctgcctttcaaaaggctggtcacctacacatgtttaaggtgtctctgcacatgtctcaagcccatcacaagaaagcaagtacagtgtggatttcaaatggtgtgtaacttcagctccagctggtttttgacagctgttgctgtggtaatatttttgacatgtgatggtgatagtctctggttctccccatccccacaaaggctgttgaaccacagcaccaggaagcctgagaatgaatcctgagggctctagcccaggctttgtcccaggctttctggtgtgtgccctcctggtaacagtgaaattgaagctacttactcatagtggttgtttctctggtcttgagtgactgtgtccacagttcatttttttccggtaggaataactccttttctacatccacgctccatagagtctctccttttcagacatcctgggatgaaagaatttggcttttttttttttttttttttggacatctgttttcactcttaggcttttaaacaatagttattgctyttatccctctcagattctaataactgagagcgatggggctatattgaatctctgtatgcactgagaactgagctatgaagaggatcttattaaactgctggtctgactttatggattgacactgttcmtttcttttattgtgaaaaaaaaaaaaaaaccctgaaagtcttgggaaccccctaaagtcttttgggaatcctcaaaaagcatgggaagttaagtatttagctacataaatgttgtaagatcatatcttatgtatagaagtaataagaccatttggaattactggactaattgaatagttaaggtttctattcgggacaataaaatgtattttgaaagtgctgctaactattgatgctgacagtgtttcactcctatgagtgacccaaacatattataaatatgtggtaaagggaatggagcctgtggggttgagcagaatgttgtactagctgtgcctggactgagtataacagctttatgattatgagaaaacaaattctttatttttttttctgttccaaagattcatcctatggggtggccataaagtctagaattagatactaatattttgtcattcattataacatatcaataaaccatttgttaaaagatttgcctggtttccagacttggtggccaccttgaataattcttgctgtcttctgggaaggatgatgaaatttattcctgctgccttaaaaatatgtatcccttcttcacccatcatgactgtccccagtgagtgtcctttactattcttgggagtgactcctgtctaacttttcatactggcgagaagaaaagaagcctattttaacactttagtggtgttgaaacacattacttactttctgaagatgtcccagtgaatcctctgtcaattcactgccatatgtaatctatatgataaggaawgcatcttccttctaagtactgcccaaactcttgccagctcctctcccattgtcccttcatgtgaatatttcttggctaccttagtggaaatatagatcagtyttctccccatccatcctctcaaacataatgagattgtttactttttagatttatgcagtgaaaatgcccagtcaggtctgaatcgtcagtgcattatattgacyctgagcactttagaatttagagttgcaattgaatgccagctgtggagatggggtgcatatcagatatataaataaagctcaggtttgctagggaaccaggtatagagaaaaataagtctgatatgaggaaaattgcacaatttagagtagttatgccgtagagaaaatttccacaaactaggaaatgtagagagttattctatagaatactcaaaagaggaaagtatgtgatttttggaaacaggaaaatcttcaaacttctttcttcacttccctttgtgtttagctgaccctccaatgtgatcattgcctttggagtttgggagaggtaygggaagtggcctgatccctgcttccatacttcactcctccatccatccttccctccctcttcccctccagctaaatggacaattctagccaacattgagtcactcaataagtctcaacagtgggtgtgtttgctgagattgtccagcggttgagcagtttggtctcacctccctcgctagttgagaccaaaaagagacaaataactttttcatggtctttgaaacataatgcttatttcgtggtcaatggctttaaaaaaatctgtttcttgttttcttcaacaaactcactagttttcccttaaatgatattgtaaaaattaaagtaatcttgaaaatgttttgacaaaagtaaaattaaagggacatcttttcttgttttgttttttttttttctattgccacacatgaccgttccttcacctttaagcaaagagagtggttcagatggtttctaagatgccaacctgacctcgcattctgtcattctacccagctcttaattcaatttgcttccattatcctaacaggcttctttcttacttagaacttggaaaggctgctgtatttaataccctccaacactaacgcagacttaagataggtactgtttattgaaaacctactgagtgaaatgtgcggttttaggaccttcataaacatctcatttaatctttctagcatcctgtgaaacagccatgatttcacgttgataaacaaagaagacaggggtcccagggatgtgaagcatcttgcccaggcttctgctgctggtgaccagtgtagccaggactccarcccaggttttcctgactcagaagactgagctttttcctggatgttattaatagctaattgtgtccaagcaaccaagggccttgagtctgcttggttctgcttatggcctcacatcaagaaatggagctagtccatgtctgtagtcccartgctttgggaagccatgatgggaaggttgtcggaggccaaaagttcaagaccaggctgggcaatatcacaagactccatctctacggaaaagtaaaaaattagccagtcatggtggtgtacacttatggtcctagttactcaggagacttaggcaggaggattgcttgatcctaggaattcgaggctgcagtgagctatgattgcacctctgcacccaagcctgggcgacacagcgagaccctctctcttaaaaaaaaaaaatagcagagctcaccaaagtgatgttcacctttttatgacattcctttttcttagcttaagaaaagaaagctgctagatgagagtcttagttttcctgcataagacctcctttatgaatagaataaaagactgtcaaagtaggctgggcttgggcccaggctaatctatgaaggaagcaagctcgtgttccttacctatccttttggtgtccattggattgtgccccgaagtggcctttacccttgagccgtccccagccatggtgctcacacataggcttttgagctccttggagctatccagatcctgctcacttttccttcctgagatcagaacaaatcacccccttactcccactccaaacaaggccttgatgataaactaatccttcctaaaatgctggtaggtaaacaagcaatgatgaagcattgaacacaggttaactcctgacttttgtaccattgtctattccattacacattaacatgactctgaatgccagatccaaacctttgcccaccatctgcttgtcgtgcaacagttgaggcagtaaccaggggagattcacttcctgtcttgtccttccccagggatcacccccctgctgccctctagcagccaarctcagatgagttccattgttaccctaggtgtgcccatctctttggtagggaaggagaaaggtaagaatagccatcartgaggaaggattcttggagcgaggagccactgtggtttttcctgctatttaagatgttgagaccggataactttagaaagatacctgcacaaacccataaatastgcttttataaagtttagttcaccggaacctgagttcagtatttgacattagctttttgtccaaagagttgaagcctgctggaggtctttgctcaaataataaataccacatatttccaagtgtgttcaggtataggcactaggtactgtctgtttacttcatgttaggcacattacatgcattggctaatcaaatcctcatcaattacatatgtaataatctaaacttgcctccttgtattataaatggaaataatcctgtttatttaaacgggttttcatgtacctgtagggattaggaaactcaaatggcctttttaatacctttccctagtttgagctccctgttctctttaacagataaaacaacatatttgcttcagcctggaatctgtttttggtgctttggtgcagagacaggaaatgggcactcagagtcacactggtagttgcacactgtatctacagagggcgtgtctcatctgtactctgctgggttacaggatttcagtaggtatttgtgtccacctgagaattctgtttattacctttcatttgacagtgtctttcctttctgcagttgattttgctagagaggcaattcataaggtgaggtcctgttcatagtatgacttgctttctcaatatctccttcaatttttagtaactcttggtctatttggtgtctttaaaaaaaataacctagtaataaagacttcttttaatgtggaaatgtggtctggtagtaagttatttctttccacatgtaactgacccaatctggtttccaaatgagaagtgtgcaggccccagaggttgagaagccatatttcaactgtgaaaaaaatctgcttcctgcatctgttgaaatatagttgttcatacttgccatcccttatctttcttgtaacaatttgcacagttcttgccagaataaatgccattatctgtatgtttcagggagttccccaatttgatcatttttgtgtgtgtgtggtgtgtgtgtgagagagagagatactgcagtaaaacatttctaaaggatgaaagctcttgtatggcatagatatgaattccttcctctggtaataattaggttattcccagaagcacagtgtcattctttaaataaaagctttcctgtttaaagcttttcaaaggagcagaccaccttgaagattccccctagggttgatatgtgtctaattcattttataaaaattattcttgtcttcattttaaagctttggctatatagtcagaaatgtcctaaataacaaactattttgtatttaatttagggaagactaaagggaagaaaaatgaaaactcagtctttatgtaagctccaaggatattagggcttaaagggcttttctagttttatgagaatttgtactactgatttttatatattcctgtttttgagatgracagatctctggggaaattgttgagttacaatggcatttcactgtgatccctctcaagctcagatcagttctataacccaatgacaacctgtctctttggtttactgtcctgtgaaatgtcagctcaagtttcccagaagtcgtgtgtttatgatgagtcagagtgcttttcctcggtgggacagttgctggccctcttaattttggtgtatgtgcttccaagtatctaaacctccagtctgatctgtatatgctatcctaactgttaattgtattattgattatgttgattatcttgcttgaaggttcatacttttcaatttgatagaaataaagtttttttctgcttatagctagcgaa

SEQ ID NO: 3838 - DNA, 6885 bp, Homo sapiens
gcgaggaggtggagaagggcggggaggtgtagcgtggcgctcagtccgcctgctactcggtcccggcgctgggctgaggggaggggttgtcttaaaagtctctccttccccctgtaggggcggccggcgagtcccagtgagagcggagggtgccagaggtagggggccgagaaacaaagttcccggggcttcctccggggccgcggtcggggctgckcgtttgaccgcccccctcctcgcgaaggcaatggcttccaaactcctgcgcgcggtcatcctcgggccgcccggctcgggcaagggcaccgtgwgccagaggatcgcccagaactttggtctccagcatctctccagcggccacttcttgcgggagaacatcaaggccagcaccgaagttggtgagatggcaaagcagtatatagagaaaagtcttttggttccagaccatgtgatcacacgcctaatgatgtccgagttggagaacaggcgtggccagcactggctccttgatggttttcctaggacattaggacaagccgaagccctggacaaaatctgtgaagtggatctagtgatcagtttgaatattccatttgaaacacttaaagatcgtctcagccgccgttggattcaccctcctagcggaagggtatataacctggacttcaatccacctcatgtacatggtattgatgaygtcactggtgaaccrttagtccagcaggaggatgataaacccgaagcagttgctgccaggctaagacagtacaaagacgtggcaaagccagtcattgaattatacaagagccgaggagtgctccaccaattttccggaacggagacgaacaaaatctggccctacgtttacacacttttctcaaacaagatcacacctattcagtccaaagaagcatattgaccctgcccaatggaagaaccaggaagatgtggtcattcattcaatagtgtgtgtagtattggtgctgtgtccaaattagaagctagctgaggtagcttgcagcatcttttctagttgaaatggtgaactgataggaaaacaaatgagtagaaagagttcatgaagaggccctcctctgcctttcaaaaggctggtcacctacacatgtttaaggtgtctctgcacatgtctcaagcccatcacaagaaagcaagtacagtgtggatttcaaatggtgtgtaacttcagctccagctggtttttgacagctgttgctgtggtaatatttttgacatgtgatggtgatagtctctggttctccccatccccacaaaggctgttgaaccacagcaccaggaagcctgagaatgaatcctgagggctctagcccaggctttgtcccaggctttctggtgtgtgccctcctggtaacagtgaaattgaagctacttactcatagtggttgtttctctggtcttgagtgactgtgtccacagttcatttttttccggtaggaataactccttttctacatccacgctccatagagtctctccttttcagacatcctgggatgaaagaatttggcttttttttttttttttttttggacatctgttttcactcttaggcttttaaacaatagttattgctyttatccctctcagattctaataactgagagcgatggggctatattgaatctctgtatgcactgagaactgagctatgaagaggatcttattaaactgctggtctgactttatggattgacactgttcmtttcttttattgtgaaaaaaaaaaaaaaaccctgaaagtcttgggaaccccctaaagtcttttgggaatcctcaaaaagcatgggaagttaagtatttagctacataaatgttgtaagatcatatcttatgtatagaagtaataagaccatttggaattactggactaattgaatagttaaggtttctattcgggacaataaaatgtattttgaaagtgctgctaactattgatgctgacagtgtttcactcctatgagtgacccaaacatattataaatatgtggtaaagggaatggagcctgtggggttgagcagaatgttgtactagctgtgcctggactgagtataacagctttatgattatgagaaaacaaattctttatttttttttctgttccaaagattcatcctatggggtggccataaagtctagaattagatactaatattttgtcattcattataacatatcaataaaccatttgttaaaagatttgcctggtttccagacttggtggccaccttgaataattcttgctgtcttctgggaaggatgatgaaatttattcctgctgccttaaaaatatgtatcccttcttcacccatcatgactgtccccagtgagtgtcctttactattcttgggagtgactcctgtctaacttttcatactggcgagaagaaaagaagcctattttaacactttagtggtgttgaaacacattacttactttctgaagatgtcccagtgaatcctctgtcaattcactgccatatgtaatctatatgataaggaawgcatcttccttctaagtactgcccaaactcttgccagctcctctcccattgtcccttcatgtgaatatttcttggctaccttagtggaaatatagatcagtyttctccccatccatcctctcaaacataatgagattgtttactttttagatttatgcagtgaaaatgcccagtcaggtctgaatcgtcagtgcattatattgacyctgagcactttagaatttagagttgcaattgaatgccagctgtggagatggggtgcatatcagatatataaataaagctcaggtttgctagggaaccaggtatagagaaaaataagtctgatatgaggaaaattgcacaatttagagtagttatgccgtagagaaaatttccacaaactaggaaatgtagagagttattctatagaatactcaaaagaggaaagtatgtgatttttggaaacaggaaaatcttcaaacttctttcttcacttccctttgtgtttagctgaccctccaatgtgatcattgcctttggagtttgggagaggtaygggaagtggcctgatccctgcttccatacttcactcctccatccatccttccctccctcttcccctccagctaaatggacaattctagccaacattgagtcactcaataagtctcaacagtgggtgtgtttgctgagattgtccagcggttgagcagtttggtctcacctccctcgctagttgagaccaaaaagagacaaataactttttcatggtctttgaaacataatgcttatttcgtggtcaatggctttaaaaaaatctgtttcttgttttcttcaacaaactcactagttttcccttaaatgatattgtaaaaattaaagtaatcttgaaaatgttttgacaaaagtaaaattaaagggacatcttttcttgttttgttttttttttttctattgccacacatgaccgttccttcacctttaagcaaagagagtggttcagatggtttctaagatgccaacctgacctcgcattctgtcattctacccagctcttaattcaatttgcttccattatcctaacaggcttctttcttacttagaacttggaaaggctgctgtatttaataccctccaacactaacgcagacttaagataggtactgtttattgaaaacctactgagtgaaatgtgcggttttaggaccttcataaacatctcatttaatctttctagcatcctgtgaaacagccatgatttcacgttgataaacaaagaagacaggggtcccagggatgtgaagcatcttgcccaggcttctgctgctggtgaccagtgtagccaggactccarcccaggttttcctgactcagaagactgagctttttcctggatgttattaatagctaattgtgtccaagcaaccaagggccttgagtctgcttggttctgcttatggcctcacatcaagaaatggagctagtccatgtctgtagtcccartgctttgggaagccatgatgggaaggttgtcggaggccaaaagttcaagaccaggctgggcaatatcacaagactccatctctacggaaaagtaaaaaattagccagtcatggtggtgtacacttatggtcctagttactcaggagacttaggcaggaggattgcttgatcctaggaattcgaggctgcagtgagctatgattgcacctctgcacccaagcctgggcgacacagcgagaccctctctcttaaaaaaaaaaaatagcagagctcaccaaagtgatgttcacctttttatgacattcctttttcttagcttaagaaaagaaagctgctagatgagagtcttagttttcctgcataagacctcctttatgaatagaataaaagactgtcaaagtaggctgggcttgggcccaggctaatctatgaaggaagcaagctcgtgttccttacctatccttttggtgtccattggattgtgccccgaagtggcctttacccttgagccgtccccagccatggtgctcacacataggcttttgagctccttggagctatccagatcctgctcacttttccttcctgagatcagaacaaatcacccccttactcccactccaaacaaggccttgatgataaactaatccttcctaaaatgctggtaggtaaacaagcaatgatgaagcattgaacacaggttaactcctgacttttgtaccattgtctattccattacacattaacatgactctgaatgccagatccaaacctttgcccaccatctgcttgtcgtgcaacagttgaggcagtaaccaggggagattcacttcctgtcttgtccttccccagggatcacccccctgctgccctctagcagccaarctcagatgagttccattgttaccctaggtgtgcccatctctttggtagggaaggagaaaggtaagaatagccatcartgaggaaggattcttggagcgaggagccactgtggtttttcctgctatttaagatgttgagaccggataactttagaaagatacctgcacaaacccataaatastgcttttataaagtttagttcaccggaacctgagttcagtatttgacattagctttttgtccaaagagttgaagcctgctggaggtctttgctcaaataataaataccacatatttccaagtgtgttcaggtataggcactaggtactgtctgtttacttcatgttaggcacattacatgcattggctaatcaaatcctcatcaattacatatgtaataatctaaacttgcctccttgtattataaatggaaataatcctgtttatttaaacgggttttcatgtacctgtagggattaggaaactcaaatggcctttttaatacctttccctagtttgagctccctgttctctttaacagataaaacaacatatttgcttcagcctggaatctgtttttggtgctttggtgcagagacaggaaatgggcactcagagtcacactggtagttgcacactgtatctacagagggcgtgtctcatctgtactctgctgggttacaggatttcagtaggtatttgtgtccacctgagaattctgtttattacctttcatttgacagtgtctttcctttctgcagttgattttgctagagaggcaattcataaggtgaggtcctgttcatagtatgacttgctttctcaatatctccttcaatttttagtaactcttggtctatttggtgtctttaaaaaaaataacctagtaataaagacttcttttaatgtggaaatgtggtctggtagtaagttatttctttccacatgtaactgacccaatctggtttccaaatgagaagtgtgcaggccccagaggttgagaagccatatttcaactgtgaaaaaaatctgcttcctgcatctgttgaaatatagttgttcatacttgccatcccttatctttcttgtaacaatttgcacagttcttgccagaataaatgccattatctgtatgtttcagggagttccccaatttgatcatttttgtgtgtgtgtggtgtgtgtgtgagagagagagatactgcagtaaaacatttctaaaggatgaaagctcttgtatggcatagatatgaattccttcctctggtaataattaggttattcccagaagcacagtgtcattctttaaataaaagctttcctgtttaaagcttttcaaaggagcagaccaccttgaagattccccctagggttgatatgtgtctaattcattttataaaaattattcttgtcttcattttaaagctttggctatatagtcagaaatgtcctaaataacaaactattttgtatttaatttagggaagactaaagggaagaaaaatgaaaactcagtctttatgtaagctccaaggatattagggcttaaagggcttttctagttttatgagaatttgtactactgatttttatatattcctgtttttgagatgracagatctctggggaaattgttgagttacaatggcatttcactgtgatccctctcaagctcagatcagttctataacccaatgacaacctgtctctttggtttactgtcctgtgaaatgtcagctcaagtttcccagaagtcgtgtgtttatgatgagtcagagtgcttttcctcggtgggacagttgctggccctcttaattttggtgtatgtgcttccaagtatctaaacctccagtctgatctgtatatgctatcctaactgttaattgtattattgattatgttgattatcttgcttgaaggttcatacttttcaatttgatagaaataaagtttttttctgcttatagctagcgaa

SEQ ID NO: 3839 - DNA, 6594 bp, Homo sapiens
cgcagcctcgcgcctctccagcccctccacgcagcctcgggcctcggggcagagccctgggtggctttgaaaggcctgtctgttcgttgtcgccttctaagaagttggtgagatggcaaagcagtatatagagaaaagtcttttggttccagaccatgtgatcacacgcctaatgatgtccgagttggagaacaggcgtggccagcactggctccttgatggttttcctaggacattaggacaagccgaagccctggacaaaatctgtgaagtggatctagtgatcagtttgaatattccatttgaaacacttaaagatcgtctcagccgccgttggattcaccctcctagcggaagggtatataacctggacttcaatccacctcatgtacatggtattgatgaygtcactggtgaaccrttagtccagcaggaggatgataaacccgaagcagttgctgccaggctaagacagtacaaagacgtggcaaagccagtcattgaattatacaagagccgaggagtgctccaccaattttccggaacggagacgaacaaaatctggccctacgtttacacacttttctcaaacaagatcacacctattcagtccaaagaagcatattgaccctgcccaatggaagaaccaggaagatgtggtcattcattcaatagtgtgtgtagtattggtgctgtgtccaaattagaagctagctgaggtagcttgcagcatcttttctagttgaaatggtgaactgataggaaaacaaatgagtagaaagagttcatgaagaggccctcctctgcctttcaaaaggctggtcacctacacatgtttaaggtgtctctgcacatgtctcaagcccatcacaagaaagcaagtacagtgtggatttcaaatggtgtgtaacttcagctccagctggtttttgacagctgttgctgtggtaatatttttgacatgtgatggtgatagtctctggttctccccatccccacaaaggctgttgaaccacagcaccaggaagcctgagaatgaatcctgagggctctagcccaggctttgtcccaggctttctggtgtgtgccctcctggtaacagtgaaattgaagctacttactcatagtggttgtttctctggtcttgagtgactgtgtccacagttcatttttttccggtaggaataactccttttctacatccacgctccatagagtctctccttttcagacatcctgggatgaaagaatttggcttttttttttttttttttttggacatctgttttcactcttaggcttttaaacaatagttattgctyttatccctctcagattctaataactgagagcgatggggctatattgaatctctgtatgcactgagaactgagctatgaagaggatcttattaaactgctggtctgactttatggattgacactgttcmtttcttttattgtgaaaaaaaaaaaaaaaccctgaaagtcttgggaaccccctaaagtcttttgggaatcctcaaaaagcatgggaagttaagtatttagctacataaatgttgtaagatcatatcttatgtatagaagtaataagaccatttggaattactggactaattgaatagttaaggtttctattcgggacaataaaatgtattttgaaagtgctgctaactattgatgctgacagtgtttcactcctatgagtgacccaaacatattataaatatgtggtaaagggaatggagcctgtggggttgagcagaatgttgtactagctgtgcctggactgagtataacagctttatgattatgagaaaacaaattctttatttttttttctgttccaaagattcatcctatggggtggccataaagtctagaattagatactaatattttgtcattcattataacatatcaataaaccatttgttaaaagatttgcctggtttccagacttggtggccaccttgaataattcttgctgtcttctgggaaggatgatgaaatttattcctgctgccttaaaaatatgtatcccttcttcacccatcatgactgtccccagtgagtgtcctttactattcttgggagtgactcctgtctaacttttcatactggcgagaagaaaagaagcctattttaacactttagtggtgttgaaacacattacttactttctgaagatgtcccagtgaatcctctgtcaattcactgccatatgtaatctatatgataaggaawgcatcttccttctaagtactgcccaaactcttgccagctcctctcccattgtcccttcatgtgaatatttcttggctaccttagtggaaatatagatcagtyttctccccatccatcctctcaaacataatgagattgtttactttttagatttatgcagtgaaaatgcccagtcaggtctgaatcgtcagtgcattatattgacyctgagcactttagaatttagagttgcaattgaatgccagctgtggagatggggtgcatatcagatatataaataaagctcaggtttgctagggaaccaggtatagagaaaaataagtctgatatgaggaaaattgcacaatttagagtagttatgccgtagagaaaatttccacaaactaggaaatgtagagagttattctatagaatactcaaaagaggaaagtatgtgatttttggaaacaggaaaatcttcaaacttctttcttcacttccctttgtgtttagctgaccctccaatgtgatcattgcctttggagtttgggagaggtaygggaagtggcctgatccctgcttccatacttcactcctccatccatccttccctccctcttcccctccagctaaatggacaattctagccaacattgagtcactcaataagtctcaacagtgggtgtgtttgctgagattgtccagcggttgagcagtttggtctcacctccctcgctagttgagaccaaaaagagacaaataactttttcatggtctttgaaacataatgcttatttcgtggtcaatggctttaaaaaaatctgtttcttgttttcttcaacaaactcactagttttcccttaaatgatattgtaaaaattaaagtaatcttgaaaatgttttgacaaaagtaaaattaaagggacatcttttcttgttttgttttttttttttctattgccacacatgaccgttccttcacctttaagcaaagagagtggttcagatggtttctaagatgccaacctgacctcgcattctgtcattctacccagctcttaattcaatttgcttccattatcctaacaggcttctttcttacttagaacttggaaaggctgctgtatttaataccctccaacactaacgcagacttaagataggtactgtttattgaaaacctactgagtgaaatgtgcggttttaggaccttcataaacatctcatttaatctttctagcatcctgtgaaacagccatgatttcacgttgataaacaaagaagacaggggtcccagggatgtgaagcatcttgcccaggcttctgctgctggtgaccagtgtagccaggactccarcccaggttttcctgactcagaagactgagctttttcctggatgttattaatagctaattgtgtccaagcaaccaagggccttgagtctgcttggttctgcttatggcctcacatcaagaaatggagctagtccatgtctgtagtcccartgctttgggaagccatgatgggaaggttgtcggaggccaaaagttcaagaccaggctgggcaatatcacaagactccatctctacggaaaagtaaaaaattagccagtcatggtggtgtacacttatggtcctagttactcaggagacttaggcaggaggattgcttgatcctaggaattcgaggctgcagtgagctatgattgcacctctgcacccaagcctgggcgacacagcgagaccctctctcttaaaaaaaaaaaatagcagagctcaccaaagtgatgttcacctttttatgacattcctttttcttagcttaagaaaagaaagctgctagatgagagtcttagttttcctgcataagacctcctttatgaatagaataaaagactgtcaaagtaggctgggcttgggcccaggctaatctatgaaggaagcaagctcgtgttccttacctatccttttggtgtccattggattgtgccccgaagtggcctttacccttgagccgtccccagccatggtgctcacacataggcttttgagctccttggagctatccagatcctgctcacttttccttcctgagatcagaacaaatcacccccttactcccactccaaacaaggccttgatgataaactaatccttcctaaaatgctggtaggtaaacaagcaatgatgaagcattgaacacaggttaactcctgacttttgtaccattgtctattccattacacattaacatgactctgaatgccagatccaaacctttgcccaccatctgcttgtcgtgcaacagttgaggcagtaaccaggggagattcacttcctgtcttgtccttccccagggatcacccccctgctgccctctagcagccaarctcagatgagttccattgttaccctaggtgtgcccatctctttggtagggaaggagaaaggtaagaatagccatcartgaggaaggattcttggagcgaggagccactgtggtttttcctgctatttaagatgttgagaccggataactttagaaagatacctgcacaaacccataaatastgcttttataaagtttagttcaccggaacctgagttcagtatttgacattagctttttgtccaaagagttgaagcctgctggaggtctttgctcaaataataaataccacatatttccaagtgtgttcaggtataggcactaggtactgtctgtttacttcatgttaggcacattacatgcattggctaatcaaatcctcatcaattacatatgtaataatctaaacttgcctccttgtattataaatggaaataatcctgtttatttaaacgggttttcatgtacctgtagggattaggaaactcaaatggcctttttaatacctttccctagtttgagctccctgttctctttaacagataaaacaacatatttgcttcagcctggaatctgtttttggtgctttggtgcagagacaggaaatgggcactcagagtcacactggtagttgcacactgtatctacagagggcgtgtctcatctgtactctgctgggttacaggatttcagtaggtatttgtgtccacctgagaattctgtttattacctttcatttgacagtgtctttcctttctgcagttgattttgctagagaggcaattcataaggtgaggtcctgttcatagtatgacttgctttctcaatatctccttcaatttttagtaactcttggtctatttggtgtctttaaaaaaaataacctagtaataaagacttcttttaatgtggaaatgtggtctggtagtaagttatttctttccacatgtaactgacccaatctggtttccaaatgagaagtgtgcaggccccagaggttgagaagccatatttcaactgtgaaaaaaatctgcttcctgcatctgttgaaatatagttgttcatacttgccatcccttatctttcttgtaacaatttgcacagttcttgccagaataaatgccattatctgtatgtttcagggagttccccaatttgatcatttttgtgtgtgtgtggtgtgtgtgtgagagagagagatactgcagtaaaacatttctaaaggatgaaagctcttgtatggcatagatatgaattccttcctctggtaataattaggttattcccagaagcacagtgtcattctttaaataaaagctttcctgtttaaagcttttcaaaggagcagaccaccttgaagattccccctagggttgatatgtgtctaattcattttataaaaattattcttgtcttcattttaaagctttggctatatagtcagaaatgtcctaaataacaaactattttgtatttaatttagggaagactaaagggaagaaaaatgaaaactcagtctttatgtaagctccaaggatattagggcttaaagggcttttctagttttatgagaatttgtactactgatttttatatattcctgtttttgagatgracagatctctggggaaattgttgagttacaatggcatttcactgtgatccctctcaagctcagatcagttctataacccaatgacaacctgtctctttggtttactgtcctgtgaaatgtcagctcaagtttcccagaagtcgtgtgtttatgatgagtcagagtgcttttcctcggtgggacagttgctggccctcttaattttggtgtatgtgcttccaagtatctaaacctccagtctgatctgtatatgctatcctaactgttaattgtattattgattatgttgattatcttgcttgaaggttcatacttttcaatttgatagaaataaagtttttttctgcttatagctagcgaa

SEQ ID NO: 3840 - DNA, 6944 bp, Homo sapiens
agtggagtggaggggagggggcggcggccagcggctcgcgcggagccggtctcccgggcttacgtaaggcgcgagtcccgcgcggccggccggggctccgcgactgggcgggcggaggcggcgccgccctgcaggatccgggctggaagcctctcggagtgctgcctccagccaaggggcggccggcgagtcccagtgagagcggagggtgccagaggtagggggccgagaaacaaagttcccggggcttcctccggggccgcggtcggggctgckcgtttgaccgcccccctcctcgcgaaggcaatggcttccaaactcctgcgcgcggtcatcctcgggccgcccggctcgggcaagggcaccgtgwgccagaggatcgcccagaactttggtctccagcatctctccagcggccacttcttgcgggagaacatcaaggccagcaccgaagttggtgagatggcaaagcagtatatagagaaaagtcttttggttccagaccatgtgatcacacgcctaatgatgtccgagttggagaacaggcgtggccagcactggctccttgatggttttcctaggacattaggacaagccgaagccctggacaaaatctgtgaagtggatctagtgatcagtttgaatattccatttgaaacacttaaagatcgtctcagccgccgttggattcaccctcctagcggaagggtatataacctggacttcaatccacctcatgtacatggtattgatgaygtcactggtgaaccrttagtccagcaggaggatgataaacccgaagcagttgctgccaggctaagacagtacaaagacgtggcaaagccagtcattgaattatacaagagccgaggagtgctccaccaattttccggaacggagacgaacaaaatctggccctacgtttacacacttttctcaaacaagatcacacctattcagtccaaagaagcatattgaccctgcccaatggaagaaccaggaagatgtggtcattcattcaatagtgtgtgtagtattggtgctgtgtccaaattagaagctagctgaggtagcttgcagcatcttttctagttgaaatggtgaactgataggaaaacaaatgagtagaaagagttcatgaagaggccctcctctgcctttcaaaaggctggtcacctacacatgtttaaggtgtctctgcacatgtctcaagcccatcacaagaaagcaagtacagtgtggatttcaaatggtgtgtaacttcagctccagctggtttttgacagctgttgctgtggtaatatttttgacatgtgatggtgatagtctctggttctccccatccccacaaaggctgttgaaccacagcaccaggaagcctgagaatgaatcctgagggctctagcccaggctttgtcccaggctttctggtgtgtgccctcctggtaacagtgaaattgaagctacttactcatagtggttgtttctctggtcttgagtgactgtgtccacagttcatttttttccggtaggaataactccttttctacatccacgctccatagagtctctccttttcagacatcctgggatgaaagaatttggcttttttttttttttttttttggacatctgttttcactcttaggcttttaaacaatagttattgctyttatccctctcagattctaataactgagagcgatggggctatattgaatctctgtatgcactgagaactgagctatgaagaggatcttattaaactgctggtctgactttatggattgacactgttcmtttcttttattgtgaaaaaaaaaaaaaaaccctgaaagtcttgggaaccccctaaagtcttttgggaatcctcaaaaagcatgggaagttaagtatttagctacataaatgttgtaagatcatatcttatgtatagaagtaataagaccatttggaattactggactaattgaatagttaaggtttctattcgggacaataaaatgtattttgaaagtgctgctaactattgatgctgacagtgtttcactcctatgagtgacccaaacatattataaatatgtggtaaagggaatggagcctgtggggttgagcagaatgttgtactagctgtgcctggactgagtataacagctttatgattatgagaaaacaaattctttatttttttttctgttccaaagattcatcctatggggtggccataaagtctagaattagatactaatattttgtcattcattataacatatcaataaaccatttgttaaaagatttgcctggtttccagacttggtggccaccttgaataattcttgctgtcttctgggaaggatgatgaaatttattcctgctgccttaaaaatatgtatcccttcttcacccatcatgactgtccccagtgagtgtcctttactattcttgggagtgactcctgtctaacttttcatactggcgagaagaaaagaagcctattttaacactttagtggtgttgaaacacattacttactttctgaagatgtcccagtgaatcctctgtcaattcactgccatatgtaatctatatgataaggaawgcatcttccttctaagtactgcccaaactcttgccagctcctctcccattgtcccttcatgtgaatatttcttggctaccttagtggaaatatagatcagtyttctccccatccatcctctcaaacataatgagattgtttactttttagatttatgcagtgaaaatgcccagtcaggtctgaatcgtcagtgcattatattgacyctgagcactttagaatttagagttgcaattgaatgccagctgtggagatggggtgcatatcagatatataaataaagctcaggtttgctagggaaccaggtatagagaaaaataagtctgatatgaggaaaattgcacaatttagagtagttatgccgtagagaaaatttccacaaactaggaaatgtagagagttattctatagaatactcaaaagaggaaagtatgtgatttttggaaacaggaaaatcttcaaacttctttcttcacttccctttgtgtttagctgaccctccaatgtgatcattgcctttggagtttgggagaggtaygggaagtggcctgatccctgcttccatacttcactcctccatccatccttccctccctcttcccctccagctaaatggacaattctagccaacattgagtcactcaataagtctcaacagtgggtgtgtttgctgagattgtccagcggttgagcagtttggtctcacctccctcgctagttgagaccaaaaagagacaaataactttttcatggtctttgaaacataatgcttatttcgtggtcaatggctttaaaaaaatctgtttcttgttttcttcaacaaactcactagttttcccttaaatgatattgtaaaaattaaagtaatcttgaaaatgttttgacaaaagtaaaattaaagggacatcttttcttgttttgttttttttttttctattgccacacatgaccgttccttcacctttaagcaaagagagtggttcagatggtttctaagatgccaacctgacctcgcattctgtcattctacccagctcttaattcaatttgcttccattatcctaacaggcttctttcttacttagaacttggaaaggctgctgtatttaataccctccaacactaacgcagacttaagataggtactgtttattgaaaacctactgagtgaaatgtgcggttttaggaccttcataaacatctcatttaatctttctagcatcctgtgaaacagccatgatttcacgttgataaacaaagaagacaggggtcccagggatgtgaagcatcttgcccaggcttctgctgctggtgaccagtgtagccaggactccarcccaggttttcctgactcagaagactgagctttttcctggatgttattaatagctaattgtgtccaagcaaccaagggccttgagtctgcttggttctgcttatggcctcacatcaagaaatggagctagtccatgtctgtagtcccartgctttgggaagccatgatgggaaggttgtcggaggccaaaagttcaagaccaggctgggcaatatcacaagactccatctctacggaaaagtaaaaaattagccagtcatggtggtgtacacttatggtcctagttactcaggagacttaggcaggaggattgcttgatcctaggaattcgaggctgcagtgagctatgattgcacctctgcacccaagcctgggcgacacagcgagaccctctctcttaaaaaaaaaaaatagcagagctcaccaaagtgatgttcacctttttatgacattcctttttcttagcttaagaaaagaaagctgctagatgagagtcttagttttcctgcataagacctcctttatgaatagaataaaagactgtcaaagtaggctgggcttgggcccaggctaatctatgaaggaagcaagctcgtgttccttacctatccttttggtgtccattggattgtgccccgaagtggcctttacccttgagccgtccccagccatggtgctcacacataggcttttgagctccttggagctatccagatcctgctcacttttccttcctgagatcagaacaaatcacccccttactcccactccaaacaaggccttgatgataaactaatccttcctaaaatgctggtaggtaaacaagcaatgatgaagcattgaacacaggttaactcctgacttttgtaccattgtctattccattacacattaacatgactctgaatgccagatccaaacctttgcccaccatctgcttgtcgtgcaacagttgaggcagtaaccaggggagattcacttcctgtcttgtccttccccagggatcacccccctgctgccctctagcagccaarctcagatgagttccattgttaccctaggtgtgcccatctctttggtagggaaggagaaaggtaagaatagccatcartgaggaaggattcttggagcgaggagccactgtggtttttcctgctatttaagatgttgagaccggataactttagaaagatacctgcacaaacccataaatastgcttttataaagtttagttcaccggaacctgagttcagtatttgacattagctttttgtccaaagagttgaagcctgctggaggtctttgctcaaataataaataccacatatttccaagtgtgttcaggtataggcactaggtactgtctgtttacttcatgttaggcacattacatgcattggctaatcaaatcctcatcaattacatatgtaataatctaaacttgcctccttgtattataaatggaaataatcctgtttatttaaacgggttttcatgtacctgtagggattaggaaactcaaatggcctttttaatacctttccctagtttgagctccctgttctctttaacagataaaacaacatatttgcttcagcctggaatctgtttttggtgctttggtgcagagacaggaaatgggcactcagagtcacactggtagttgcacactgtatctacagagggcgtgtctcatctgtactctgctgggttacaggatttcagtaggtatttgtgtccacctgagaattctgtttattacctttcatttgacagtgtctttcctttctgcagttgattttgctagagaggcaattcataaggtgaggtcctgttcatagtatgacttgctttctcaatatctccttcaatttttagtaactcttggtctatttggtgtctttaaaaaaaataacctagtaataaagacttcttttaatgtggaaatgtggtctggtagtaagttatttctttccacatgtaactgacccaatctggtttccaaatgagaagtgtgcaggccccagaggttgagaagccatatttcaactgtgaaaaaaatctgcttcctgcatctgttgaaatatagttgttcatacttgccatcccttatctttcttgtaacaatttgcacagttcttgccagaataaatgccattatctgtatgtttcagggagttccccaatttgatcatttttgtgtgtgtgtggtgtgtgtgtgagagagagagatactgcagtaaaacatttctaaaggatgaaagctcttgtatggcatagatatgaattccttcctctggtaataattaggttattcccagaagcacagtgtcattctttaaataaaagctttcctgtttaaagcttttcaaaggagcagaccaccttgaagattccccctagggttgatatgtgtctaattcattttataaaaattattcttgtcttcattttaaagctttggctatatagtcagaaatgtcctaaataacaaactattttgtatttaatttagggaagactaaagggaagaaaaatgaaaactcagtctttatgtaagctccaaggatattagggcttaaagggcttttctagttttatgagaatttgtactactgatttttatatattcctgtttttgagatgracagatctctggggaaattgttgagttacaatggcatttcactgtgatccctctcaagctcagatcagttctataacccaatgacaacctgtctctttggtttactgtcctgtgaaatgtcagctcaagtttcccagaagtcgtgtgtttatgatgagtcagagtgcttttcctcggtgggacagttgctggccctcttaattttggtgtatgtgcttccaagtatctaaacctccagtctgatctgtatatgctatcctaactgttaattgtattattgattatgttgattatcttgcttgaaggttcatacttttcaatttgatagaaataaagtttttttctgcttatagctagcgaa

SEQ ID NO: 3841 - DNA, 6327 bp, Homo sapiens
ggaatttcttcccacatcaggaaggatggagagaaggcaaaactaagagttgaagttggtgagatggcaaagcagtatatagagaaaagtcttttggttccagaccatgtgatcacacgcctaatgatgtccgagttggagaacaggcgtggccagcactggctccttgatggttttcctaggacattaggacaagccgaagccctggacaaaatctgtgaagtggatctagtgatcagtttgaatattccatttgaaacacttaaagatcgtctcagccgccgttggattcaccctcctagcggaagggtatataacctggacttcaatccacctcatgtacatggtattgatgaygtcactggtgaaccrttagtccagcaggaggatgataaacccgaagcagttgctgccaggctaagacagtacaaagacgtggcaaagccagtcattgaattatacaagagccgaggagtgctccaccaattttccggaacggagacgaacaaaatctggccctacgtttacacacttttctcaaacaagatcacacctattcagtccaaagaagcatattgaccctgcccaatggaagaaccaggaagatgtggtcattcattcaatagtgtgtgtagtattggtgctgtgtccaaattagaagctagctgaggtagcttgcagcatcttttctagttgaaatggtgaactgataggaaaacaaatgagtagaaagagttcatgaagaggccctcctctgcctttcaaaaggctggtcacctacacatgtttaaggtgtctctgcacatgtctcaagcccatcacaagaaagcaagtacagtgtggatttcaaatggtgtgtaacttcagctccagctggtttttgacagctgttgctgtggtaatatttttgacatgtgatggtgatagtctctggttctccccatccccacaaaggctgttgaaccacagcaccaggaagcctgagaatgaatcctgagggctctagcccaggctttgtcccaggctttctggtgtgtgccctcctggtaacagtgaaattgaagctacttactcatagtggttgtttctctggtcttgagtgactgtgtccacagttcatttttttccggtaggaataactccttttctacatccacgctccatagagtctctccttttcagacatcctgggatgaaagaatttggcttttttttttttttttttttggacatctgttttcactcttaggcttttaaacaatagttattgctyttatccctctcagattctaataactgagagcgatggggctatattgaatctctgtatgcactgagaactgagctatgaagaggatcttattaaactgctggtctgactttatggattgacactgttcmtttcttttattgtgaaaaaaaaaaaaaaaccctgaaagtcttgggaaccccctaaagtcttttgggaatcctcaaaaagcatgggaagttaagtatttagctacataaatgttgtaagatcatatcttatgtatagaagtaataagaccatttggaattactggactaattgaatagttaaggtttctattcgggacaataaaatgtattttgaaagtgctgctaactattgatgctgacagtgtttcactcctatgagtgacccaaacatattataaatatgtggtaaagggaatggagcctgtggggttgagcagaatgttgtactagctgtgcctggactgagtataacagctttatgattatgagaaaacaaattctttatttttttttctgttccaaagattcatcctatggggtggccataaagtctagaattagatactaatattttgtcattcattataacatatcaataaaccatttgttaaaagatttgcctggtttccagacttggtggccaccttgaataattcttgctgtcttctgggaaggatgatgaaatttattcctgctgccttaaaaatatgtatcccttcttcacccatcatgactgtccccagtgagtgtcctttactattcttgggagtgactcctgtctaacttttcatactggcgagaagaaaagaagcctattttaacactttagtggtgttgaaacacattacttactttctgaagatgtcccagtgaatcctctgtcaattcactgccatatgtaatctatatgataaggaawgcatcttccttctaagtactgcccaaactcttgccagctcctctcccattgtcccttcatgtgaatatttcttggctaccttagtggaaatatagatcagtyttctccccatccatcctctcaaacataatgagattgtttactttttagatttatgcagtgaaaatgcccagtcaggtctgaatcgtcagtgcattatattgacyctgagcactttagaatttagagttgcaattgaatgccagctgtggagatggggtgcatatcagatatataaataaagctcaggtttgctagggaaccaggtatagagaaaaataagtctgatatgaggaaaattgcacaatttagagtagttatgccgtagagaaaatttccacaaactaggaaatgtagagagttattctatagaatactcaaaagaggaaagtatgtgatttttggaaacaggaaaatcttcaaacttctttcttcacttccctttgtgtttagctgaccctccaatgtgatcattgcctttggagtttgggagaggtaygggaagtggcctgatccctgcttccatacttcactcctccatccatccttccctccctcttcccctccagctaaatggacaattctagccaacattgagtcactcaataagtctcaacagtgggtgtgtttgctgagattgtccagcggttgagcagtttggtctcacctccctcgctagttgagaccaaaaagagacaaataactttttcatggtctttgaaacataatgcttatttcgtggtcaatggctttaaaaaaatctgtttcttgttttcttcaacaaactcactagttttcccttaaatgatattgtaaaaattaaagtaatcttgaaaatgttttgacaaaagtaaaattaaagggacatcttttcttgttttgttttttttttttctattgccacacatgaccgttccttcacctttaagcaaagagagtggttcagatggtttctaagatgccaacctgacctcgcattctgtcattctacccagctcttaattcaatttgcttccattatcctaacaggcttctttcttacttagaacttggaaaggctgctgtatttaataccctccaacactaacgcagacttaagataggtactgtttattgaaaacctactgagtgaaatgtgcggttttaggaccttcataaacatctcatttaatctttctagcatcctgtgaaacagccatgatttcacgttgataaacaaagaagacaggggtcccagggatgtgaagcatcttgcccaggcttctgctgctggtgaccagtgtagccaggactccarcccaggttttcctgactcagaagactgagctttttcctggatgttattaatagctaattgtgtccaagcaaccaagggccttgagtctgcttggttctgcttatggcctcacatcaagaaatggagctagtccatgtctgtagtcccartgctttgggaagccatgatgggaaggttgtcggaggccaaaagttcaagaccaggctgggcaatatcacaagactccatctctacggaaaagtaaaaaattagccagtcatggtggtgtacacttatggtcctagttactcaggagacttaggcaggaggattgcttgatcctaggaattcgaggctgcagtgagctatgattgcacctctgcacccaagcctgggcgacacagcgagaccctctctcttaaaaaaaaaaaatagcagagctcaccaaagtgatgttcacctttttatgacattcctttttcttagcttaagaaaagaaagctgctagatgagagtcttagttttcctgcataagacctcctttatgaatagaataaaagactgtcaaagtaggctgggcttgggcccaggctaatctatgaaggaagcaagctcgtgttccttacctatccttttggtgtccattggattgtgccccgaagtggcctttacccttgagccgtccccagccatggtgctcacacataggcttttgagctccttggagctatccagatcctgctcacttttccttcctgagatcagaacaaatcacccccttactcccactccaaacaaggccttgatgataaactaatccttcctaaaatgctggtaggtaaacaagcaatgatgaagcattgaacacaggttaactcctgacttttgtaccattgtctattccattacacattaacatgactctgaatgccagatccaaacctttgcccaccatctgcttgtcgtgcaacagttgaggcagtaaccaggggagattcacttcctgtcttgtccttccccagggatcacccccctgctgccctctagcagccaarctcagatgagttccattgttaccctaggtgtgcccatctctttggtagggaaggagaaaggtaagaatagccatcartgaggaaggattcttggagcgaggagccactgtggtttttcctgctatttaagatgttgagaccggataactttagaaagatacctgcacaaacccataaatastgcttttataaagtttagttcaccggaacctgagttcagtatttgacattagctttttgtccaaagagttgaagcctgctggaggtctttgctcaaataataaataccacatatttccaagtgtgttcaggtataggcactaggtactgtctgtttacttcatgttaggcacattacatgcattggctaatcaaatcctcatcaattacatatgtaataatctaaacttgcctccttgtattataaatggaaataatcctgtttatttaaacgggttttcatgtacctgtagggattaggaaactcaaatggcctttttaatacctttccctagtttgagctccctgttctctttaacagagacaggaaatgggcactcagagtcacactggtagttgcacactgtatctacagagggcgtgtctcatctgtactctgctgggttacaggatttcagtaggtatttgtgtccacctgagaattctgtttattacctttcatttgacagtgtctttcctttctgcagttgattttgctagagaggcaattcataaggtgaggtcctgttcatagtatgacttgctttctcaatatctccttcaatttttagtaactcttggtctatttggtgtctttaaaaaaaataacctagtaataaagacttcttttaatgtggaaatgtggtctggtagtaagttatttctttccacatgtaactgacccaatctggtttccaaatgagaagtgtgcaggccccagaggttgagaagccatatttcaactgtgaaaaaaatctgcttcctgcatctgttgaaatatagttgttcatacttgccatcccttatctttcttgtaacaatttgcacagttcttgccagaataaatgccattatctgtatgtttcagggagttccccaatttgatcatttttgtgtgtgtgtggtgtgtgtgtgagagagagagatactgcagtaaaacatttctaaaggatgaaagctcttgtatggcatagatatgaattccttcctctggtaataattaggttattcccagaagcacagtgtcattctttaaataaaagctttcctgtttaaagcttttcaaaggagcagaccaccttgaagattccccctagggttgatatgtgtctaattcattttataaaaattattcttgtcttcattttaaagctttggctatatagtcagaaatgtcctaaataacaaactattttgtatttaatttagggaagactaaagggatccctctcaagctcagatcagttctataacccaatgacaacctgtctctttggtttactgtcctgtgaaatgtcagctcaagtttcccagaagtcgtgtgtttatgatgagtcagagtgcttttcctcggtgggacagttgctggccctcttaattttggtgtatgtgcttccaagtatctaaacctccagtctgatctgtatatgctatcctaactgttaattgtattattgattatgttgattatcttgcttgaaggttcatacttttcaatttgatagaaataaagtttttttctgcttatagctagcgaa

SEQ ID NO: 3842 - DNA, 6726 bp, Homo sapiens
agtggagtggaggggagggggcggcggccagcggctcgcgcggagccggtctcccgggcttacgtaaggcgcgagtcccgcgcggccggccggggctccgcgactgggcgggcggaggcggcgccgccctgcaggatccgggctggaagcctctcggagtgctgcctccagccaaggggcggccggcgagtcccagtgagagcggagggtgccagaggtagggggccgagaaacaaagttcccggggcttcctccggggccgcggtcggggctgckcgtttgaccgcccccctcctcgcgaaggcaatggcttccaaactcctgcgcgcggtcatcctcgggccgcccggctcgggcaagggcaccgtgwgccagaggatcgcccagaactttggtctccagcatctctccagcggccacttcttgcgggagaacatcaaggccagcaccgaagttggtgagatggcaaagcagtatatagagaaaagtcttttggttccagaccatgtgatcacacgcctaatgatgtccgagttggagaacaggcgtggccagcactggctccttgatggttttcctaggacattaggacaagccgaagccctggacaaaatctgtgaagtggatctagtgatcagtttgaatattccatttgaaacacttaaagatcgtctcagccgccgttggattcaccctcctagcggaagggtatataacctggacttcaatccacctcatgtacatggtattgatgaygtcactggtgaaccrttagtccagcaggaggatgataaacccgaagcagttgctgccaggctaagacagtacaaagacgtggcaaagccagtcattgaattatacaagagccgaggagtgctccaccaattttccggaacggagacgaacaaaatctggccctacgtttacacacttttctcaaacaagatcacacctattcagtccaaagaagcatattgaccctgcccaatggaagaaccaggaagatgtggtcattcattcaatagtgtgtgtagtattggtgctgtgtccaaattagaagctagctgaggtagcttgcagcatcttttctagttgaaatggtgaactgataggaaaacaaatgagtagaaagagttcatgaagaggccctcctctgcctttcaaaaggctggtcacctacacatgtttaaggtgtctctgcacatgtctcaagcccatcacaagaaagcaagtacagtgtggatttcaaatggtgtgtaacttcagctccagctggtttttgacagctgttgctgtggtaatatttttgacatgtgatggtgatagtctctggttctccccatccccacaaaggctgttgaaccacagcaccaggaagcctgagaatgaatcctgagggctctagcccaggctttgtcccaggctttctggtgtgtgccctcctggtaacagtgaaattgaagctacttactcatagtggttgtttctctggtcttgagtgactgtgtccacagttcatttttttccggtaggaataactccttttctacatccacgctccatagagtctctccttttcagacatcctgggatgaaagaatttggcttttttttttttttttttttggacatctgttttcactcttaggcttttaaacaatagttattgctyttatccctctcagattctaataactgagagcgatggggctatattgaatctctgtatgcactgagaactgagctatgaagaggatcttattaaactgctggtctgactttatggattgacactgttcmtttcttttattgtgaaaaaaaaaaaaaaaccctgaaagtcttgggaaccccctaaagtcttttgggaatcctcaaaaagcatgggaagttaagtatttagctacataaatgttgtaagatcatatcttatgtatagaagtaataagaccatttggaattactggactaattgaatagttaaggtttctattcgggacaataaaatgtattttgaaagtgctgctaactattgatgctgacagtgtttcactcctatgagtgacccaaacatattataaatatgtggtaaagggaatggagcctgtggggttgagcagaatgttgtactagctgtgcctggactgagtataacagctttatgattatgagaaaacaaattctttatttttttttctgttccaaagattcatcctatggggtggccataaagtctagaattagatactaatattttgtcattcattataacatatcaataaaccatttgttaaaagatttgcctggtttccagacttggtggccaccttgaataattcttgctgtcttctgggaaggatgatgaaatttattcctgctgccttaaaaatatgtatcccttcttcacccatcatgactgtccccagtgagtgtcctttactattcttgggagtgactcctgtctaacttttcatactggcgagaagaaaagaagcctattttaacactttagtggtgttgaaacacattacttactttctgaagatgtcccagtgaatcctctgtcaattcactgccatatgtaatctatatgataaggaawgcatcttccttctaagtactgcccaaactcttgccagctcctctcccattgtcccttcatgtgaatatttcttggctaccttagtggaaatatagatcagtyttctccccatccatcctctcaaacataatgagattgtttactttttagatttatgcagtgaaaatgcccagtcaggtctgaatcgtcagtgcattatattgacyctgagcactttagaatttagagttgcaattgaatgccagctgtggagatggggtgcatatcagatatataaataaagctcaggtttgctagggaaccaggtatagagaaaaataagtctgatatgaggaaaattgcacaatttagagtagttatgccgtagagaaaatttccacaaactaggaaatgtagagagttattctatagaatactcaaaagaggaaagtatgtgatttttggaaacaggaaaatcttcaaacttctttcttcacttccctttgtgtttagctgaccctccaatgtgatcattgcctttggagtttgggagaggtaygggaagtggcctgatccctgcttccatacttcactcctccatccatccttccctccctcttcccctccagctaaatggacaattctagccaacattgagtcactcaataagtctcaacagtgggtgtgtttgctgagattgtccagcggttgagcagtttggtctcacctccctcgctagttgagaccaaaaagagacaaataactttttcatggtctttgaaacataatgcttatttcgtggtcaatggctttaaaaaaatctgtttcttgttttcttcaacaaactcactagttttcccttaaatgatattgtaaaaattaaagtaatcttgaaaatgttttgacaaaagtaaaattaaagggacatcttttcttgttttgttttttttttttctattgccacacatgaccgttccttcacctttaagcaaagagagtggttcagatggtttctaagatgccaacctgacctcgcattctgtcattctacccagctcttaattcaatttgcttccattatcctaacaggcttctttcttacttagaacttggaaaggctgctgtatttaataccctccaacactaacgcagacttaagataggtactgtttattgaaaacctactgagtgaaatgtgcggttttaggaccttcataaacatctcatttaatctttctagcatcctgtgaaacagccatgatttcacgttgataaacaaagaagacaggggtcccagggatgtgaagcatcttgcccaggcttctgctgctggtgaccagtgtagccaggactccarcccaggttttcctgactcagaagactgagctttttcctggatgttattaatagctaattgtgtccaagcaaccaagggccttgagtctgcttggttctgcttatggcctcacatcaagaaatggagctagtccatgtctgtagtcccartgctttgggaagccatgatgggaaggttgtcggaggccaaaagttcaagaccaggctgggcaatatcacaagactccatctctacggaaaagtaaaaaattagccagtcatggtggtgtacacttatggtcctagttactcaggagacttaggcaggaggattgcttgatcctaggaattcgaggctgcagtgagctatgattgcacctctgcacccaagcctgggcgacacagcgagaccctctctcttaaaaaaaaaaaatagcagagctcaccaaagtgatgttcacctttttatgacattcctttttcttagcttaagaaaagaaagctgctagatgagagtcttagttttcctgcataagacctcctttatgaatagaataaaagactgtcaaagtaggctgggcttgggcccaggctaatctatgaaggaagcaagctcgtgttccttacctatccttttggtgtccattggattgtgccccgaagtggcctttacccttgagccgtccccagccatggtgctcacacataggcttttgagctccttggagctatccagatcctgctcacttttccttcctgagatcagaacaaatcacccccttactcccactccaaacaaggccttgatgataaactaatccttcctaaaatgctggtaggtaaacaagcaatgatgaagcattgaacacaggttaactcctgacttttgtaccattgtctattccattacacattaacatgactctgaatgccagatccaaacctttgcccaccatctgcttgtcgtgcaacagttgaggcagtaaccaggggagattcacttcctgtcttgtccttccccagggatcacccccctgctgccctctagcagccaarctcagatgagttccattgttaccctaggtgtgcccatctctttggtagggaaggagaaaggtaagaatagccatcartgaggaaggattcttggagcgaggagccactgtggtttttcctgctatttaagatgttgagaccggataactttagaaagatacctgcacaaacccataaatastgcttttataaagtttagttcaccggaacctgagttcagtatttgacattagctttttgtccaaagagttgaagcctgctggaggtctttgctcaaataataaataccacatatttccaagtgtgttcaggtataggcactaggtactgtctgtttacttcatgttaggcacattacatgcattggctaatcaaatcctcatcaattacatatgtaataatctaaacttgcctccttgtattataaatggaaataatcctgtttatttaaacgggttttcatgtacctgtagggattaggaaactcaaatggcctttttaatacctttccctagtttgagctccctgttctctttaacagagacaggaaatgggcactcagagtcacactggtagttgcacactgtatctacagagggcgtgtctcatctgtactctgctgggttacaggatttcagtaggtatttgtgtccacctgagaattctgtttattacctttcatttgacagtgtctttcctttctgcagttgattttgctagagaggcaattcataaggtgaggtcctgttcatagtatgacttgctttctcaatatctccttcaatttttagtaactcttggtctatttggtgtctttaaaaaaaataacctagtaataaagacttcttttaatgtggaaatgtggtctggtagtaagttatttctttccacatgtaactgacccaatctggtttccaaatgagaagtgtgcaggccccagaggttgagaagccatatttcaactgtgaaaaaaatctgcttcctgcatctgttgaaatatagttgttcatacttgccatcccttatctttcttgtaacaatttgcacagttcttgccagaataaatgccattatctgtatgtttcagggagttccccaatttgatcatttttgtgtgtgtgtggtgtgtgtgtgagagagagagatactgcagtaaaacatttctaaaggatgaaagctcttgtatggcatagatatgaattccttcctctggtaataattaggttattcccagaagcacagtgtcattctttaaataaaagctttcctgtttaaagcttttcaaaggagcagaccaccttgaagattccccctagggttgatatgtgtctaattcattttataaaaattattcttgtcttcattttaaagctttggctatatagtcagaaatgtcctaaataacaaactattttgtatttaatttagggaagactaaagggatccctctcaagctcagatcagttctataacccaatgacaacctgtctctttggtttactgtcctgtgaaatgtcagctcaagtttcccagaagtcgtgtgtttatgatgagtcagagtgcttttcctcggtgggacagttgctggccctcttaattttggtgtatgtgcttccaagtatctaaacctccagtctgatctgtatatgctatcctaactgttaattgtattattgattatgttgattatcttgcttgaaggttcatacttttcaatttgatagaaataaagtttttttctgcttatagctagcgaa

SEQ ID NO: 3843 - DNA, 489 bp, Homo sapiens
aggaggtggaggagggcgaggaggtggagaagggcggggaggtgtagcgtggcgctcagtccgcctgctactcggtcccggcgctgggctgaggggaggggttgtcttaaaagtctctccttccccctgtaggcaatggcttccaaactcctgcgcgcggtcatcctcgggccgcccggctcgggcaagggcaccgtgwgccagaggatcgcccagaactttggtctccagcatctctccagcggccacttcttgcgggagaacatcaaggccagcaccggctcgtacgtgccggggcgcatgcagctggcggccgcgcggcttaaccgcgcctggggaggaggccgaggctccaggggcggccgccagggttctcgctcttgtcgcgtctgttcaaaccggcactgtctgatccagaaatgtggcctcaatacgtgctgccagtgtttccgtcagtacgcgaacgatatcagttttattaagttggac

SEQ ID NO: 3844 - DNA, 7054 bp, Homo sapiens
agccgccggggaggggacgagacgcagaccacacgttgcccacgtgcgaggaccgggcaggggctcagcccctaggccgcccggtgcgtggggcggcgggggctggctttgagtcacccccgcttgtgccagcttccccggctcggcggagactggcttggggatgcctggccgcccggcccccttctcggacgcggcgtggggagcgagctggagttaaggatgaaggtcccggcgctgggctgaggggaggggttgtcttaaaagtctctccttccccctgtaggggcggccggcgagtcccagtgagagcggagggtgccagaggtagggggccgagaaacaaagttcccggggcttcctccggggccgcggtcggggctgckcgtttgaccgcccccctcctcgcgaaggcaatggcttccaaactcctgcgcgcggtcatcctcgggccgcccggctcgggcaagggcaccgtgwgccagaggatcgcccagaactttggtctccagcatctctccagcggccacttcttgcgggagaacatcaaggccagcaccgaagttggtgagatggcaaagcagtatatagagaaaagtcttttggttccagaccatgtgatcacacgcctaatgatgtccgagttggagaacaggcgtggccagcactggctccttgatggttttcctaggacattaggacaagccgaagccctggacaaaatctgtgaagtggatctagtgatcagtttgaatattccatttgaaacacttaaagatcgtctcagccgccgttggattcaccctcctagcggaagggtatataacctggacttcaatccacctcatgtacatggtattgatgaygtcactggtgaaccrttagtccagcaggaggatgataaacccgaagcagttgctgccaggctaagacagtacaaagacgtggcaaagccagtcattgaattatacaagagccgaggagtgctccaccaattttccggaacggagacgaacaaaatctggccctacgtttacacacttttctcaaacaagatcacacctattcagtccaaagaagcatattgaccctgcccaatggaagaaccaggaagatgtggtcattcattcaatagtgtgtgtagtattggtgctgtgtccaaattagaagctagctgaggtagcttgcagcatcttttctagttgaaatggtgaactgataggaaaacaaatgagtagaaagagttcatgaagaggccctcctctgcctttcaaaaggctggtcacctacacatgtttaaggtgtctctgcacatgtctcaagcccatcacaagaaagcaagtacagtgtggatttcaaatggtgtgtaacttcagctccagctggtttttgacagctgttgctgtggtaatatttttgacatgtgatggtgatagtctctggttctccccatccccacaaaggctgttgaaccacagcaccaggaagcctgagaatgaatcctgagggctctagcccaggctttgtcccaggctttctggtgtgtgccctcctggtaacagtgaaattgaagctacttactcatagtggttgtttctctggtcttgagtgactgtgtccacagttcatttttttccggtaggaataactccttttctacatccacgctccatagagtctctccttttcagacatcctgggatgaaagaatttggcttttttttttttttttttttggacatctgttttcactcttaggcttttaaacaatagttattgctyttatccctctcagattctaataactgagagcgatggggctatattgaatctctgtatgcactgagaactgagctatgaagaggatcttattaaactgctggtctgactttatggattgacactgttcmtttcttttattgtgaaaaaaaaaaaaaaaccctgaaagtcttgggaaccccctaaagtcttttgggaatcctcaaaaagcatgggaagttaagtatttagctacataaatgttgtaagatcatatcttatgtatagaagtaataagaccatttggaattactggactaattgaatagttaaggtttctattcgggacaataaaatgtattttgaaagtgctgctaactattgatgctgacagtgtttcactcctatgagtgacccaaacatattataaatatgtggtaaagggaatggagcctgtggggttgagcagaatgttgtactagctgtgcctggactgagtataacagctttatgattatgagaaaacaaattctttatttttttttctgttccaaagattcatcctatggggtggccataaagtctagaattagatactaatattttgtcattcattataacatatcaataaaccatttgttaaaagatttgcctggtttccagacttggtggccaccttgaataattcttgctgtcttctgggaaggatgatgaaatttattcctgctgccttaaaaatatgtatcccttcttcacccatcatgactgtccccagtgagtgtcctttactattcttgggagtgactcctgtctaacttttcatactggcgagaagaaaagaagcctattttaacactttagtggtgttgaaacacattacttactttctgaagatgtcccagtgaatcctctgtcaattcactgccatatgtaatctatatgataaggaawgcatcttccttctaagtactgcccaaactcttgccagctcctctcccattgtcccttcatgtgaatatttcttggctaccttagtggaaatatagatcagtyttctccccatccatcctctcaaacataatgagattgtttactttttagatttatgcagtgaaaatgcccagtcaggtctgaatcgtcagtgcattatattgacyctgagcactttagaatttagagttgcaattgaatgccagctgtggagatggggtgcatatcagatatataaataaagctcaggtttgctagggaaccaggtatagagaaaaataagtctgatatgaggaaaattgcacaatttagagtagttatgccgtagagaaaatttccacaaactaggaaatgtagagagttattctatagaatactcaaaagaggaaagtatgtgatttttggaaacaggaaaatcttcaaacttctttcttcacttccctttgtgtttagctgaccctccaatgtgatcattgcctttggagtttgggagaggtaygggaagtggcctgatccctgcttccatacttcactcctccatccatccttccctccctcttcccctccagctaaatggacaattctagccaacattgagtcactcaataagtctcaacagtgggtgtgtttgctgagattgtccagcggttgagcagtttggtctcacctccctcgctagttgagaccaaaaagagacaaataactttttcatggtctttgaaacataatgcttatttcgtggtcaatggctttaaaaaaatctgtttcttgttttcttcaacaaactcactagttttcccttaaatgatattgtaaaaattaaagtaatcttgaaaatgttttgacaaaagtaaaattaaagggacatcttttcttgttttgttttttttttttctattgccacacatgaccgttccttcacctttaagcaaagagagtggttcagatggtttctaagatgccaacctgacctcgcattctgtcattctacccagctcttaattcaatttgcttccattatcctaacaggcttctttcttacttagaacttggaaaggctgctgtatttaataccctccaacactaacgcagacttaagataggtactgtttattgaaaacctactgagtgaaatgtgcggttttaggaccttcataaacatctcatttaatctttctagcatcctgtgaaacagccatgatttcacgttgataaacaaagaagacaggggtcccagggatgtgaagcatcttgcccaggcttctgctgctggtgaccagtgtagccaggactccarcccaggttttcctgactcagaagactgagctttttcctggatgttattaatagctaattgtgtccaagcaaccaagggccttgagtctgcttggttctgcttatggcctcacatcaagaaatggagctagtccatgtctgtagtcccartgctttgggaagccatgatgggaaggttgtcggaggccaaaagttcaagaccaggctgggcaatatcacaagactccatctctacggaaaagtaaaaaattagccagtcatggtggtgtacacttatggtcctagttactcaggagacttaggcaggaggattgcttgatcctaggaattcgaggctgcagtgagctatgattgcacctctgcacccaagcctgggcgacacagcgagaccctctctcttaaaaaaaaaaaatagcagagctcaccaaagtgatgttcacctttttatgacattcctttttcttagcttaagaaaagaaagctgctagatgagagtcttagttttcctgcataagacctcctttatgaatagaataaaagactgtcaaagtaggctgggcttgggcccaggctaatctatgaaggaagcaagctcgtgttccttacctatccttttggtgtccattggattgtgccccgaagtggcctttacccttgagccgtccccagccatggtgctcacacataggcttttgagctccttggagctatccagatcctgctcacttttccttcctgagatcagaacaaatcacccccttactcccactccaaacaaggccttgatgataaactaatccttcctaaaatgctggtaggtaaacaagcaatgatgaagcattgaacacaggttaactcctgacttttgtaccattgtctattccattacacattaacatgactctgaatgccagatccaaacctttgcccaccatctgcttgtcgtgcaacagttgaggcagtaaccaggggagattcacttcctgtcttgtccttccccagggatcacccccctgctgccctctagcagccaarctcagatgagttccattgttaccctaggtgtgcccatctctttggtagggaaggagaaaggtaagaatagccatcartgaggaaggattcttggagcgaggagccactgtggtttttcctgctatttaagatgttgagaccggataactttagaaagatacctgcacaaacccataaatastgcttttataaagtttagttcaccggaacctgagttcagtatttgacattagctttttgtccaaagagttgaagcctgctggaggtctttgctcaaataataaataccacatatttccaagtgtgttcaggtataggcactaggtactgtctgtttacttcatgttaggcacattacatgcattggctaatcaaatcctcatcaattacatatgtaataatctaaacttgcctccttgtattataaatggaaataatcctgtttatttaaacgggttttcatgtacctgtagggattaggaaactcaaatggcctttttaatacctttccctagtttgagctccctgttctctttaacagataaaacaacatatttgcttcagcctggaatctgtttttggtgctttggtgcagagacaggaaatgggcactcagagtcacactggtagttgcacactgtatctacagagggcgtgtctcatctgtactctgctgggttacaggatttcagtaggtatttgtgtccacctgagaattctgtttattacctttcatttgacagtgtctttcctttctgcagttgattttgctagagaggcaattcataaggtgaggtcctgttcatagtatgacttgctttctcaatatctccttcaatttttagtaactcttggtctatttggtgtctttaaaaaaaataacctagtaataaagacttcttttaatgtggaaatgtggtctggtagtaagttatttctttccacatgtaactgacccaatctggtttccaaatgagaagtgtgcaggccccagaggttgagaagccatatttcaactgtgaaaaaaatctgcttcctgcatctgttgaaatatagttgttcatacttgccatcccttatctttcttgtaacaatttgcacagttcttgccagaataaatgccattatctgtatgtttcagggagttccccaatttgatcatttttgtgtgtgtgtggtgtgtgtgtgagagagagagatactgcagtaaaacatttctaaaggatgaaagctcttgtatggcatagatatgaattccttcctctggtaataattaggttattcccagaagcacagtgtcattctttaaataaaagctttcctgtttaaagcttttcaaaggagcagaccaccttgaagattccccctagggttgatatgtgtctaattcattttataaaaattattcttgtcttcattttaaagctttggctatatagtcagaaatgtcctaaataacaaactattttgtatttaatttagggaagactaaagggaagaaaaatgaaaactcagtctttatgtaagctccaaggatattagggcttaaagggcttttctagttttatgagaatttgtactactgatttttatatattcctgtttttgagatgracagatctctggggaaattgttgagttacaatggcatttcactgtgatccctctcaagctcagatcagttctataacccaatgacaacctgtctctttggtttactgtcctgtgaaatgtcagctcaagtttcccagaagtcgtgtgtttatgatgagtcagagtgcttttcctcggtgggacagttgctggccctcttaattttggtgtatgtgcttccaagtatctaaacctccagtctgatctgtatatgctatcctaactgttaattgtattattgattatgttgattatcttgcttgaaggttcatacttttcaatttgatagaaataaagtttttttctgcttatagctagcgaa

SEQ ID NO: 3845 - DNA, 1185 bp, Homo sapiens
tccagagacaatggtcccgatgagatggagcctgaaggcatcattgagagaaactgaaatgagattgttgacagttttgatgatatgaacctcttggaatccctcctccatggcatctatgcctatggttttgagaagtcctctgccatccagcagcgagccattcttcttgtatcaaggattatgatgtgatcactcaagccctatctgggactgggaaaatggccacttttgccatatcaattctgcagtagattgaattagatctaaaggctacccacaccttggtcccagcatccacttgataattggctcaaaagatagaaaaggtggtcatgacactaggagactacatgggtgcctcctgtcatggctgtattgggggcaccaacgtgcatgctgaggtgcagaaactacagatggaagttccccatatcatcgtgggtacccctggccatatatctgatatgcttaaccagagatacctgtctcccaaatacatcaagatgtttgtactggacgaagctgatgaaatgttaagccatggattcaaggactcaatctatgacatattccaaaagctcaacagcaacacccaggtggttttgctatcagccacaaggccttctgatgtgcttgaggtgaccaagaagttcataagggaccccatttggattcctgtcaagaaggaagagttgaccctggagggggtccaccaattctacatcaatgtggaacatgaggagtggaaactgagcacactgtgtggcttgtatgaaaccctgattgtcaccctaggcacaagactctgtctcaaaaaaaaaaagaagaaagtggattggctcactgagaagatgcatgcttgggacttcactgtctctgccatgcatggagatatggaacaaaagaatgaaatgtgatcatgagggagttttgttctggctctcacagagtattgattaccactgacccgcagccagaggcattcatgtgcagcaggtttcttcagttatcaactgtgaccttcccacctgtatccacagaattggtcgaggtggatggtttggccataagggtgtggctattaacatggtaacagaagaagacaagaggactctttaagaaactgagaccttatacaacacctcsattgaggtgatggccctcaatgttgctgacctcatc

SEQ ID NO: 3846 - DNA, 3822 bp, Homo sapiens
gagtccgtcgtgctcaggggcgggcggaacgggctgacggacgcggctatgggccagtgtgagcggcgagtgggacgtgcgtggcgtgcgtgcgttgacctgggaagcactggacctgtgaggcgtgcgaactggtggcagtgagagacttcggckgacatggctcccagcgtgccagcggcagaacccgagtatcctaaaggcatcsgggccgtgctgctggggcctcccggggccggtaaagggacccaggcacccagattggctgaaaacttctgtgtctgccatttagctactggggacatgctgagggccatggtggcttctggctcagagctaggaaaaaagctgaaggcaactatggatgctgggaaactggtgagtgatgaaatggtagtggagctcattgagaagaatttggagacccccttgtgcaaaaatggttttcttctggatggcttccctcggactgtgaggcaggcagaaatgctcgatgacctcatggagaagaggaaagagaagcttgattctgtgattgaattcagcatcccagactctctgctgatccgaagaatcacaggaaggctgattcaccccaagagtggccgttcctaccacgaggagttcaaccctccaaaagagcccatgaaagatgacgtatgacaggcaaagagaagcttcctcaggctagcaaaaatatcatttgatgtattgattaaaaaagcacttgcttgatgtatctttggcgtgtgtgctactctcatctgtgtgtatgtgtgttgtgtgtgtgtgtgtgtgcatgcacatatgtgttcactctgctactttgtaagttttaggctaggttgctttaccagctgtttacttcttttttgttgttgttttgagacaaggtttcgctctgccaccctggctggagtgcagtggcgtgatcttggctcacggcaacctctgcctcctggggctcaagcaattatcccacctcagcctcctgagcagctgggactacaggtgcatgccacaacacctggctgatatttgtattttttgtagagacaggattttgccaagttgcccaggctggtcttgaactcctaggcttaagcaatccacccaccttggcctcctgaagtgccaggatcacagacgtgagccactacacccagcccagctgtttacttctttaaccatacttttgattttattttttgaccaaaatgaactaacccaggtaatcttccagggaccgcaattccagaacctcatagtatttcttccatttccagcagctgattagaagtccaggatcatgtgaagtcaggcagggtcacagttcctgatggcacattatggacagagaattccattttgttttctaacccatgatgaaaacccacgtgagtcagtgtgtgaacagggatcattaattttttccccctaggtggaaggaaaaaggcacttactttgcaggttacagaaattactgggagaggatatcgtcataaaaagagccaggccaaattggaatatttttgtgatctgcatcatgatgctgaaaatagcaattatttgggaattgggtttgaaaactgaattgttgccagagaattaaaccaggtgaaaggtccttttgaattcagattgtcttctgaacatccaggctgatcatctgagagcagtcaaatctacttccccaaaaagagaccaggcctagtatcagaaggccaggcgagactgcaacactgctcatcaccccgcggcgtgatccctgctcttaggtgctgggcagaggggaagggtggtcagggtkaggatggtgagggagggctggtgaggggctcagaggaatacttggaacaacagcagtgttattgtagtgtggcagtttcttttatacataggtgagagtttttaaagtgtaagggaaaaattaattttttaaaaaacaccatgcttggagggtgggggtagaaatagacacaatattatttctaaggaatcgggttttcatttactctggactggtgaaaatattttttaaagccagtgctctaagacctcagcttttatctcagaaccccatgggttccagaccaagagtacaggaaatcaaattgttgtcctgtctgtctatagcttggaacagggagctttgattactgactccggttccacacactgtaagatcaaaaaaccatctccacatttgaaagagatgtaaggtgtattcatagggatggtggctcaacaaatcaagcaaactggaatcaaggggagggggaagggaatgaaatggaaagggaggctgattcccttcccctgacttaccactaatttactaggctacctactytcatgagtaacctctcacagctacccagcacatgccacaatcctatgctcttgccttcttttatctgcactgtgtgaagggactcttttaaatawatgagcaagtgtcctaagctatgtcatccaaagattgtcctttccattctcaaatcctgtgactgggatcactcaacagcactgtgatgtattattttcaatgaggtgcctttcttaactgaccaaatgctgccttgtttggcccctaaatcaataaaatatgttaaaatttgtatcccctgttgtggcattttttttagataatctaagctagaaaaatgacattgaattctggacctggctggaaggaaaagaagccctttcttgtyrctggcagctgtgtggtagggaggtccaagtatgtgcatatgagataagcctgcaacctcttgaccttcagctcctatgcaggcttctcttgagcccagagacaaggcagcttggtctagtggagatagcactgtgcttggagttcaggggacctaggacaaatcccagccagttagttattcactgtgctcctgtttcctcagctgaaaaaggaagaaggtttttgctcagtacctggcatgcaacagacattggataaatgttagttggatccagatatacacagaaagatatctgcttcctgccaggctggataactgttgaatggacacttgtccatagtctagaaagccagtgcttctaatccttaagccagatctttgactaccttttcagttgcttctttaacactctttgttgcttctctgtgtgtcctagtttaaattcatttcctctccagcaaaagtgagcttaaataatttctccaaactaaagctctcatgtttttggaagggctgcctttgcaagtgaggtttctgagaaatgactgttgttcccaaaacaagagggagctgggctggaagcaccactattcttctttaggcatcttgttacagagagaggcagggtcttcactgacatattaaatcctgttccctgaaccagcccctccctyttctgctccacttcctcacctgtgcagagtcattttcaggtgttagccttactgatttgcactgatctktttgttccctgagctttttaaataccctgtgaaaattttctttcctcccttggtcatcatgcatctaattgtggggaaatgtttgtcaaaccaacctgcaaagcagcatggtgtagttgagaagaataaacagagaagactgggtgagctattgtttgtttgcttctttgggcctgggtttcctcatctaatctgcaaaccaagaatgcagactagtcctaccactcccggaagactgacgttgtgccaggtattatgcaaaggcttcatgtaaccctcgacttcacgtaaccctcacacagcaccctgtggagtcagaactgtccttcacttttataggtgaggaaaccagactcaga

SEQ ID NO: 3847 - DNA, 1986 bp, Homo sapiens
gagtccgtcgtgctcaggggcgggcggaacgggctgacggacgcggctatgggccagtgtgagcggcgagtgggacgtgcgtggcgtgcgtgcgttgacctgggaagcactggacctgtgaggcgtgcgaactggtggcagtgagagacttcggckgacatggctcccagcgtgccagcggcagaacccgagtatcctaaaggcatcsgggccgtgctgctggggcctcccggggccggtaaagggacccaggcacccagattggctgaaaacttctgtgtctgccatttagctactggggacatgctgagggccatggtggcttctggctcagagctaggaaaaaagctgaaggcaactatggatgctgggaaactggtgagtgatgaaatggtagtggagctcattgagaagaatttggagacccccttgtgcaaaaatggttttcttctggatggcttccctcggactgtgaggcaggcagaaatgctcgatgacctcatggagaagaggaaagagaagcttgattctgtgattgaattcagcatcccagactctctgctgatccgaagaatcacaggaaggctgattcaccccaagagtggccgttcctaccacgaggagttcaaccctccaaaagagcccatgaaagatgacatcaccggggaacccttgatccgtcgatcagatgataatgaaaaggccttgaaaatccgcctgcaagcctaccacactcaaaccaccccactcatagagtactacaggaaacgggggatccactccgccatcgatgcatcccagacccccgatgtcgtgttcgcaagcatcctagyagccttctccaaagccacatgtaaagacttggttatgtttatctaatgttgggtccaagaaggaatttctttccatccctgtgaggcaatgggtgggaatgataggacaggcaaagagaagcttcctcaggctagcaaaaatatcatttgatgtattgattaaaaaagcacttgcttgatgtatctttggcgtgtgtgctactctcatctgtgtgtatgtgtgttgtgtgtgtgtgtgtgtgcatgcacatatgtgttcactctgctactttgtaagttttaggctaggttgctttaccagctgtttacttcttttttgttgttgttttgagacaaggtttcgctctgccaccctggctggagtgcagtggcgtgatcttggctcacggcaacctctgcctcctggggctcaagcaattatcccacctcagcctcctgagcagctgggactacaggtgcatgccacaacacctggctgatatttgtattttttgtagagacaggattttgccaagttgcccaggctggtcttgaactcctaggcttaagcaatccacccaccttggcctcctgaagtgccaggatcacagacgtgagccactacacccagcccagctgtttacttctttaaccatacttttgattttattttttgaccaaaatgaactaacccaggtaatcttccagggaccgcaattccagaacctcatagtatttcttccatttccagcagctgattagaagtccaggatcatgtgaagtcaggcagggtcacagttcctgatggcacattatggacagagaattccattttgttttctaacccatgatgaaaacccacgtgagtcagtgtgtgaacagggatcattaattttttccccctaggtggaaggaaaaaggcacttactttgcaggttacagaaattactgggagaggatatcgtcataaaaagagccaggccaaattggaatatttttgtgatctgcatcatgatgctgaaaatagcaattatttgggaattgggtttgaaaactgaattgttgccagagaattaaaccaggtgaaaggtccttttgaattcagattgtcttctgaacatccaggctgatcatctgagagcagtcaaatctacttccccaaaaagagaccagg

SEQ ID NO: 3848 - DNA, 3935 bp, Homo sapiens
gagtccgtcgtgctcaggggcgggcggaacgggctgacggacgcggctatgggccagtgtgagcggcgagtgggacgtgcgtggcgtgcgtgcgttgacctgggaagcactggacctgtgaggcgtgcgaactggtggcagtgagagacttcggckgacatggctcccagcgtgccagcggcagaacccgagtatcctaaaggcatcsgggccgtgctgctggggcctcccggggccggtaaagggacccaggcacccagattggctgaaaacttctgtgtctgccatttagctactggggacatgctgagggccatggtggcttctggctcagagctaggaaaaaagctgaaggcaactatggatgctgggaaactggtgagtgatgaaatggtagtggagctcattgagaagaatttggagacccccttgtgcaaaaatggttttcttctggatggcttccctcggactgtgaggcaggcagaaatgctcgatgacctcatggagaagaggaaagagaagcttgattctgtgattgaattcagcatcccagactctctgctgatccgaagaatcacaggaaggctgattcaccccaagagtggccgttcctaccacgaggagttcaaccctccaaaagagcccatgaaagatgacatcaccggggaacccttgatccgtcgatcagatgataatgaaaaggccttgaaaatccgcctgcaagcctaccacactcaaaccaccccactcatagagtactacaggaaacgggggatccactccgccatcgatgcatcccagacccccgatgtcgtgttcgcaagcatcctagyagccttctccaaagccacatcctagtatcagaaggccaggcgagactgcaacactgctcatcaccccgcggcgtgatccctgctcttaggtgctgggcagaggggaagggtggtcagggtkaggatggtgagggagggctggtgaggggctcagaggaatacttggaacaacagcagtgttattgtagtgtggcagtttcttttatacataggtgagagtttttaaagtgtaagggaaaaattaattttttaaaaaacaccatgcttggagggtgggggtagaaatagacacaatattatttctaaggaatcgggttttcatttactctggactggtgaaaatattttttaaagccagtgctctaagacctcagcttttatctcagaaccccatgggttccagaccaagagtacaggaaatcaaattgttgtcctgtctgtctatagcttggaacagggagctttgattactgactccggttccacacactgtaagatcaaaaaaccatctccacatttgaaagagatgtaaggtgtattcatagggatggtggctcaacaaatcaagcaaactggaatcaaggggagggggaagggaatgaaatggaaagggaggctgattcccttcccctgacttaccactaatttactaggctacctactytcatgagtaacctctcacagctacccagcacatgccacaatcctatgctcttgccttcttttatctgcactgtgtgaagggactcttttaaatawatgagcaagtgtcctaagctatgtcatccaaagattgtcctttccattctcaaatcctgtgactgggatcactcaacagcactgtgatgtattattttcaatgaggtgcctttcttaactgaccaaatgctgccttgtttggcccctaaatcaataaaatatgttaaaatttgtatcccctgttgtggcattttttttagataatctaagctagaaaaatgacattgaattctggacctggctggaaggaaaagaagccctttcttgtyrctggcagctgtgtggtagggaggtccaagtatgtgcatatgagataagcctgcaacctcttgaccttcagctcctatgcaggcttctcttgagcccagagacaaggcagcttggtctagtggagatagcactgtgcttggagttcaggggacctaggacaaatcccagccagttagttattcactgtgctcctgtttcctcagctgaaaaaggaagttggttatgccaccttcttggccttaatggcattaaatgaaatttataggaagaaggtttttgctcagtacctggcatgcaacagacattggataaatgttagttggatccagatatacacagaaagatatctgcttcctgccaggctggataactgttgaatggacacttgtccatagtctagaaagccagtgcttctaatccttaagccagatctttgactaccttttcagttgcttctttaacactctttgttgcttctctgtgtgtcctagtttaaattcatttcctctccagcaaaagtgagcttaaataatttctccaaactaaagctctcatgtttttggaagggctgcctttgcaagtgaggtttctgagaaatgactgttgttcccaaaacaagagggagctgggctggaagcaccactattcttctttaggcatcttgttacagagagaggcagggtcttcactgacatattaaatcctgttccctgaaccagcccctccctyttctgctccacttcctcacctgtgcagagtcattttcaggtgttagccttactgatttgcactgatctktttgttccctgagctttttaaataccctgtgaaaattttctttcctcccttggtcatcatgcatctaattgtggggaaatgtttgtcaaaccaacctgcaaagcagcatggtgtagttgagaagaataaacagagaagactgggtgagctattgtttgtttgcttctttgggcctgggtttcctcatctaatctgcaaaccaagaatgcagactagtcctaccactcccggaagactgacgttgtgccaggtattatgcaaaggcttcatgtaaccctcgacttcacgtaaccctcacacagcaccctgtggagtcagaactgtccttcacttttataggtgaggaaaccagactcagagaggtgaagtggcattcctgaggtcatgcataagaggcagtcaggactgaaacacagtctctaacacttatccgtccccttgatcttgttgctgaagtgatttaattacttgcgtagctctgcacacaggaagggctgctctgaataagagctcttttccatggacactcagcgctgccggaactgattttgaagaagtcactgccggctctgagggcctagggtatgtgtcttaggatctcctgtgtgcacaaagtgtcactgacagaacacagcaggatggagagcagcctcctcagaagcctcacaagtctttcctcagatgaagacagagcaacgagtcagaagacagatttcaacagcgacttcaccatgcgaccttggacaagttatctcacctcatcagtagaataggaatgatccctacccctcaaaggtgctgatgacactagtgaccaagatactcatgtgggttggactgcccaggacacagcagatgcttagtaaacacagatggaattcagagggaaaatgtaggcattgaagaaagttgtcttactgaccatccggaaccaggctaaggatcccctagaaatcatagacctctgaaattatatgcagaattctttatgtgttttcataattaataatagtctaacatattaaattcttagctgtgtgagaggttctgcatgcattatctcatttattctcctcgataaccctgtggaggtaagtattgctattatctctatggtatgtctgtagactttgagattcagacatctgataatggcagaaccagagcctgagtccaagtctggctccacaccccagcctcttaacactgtgccaattgctttgacactttgctggggagagatgaaatgatctcaaaggcactcatgatacagaa

SEQ ID NO: 3849 - DNA, 4099 bp, Homo sapiens
gagtccgtcgtgctcaggggcgggcggaacgggctgacggacgcggctatgggccagtgtgagcggcgagtgggacgtgcgtggcgtgcgtgcgttgacctgggaagcactggacctgtgaggcgtgcgaactggtggcagtgagagacttcggckgacatggctcccagcgtgccagcggcagaacccgagtatcctaaaggcatcsgggccgtgctgctggggcctcccggggccggtaaagggacccaggcacccagattggctgaaaacttctgtgtctgccatttagctactggggacatgctgagggccatggtggcttctggctcagagctaggaaaaaagctgaaggcaactatggatgctgggaaactggtgagtgatgaaatggtagtggagctcattgagaagaatttggagacccccttgtgcaaaaatggttttcttctggatggcttccctcggactgtgaggcaggcagaaatgctcgatgacctcatggagaagaggaaagagaagcttgattctgtgattgaattcagcatcccagactctctgctgatccgaagaatcacaggaaggctgattcaccccaagagtggccgttcctaccacgaggagttcaaccctccaaaagagcccatgaaagatgacatcaccggggaacccttgatccgtcgatcagatgataatgaaaaggccttgaaaatccgcctgcaagcctaccacactcaaaccaccccactcatagagtactacaggaaacgggggatccactccgccatcgatgcatcccagacccccgatgtcgtgttcgcaagcatcctagyagccttctccaaagccacatgtaaagacttggttatgtttatctaatgttgggtccaagaaggaatttctttccatccctgtgaggcaatgggtgggaatgataggacaggcaaagagaagcttcctcaggctagcaaaaatatcatttgatgtattgattaaaaaagcacttgcttgatgtatctttggcgtgtgtgctactctcatctgtgtgtatgtgtgttgtgtgtgtgtgtgtgtgcatgcacatatgtgttcactctgctactttgtaagttttaggctaggttgctttaccagctgtttacttcttttttgttgttgttttgagacaaggtttcgctctgccaccctggctggagtgcagtggcgtgatcttggctcacggcaacctctgcctcctggggctcaagcaattatcccacctcagcctcctgagcagctgggactacaggtgcatgccacaacacctggctgatatttgtattttttgtagagacaggattttgccaagttgcccaggctggtcttgaactcctaggcttaagcaatccacccaccttggcctcctgaagtgccaggatcacagacgtgagccactacacccagcccagctgtttacttctttaaccatacttttgattttattttttgaccaaaatgaactaacccaggtaatcttccagggaccgcaattccagaacctcatagtatttcttccatttccagcagctgattagaagtccaggatcatgtgaagtcaggcagggtcacagttcctgatggcacattatggacagagaattccattttgttttctaacccatgatgaaaacccacgtgagtcagtgtgtgaacagggatcattaattttttccccctaggtggaaggaaaaaggcacttactttgcaggttacagaaattactgggagaggatatcgtcataaaaagagccaggccaaattggaatatttttgtgatctgcatcatgatgctgaaaatagcaattatttgggaattgggtttgaaaactgaattgttgccagagaattaaaccaggtgaaaggtccttttgaattcagattgtcttctgaacatccaggctgatcatctgagagcagtcaaatctacttccccaaaaagagaccaggcctagtatcagaaggccaggcgagactgcaacactgctcatcaccccgcggcgtgatccctgctcttaggtgctgggcagaggggaagggtggtcagggtkaggatggtgagggagggctggtgaggggctcagaggaatacttggaacaacagcagtgttattgtagtgtggcagtttcttttatacataggtgagagtttttaaagtgtaagggaaaaattaattttttaaaaaacaccatgcttggagggtgggggtagaaatagacacaatattatttctaaggaatcgggttttcatttactctggactggtgaaaatattttttaaagccagtgctctaagacctcagcttttatctcagaaccccatgggttccagaccaagagtacaggaaatcaaattgttgtcctgtctgtctatagcttggaacagggagctttgattactgactccggttccacacactgtaagatcaaaaaaccatctccacatttgaaagagatgtaaggtgtattcatagggatggtggctcaacaaatcaagcaaactggaatcaaggggagggggaagggaatgaaatggaaagggaggctgattcccttcccctgacttaccactaatttactaggctacctactytcatgagtaacctctcacagctacccagcacatgccacaatcctatgctcttgccttcttttatctgcactgtgtgaagggactcttttaaatawatgagcaagtgtcctaagctatgtcatccaaagattgtcctttccattctcaaatcctgtgactgggatcactcaacagcactgtgatgtattattttcaatgaggtgcctttcttaactgaccaaatgctgccttgtttggcccctaaatcaataaaatatgttaaaatttgtatcccctgttgtggcattttttttagataatctaagctagaaaaatgacattgaattctggacctggctggaaggaaaagaagccctttcttgtyrctggcagctgtgtggtagggaggtccaagtatgtgcatatgagataagcctgcaacctcttgaccttcagctcctatgcaggcttctcttgagcccagagacaaggcagcttggtctagtggagatagcactgtgcttggagttcaggggacctaggacaaatcccagccagttagttattcactgtgctcctgtttcctcagctgaaaaaggaagaaggtttttgctcagtacctggcatgcaacagacattggataaatgttagttggatccagatatacacagaaagatatctgcttcctgccaggctggataactgttgaatggacacttgtccatagtctagaaagccagtgcttctaatccttaagccagatctttgactaccttttcagttgcttctttaacactctttgttgcttctctgtgtgtcctagtttaaattcatttcctctccagcaaaagtgagcttaaataatttctccaaactaaagctctcatgtttttggaagggctgcctttgcaagtgaggtttctgagaaatgactgttgttcccaaaacaagagggagctgggctggaagcaccactattcttctttaggcatcttgttacagagagaggcagggtcttcactgacatattaaatcctgttccctgaaccagcccctccctyttctgctccacttcctcacctgtgcagagtcattttcaggtgttagccttactgatttgcactgatctktttgttccctgagctttttaaataccctgtgaaaattttctttcctcccttggtcatcatgcatctaattgtggggaaatgtttgtcaaaccaacctgcaaagcagcatggtgtagttgagaagaataaacagagaagactgggtgagctattgtttgtttgcttctttgggcctgggtttcctcatctaatctgcaaaccaagaatgcagactagtcctaccactcccggaagactgacgttgtgccaggtattatgcaaaggcttcatgtaaccctcgacttcacgtaaccctcacacagcaccctgtggagtcagaactgtccttcacttttataggtgaggaaaccagactcaga

SEQ ID NO: 3850 - DNA, 3840 bp, Homo sapiens
gagtccgtcgtgctcaggggcgggcggaacgggctgacggacgcggctatgggccagtgtgagcggcgagtgggacgtgcgtggcgtgcgtgcgttgacctgggaagcactggacctgtgaggcgtgcgaactggtggcagtgagagacttcggckgacatggctcccagcgtgccagcggcagaacccgagtatcctaaaggcatcsgggccgtgctgctggggcctcccggggccggtaaagggacccaggcacccagattggctgaaaacttctgtgtctgccatttagctactggggacatgctgagggccatggtggcttctggctcagagctaggaaaaaagctgaaggcaactatggatgctgggaaactggtgagtgatgaaatggtagtggagctcattgagaagaatttggagacccccttgtgcaaaaatggttttcttctggatggcttccctcggactgtgaggcaggcagaaatggctgattcaccccaagagtggccgttcctaccacgaggagttcaaccctccaaaagagcccatgaaagatgacatcaccggggaacccttgatccgtcgatcagatgataatgaaaaggccttgaaaatccgcctgcaagcctaccacactcaaaccaccccactcatagagtactacaggaaacgggggatccactccgccatcgatgcatcccagacccccgatgtcgtgttcgcaagcatcctagyagccttctccaaagccacatcctagtatcagaaggccaggcgagactgcaacactgctcatcaccccgcggcgtgatccctgctcttaggtgctgggcagaggggaagggtggtcagggtkaggatggtgagggagggctggtgaggggctcagaggaatacttggaacaacagcagtgttattgtagtgtggcagtttcttttatacataggtgagagtttttaaagtgtaagggaaaaattaattttttaaaaaacaccatgcttggagggtgggggtagaaatagacacaatattatttctaaggaatcgggttttcatttactctggactggtgaaaatattttttaaagccagtgctctaagacctcagcttttatctcagaaccccatgggttccagaccaagagtacaggaaatcaaattgttgtcctgtctgtctatagcttggaacagggagctttgattactgactccggttccacacactgtaagatcaaaaaaccatctccacatttgaaagagatgtaaggtgtattcatagggatggtggctcaacaaatcaagcaaactggaatcaaggggagggggaagggaatgaaatggaaagggaggctgattcccttcccctgacttaccactaatttactaggctacctactytcatgagtaacctctcacagctacccagcacatgccacaatcctatgctcttgccttcttttatctgcactgtgtgaagggactcttttaaatawatgagcaagtgtcctaagctatgtcatccaaagattgtcctttccattctcaaatcctgtgactgggatcactcaacagcactgtgatgtattattttcaatgaggtgcctttcttaactgaccaaatgctgccttgtttggcccctaaatcaataaaatatgttaaaatttgtatcccctgttgtggcattttttttagataatctaagctagaaaaatgacattgaattctggacctggctggaaggaaaagaagccctttcttgtyrctggcagctgtgtggtagggaggtccaagtatgtgcatatgagataagcctgcaacctcttgaccttcagctcctatgcaggcttctcttgagcccagagacaaggcagcttggtctagtggagatagcactgtgcttggagttcaggggacctaggacaaatcccagccagttagttattcactgtgctcctgtttcctcagctgaaaaaggaagttggttatgccaccttcttggccttaatggcattaaatgaaatttataggaagaaggtttttgctcagtacctggcatgcaacagacattggataaatgttagttggatccagatatacacagaaagatatctgcttcctgccaggctggataactgttgaatggacacttgtccatagtctagaaagccagtgcttctaatccttaagccagatctttgactaccttttcagttgcttctttaacactctttgttgcttctctgtgtgtcctagtttaaattcatttcctctccagcaaaagtgagcttaaataatttctccaaactaaagctctcatgtttttggaagggctgcctttgcaagtgaggtttctgagaaatgactgttgttcccaaaacaagagggagctgggctggaagcaccactattcttctttaggcatcttgttacagagagaggcagggtcttcactgacatattaaatcctgttccctgaaccagcccctccctyttctgctccacttcctcacctgtgcagagtcattttcaggtgttagccttactgatttgcactgatctktttgttccctgagctttttaaataccctgtgaaaattttctttcctcccttggtcatcatgcatctaattgtggggaaatgtttgtcaaaccaacctgcaaagcagcatggtgtagttgagaagaataaacagagaagactgggtgagctattgtttgtttgcttctttgggcctgggtttcctcatctaatctgcaaaccaagaatgcagactagtcctaccactcccggaagactgacgttgtgccaggtattatgcaaaggcttcatgtaaccctcgacttcacgtaaccctcacacagcaccctgtggagtcagaactgtccttcacttttataggtgaggaaaccagactcagagaggtgaagtggcattcctgaggtcatgcataagaggcagtcaggactgaaacacagtctctaacacttatccgtccccttgatcttgttgctgaagtgatttaattacttgcgtagctctgcacacaggaagggctgctctgaataagagctcttttccatggacactcagcgctgccggaactgattttgaagaagtcactgccggctctgagggcctagggtatgtgtcttaggatctcctgtgtgcacaaagtgtcactgacagaacacagcaggatggagagcagcctcctcagaagcctcacaagtctttcctcagatgaagacagagcaacgagtcagaagacagatttcaacagcgacttcaccatgcgaccttggacaagttatctcacctcatcagtagaataggaatgatccctacccctcaaaggtgctgatgacactagtgaccaagatactcatgtgggttggactgcccaggacacagcagatgcttagtaaacacagatggaattcagagggaaaatgtaggcattgaagaaagttgtcttactgaccatccggaaccaggctaaggatcccctagaaatcatagacctctgaaattatatgcagaattctttatgtgttttcataattaataatagtctaacatattaaattcttagctgtgtgagaggttctgcatgcattatctcatttattctcctcgataaccctgtggaggtaagtattgctattatctctatggtatgtctgtagactttgagattcagacatctgataatggcagaaccagagcctgagtccaagtctggctccacaccccagcctcttaacactgtgccaattgctttgacactttgctggggagagatgaaatgatctcaaaggcactcatgatacagaa

SEQ ID NO: 3851 - DNA, 1303 bp, Homo sapiens
ataccctgctgggcaaaggaggaagagccagaggatccagacgccttggaggacttggaacacctgtaacaggacaaggagtyctgctcmggcacgtggccacagaaaactacttaggaagcctgtggtgagaacaacaacagtgcctgagaatcccacggctctggggaagtgagccccgaggatgaggctgctcgcctggctgattttcctggctaactggggaggtgccagggctgaaccagggaagttctggcacatcgctgacctgcaccttgaccctgactacaaggtatccaaagacccyttccaggtgtgcccatcagctggatcccagccagtgcccgacgcaggcccctggggtgactacctctgtgattctccctgggccctcatcaactcctccatctatgccatgaaggagattgagccagagccagacttcattctctggactggtgatgacacgcctcatgtgcccgatgagaaactgggagaggcagctgtactggaaattgtggaacgcctgaccaagctcatcagagaggtctttccagatactaaagtctatgctgctttgggaaatcatgattttcaccccaaaaaccagttcccagctggaagtaacaacatctacaatcagatagcagaactatggaaaccctggcttagtaatgagtccatcgctctcttcaaaaaaggtgccttctactgtgagaagctgccgggtcccagcggggctgggcgaattgtggtcctcaacaccaatctgtactataccagcaatgcgctgacagcagacatggcggaccctggccagcagttccagtggctggaagatgtgctgaccgatgcatccaaagctggggacatggtgtacattgtyggccacgtgcccccggggttctttgagaagacgcaaaacaaggcatggttccgggagggcttcaatgaaaaatacctgaaggtggyccggaagcatcatcrcgtcatagcagggcagttcttcgggcaccaccacaccgacagctttcggatgctctatgatgatgcaggtgtccccataagcgccatgttcatcacacctggagtcaccccatggaaaaccacattacctggagtggtcaatggggccaacaatccagccatccgggtgttcgaatatgaccgagccacactgagcctgaaggtcaggagtcctgcggaggccagaggaggagggtgggaggggcttaaatgcatcaccaccttccctcactctcagcttatccaccttcccctgaccactgagcctcaggaaggt

SEQ ID NO: 3852 - DNA, 1864 bp, Homo sapiens
ataccctgctgggcaaaggaggaagagccagaggatccagacgccttggaggacttggaacacctgtaacaggacaaggagtyctgctcmggcacgtggccacagaaaactacttaggaagcctgtggtgagaacaacaacagtgcctgagaatcccacggctctggggaagtgagccccgaggatgaggctgctcgcctggctgattttcctggctaactggggaggtgccagggctgaaccagggaagttctggcacatcgctgacctgcaccttgaccctgactacaaggtatccaaagacccyttccaggtgtgcccatcagctggatcccagccagtgcccgacgcaggcccctggggtgactacctctgtgattctccctgggccctcatcaactcctccatctatgccatgaaggagattgagccagagccagacttcattctctggactggtgatgacacgcctcatgtgcccgatgagaaactgggagaggcagctgtactggaaattgtggaacgcctgaccaagctcatcagagaggtctttccagatactaaagtctatgctgctttgggaaatcatgattttcaccccaaaaaccagttcccagctggaagtaacaacatctacaatcagatagcagaactatggaaaccctggcttagtaatgagtccatcgctctcttcaaaaaaggtgccttctactgtgagaagctgccgggtcccagcggggctgggcgaattgtggtcctcaacaccaatctgtactataccagcaatgcgctgacagcagacatggcggaccctggccagcagttccagtggctggaagatgtgctgaccgatgcatccaaagctggggacatggtgtacattgtyggccacgtgcccccggggttctttgagaagacgcaaaacaaggcatggttccgggagggcttcaatgaaaaatacctgaaggtggyccggaagcatcatcrcgtcatagcagggcagttcttcgggcaccaccacaccgacagctttcggatgctctatgatgatgcaggtgtccccataagcgccatgttcatcacacctggagtcaccccatggaaaaccacattacctggagtggtcaatggggccaacaatccagccatccgggtgttcgaatatgaccgagccacactgagcctgaaggacatggtgacctacttcatgaacctgagccaggcgaatgctcaggggacgccgcgctgggagctcgagtaccagctgaccgaggcctatggggtgccggacgccagcgcccactccatgcacacagtgctggaccrcatcgctggcgaccagagcacactgcagcgctactacgtctataactcagtcagctactctgctggggtctgcgacgaggcctgcagcatgcagcacgtgtgtgccatgcgccaggtggacattgacgcttacaccacctgtctgtatgcctctggcaccacgcccgtgccccagctcccgctgctgctgatggccctgctgggcctgtgcacgctcgtgctgtgacctgccaggctcaccttcttcctggtaacgggtaacgggggcagcgcccaggatcacccagagctgggccttccaccatttcctccgcgcctgaggagtgaactgaaataggacaaccgaatcaggaagcgaagccccaggagctgcagccatccgtgatcgcgccactgcactccagcctgggygacaaagccagactctctccaaaaacaaaccagaaacagaaaagaaatgacgacccaagacccccctacaagcatacttcttttgcgtattatgtttwactcacaaaacaaagctcatcatgcgttt

SEQ ID NO: 3853 - DNA, 865 bp, Homo sapiens
gttctgtgggcttctcctgaggagatggacgattttcagagcttgcagaaagaatttgagaccaccttcaaccagagaagcctctgtggaaatgtgccgtcactggccagttgttctgtctgtctgctgtggaacccaggcccgtgagaagagcaggggaggtatagtcatttcccttgttttacggcagaggaaactgaagataaagctatgaagtgaagctggctagtggctgcctcagggttactactgatatcactggaccccttcagaaccaagcatgaatgaagcaatcctttttcccacctgcaagtgaggctctgagggattcttcagaaatcaagactttgacccactccatattatgaatgcctcagcctacaaagagcttgcctaacccaacatcaaggggtggacacgtgatgctggacttccagagcaaaaatgggtgtttgaagaacttactcccatgatgcggcagtcaaggagatgcacagtagaggatcaaaaagctgacaacttggcctcccctgggtcgcttccaggggagcgcggcttcaccgctcgaaccagctggccaagttccgtatgctcttgggccggtccccagccctctgtacagcctggcacacccggcaccaaggctcgtcccagaaggaggtgatgtggacagcgtagctccggcgccagtggaagtagcggcgatagaccgcggggttgcggtcgaggaaaagcargtacgaggccagggaggaggcacttgggaagtcgtccacgtggatgaaggcgccgcggggcacaaagcgctcgtagttggcacggtctgggcccagcaccaccggcaccgccccagcgagcaacgcgt

SEQ ID NO: 3854 - DNA, 1395 bp, Homo sapiens
tagaatttaaaagcgactttcccccaaagaaatctgatgtcctttttgtatctgtcataaatttaattcatagtattttgtgttttttttgttttttttttttgagacggagtctcgcactcttgcccaggctggagtgcagtggcaccatttcggctcactgcaagctccacgccattctcctgcctcagcctcccaagtagctgggactacaggcgcccaccaccacgcctggctaatttttttttttttttttttgtatttttagtagagacagggtttttctgtgttagccaggatggtctcgatctcctgaccttgtgatccacccacctcagcctcccaaagtgctgggattacaggcctgagccaccacgcccagcctattttgtgtttttttaaagctaactaccattaagatcattatagaagtttggtataatgaagatttgggtttttcagtccaatgagtttccatattcttgaatgaaaaagatccacatttcatcatttgcctgtttcattttcttttagtacttttgaacttagtttggtcagaaaatactagaattttagtttgatctaaagaaccagcttatataacttgctgttgccatgtacatttgtatgtctttgctgtgtcaaataactggatctgattttagctctttttaagtggtgaaagcaatgcatttttattcttcaaattcagacattgaatgtgtattaaaatgtgtgtgcttacctttaatcctctccccaccracaattaggaacacgtttctccaattactgttggcaagactaccaagaaaaattgttgaattagaatcccagcaccgggcacggtggctcacgcctgtgatcctagcactttgggaggccaaagcaggcggatcacctgaggtcaggagttcgagaccagcagggccaacatggygaaaccccgactctactaaaaatacaaaaattagccaggcatggtggtgggcrcctgtaatcccaactactcaggaggctgaggcaggagaattgcttgaacctgggagttggaggtcacggtgagctgatatcacrccattgcactccagcctgggcaacagagcaagactctgtctcaatcaatctatccatcaatcgataagaaccccagattgtatagctacatgttttagcccccttttcaaagtatatgttctccttgvtacttattttgacattctgacttttctacatatgctttatcaacctcttaattaaaccatcattgtctattttgagagataactgcgctgcttcccrttgtgtgttttaaatgttattgttcagtttgagtcaaataaaaggatatttaatctgtggtgccttgacattaaaagtggtaaagtgattttt

SEQ ID NO: 3855 - DNA, 2954 bp, Homo sapiens
tacgttatccatraagtgtcgcgagagaaacggacgccgttctctcccgcggaattcaggtttacggccctgcgggttctcagagaatttctagaatttggaatcgagtgcattttctgacatttgagtacagtacccaggggttcttggagaagaacctggtcccagaggagcttgactgaccataaaaatgagtactgcagatgcacttgatgatgaaaacacatttaaaatattagttgcaacagatattcatcttggatttatggagaaagatgcagycagaggaaatgatacgtttgtaacactygatgaaattttaagacttgcccaggaaaatgaagtggattttattttgttaggtggtgatctttttcatgaaaataagccctcaaggaaaacattacatacctgcctcgagttattaagaaaatattgtatgggtgatcggcctgtccagtttgaaattctcagtgatcagtcagtcaactttggttttagtaagtttccatgggtgaactatcaagatggcaacctcaacatttcaattccagtgtttagtattcatggcaatcatgacgatcccacaggggcagatgcactttgtgccttggayattttaagttgtgctggatttgtaaatcactttggacgttcaatgtctgtggagaagatagacattagtccggttttgcttcaaaaaggaagcacaaagattgcgctatatggtttaggatccattccagatgaaaggctctatcgaatgtttgtcaataaaaaagtaacaatgttgagaccaaaggaagatgagaactcttggtttaacttatttgtgattcatcagaacaggagtaaacatggaagtactaacttcattccagaacaatttttggatgacttcattgatcttgttatctggggccatgaacatgagtgtaaaatagctccaaccaaaaatgaacaacagctgttttatatctcacaacctggaagctcagtggttacttctctttccccaggagaagctgtaaagaaacatgttggtttgctgcgtattaaagggaggaagatgaatatgcataaaattcctcttcacacagtgcggcagtttttcatggaggatattgttctagctaatcatccagacatttttaacccrgataatcctaaagtaacccaagccatacaaagcttctgtttggagaagattgaagaaatgctkgaaaatgctgaacgggaacgtctgggtaattctcaccagccagagaagcctcttgtacgactgcgagtggactatagtggaggttttgaacctttcagtgttcttcgctttagccagaaatttgtggatcgggtagctaatccaaaagacattatccattttttcaggcatagagaacaaaaggaaaaaacaggagaagagatcaactttgggaaacttatcacaaagccttcagaaggaacaactttaagggtagaagatcttgtaaaacagtactttcaaaccgcagagaagaatgtgcagctctcactgctaacagaaagagggatgggtgaagcagtacaagaatttgtggacaaggaggagaaagrtgccattgaggaattagtgaaataccagttggaaaaaacacagcgatttcttaaagaacgtcatattgatgccctcgaagacaaaatcgatgaggaggtacgtcgtttcagagaaaccagacaaaaaaatactaatgaagaagatgatgaagtccgtgaggctatgaccagggccagagcactcagatctcagtcagaggagtctgcttctgcctttagtgctgatgaccttatgagtatagatttagcagaacagatggctaatgactctgatgatagcatctcagcagcaaccaacaaaggaagaggccgaggaagaggtcgaagaggtggaagagggcagaattcagcatcgagaggagggtctcaaagaggaagagcagacactggtctggagacttctacccgtagcaggaactcaaagactgctgtgtcagcatctagaaatatgtctattatagatgcctttaaatctacaagacagcagccttcccgaaatgtcactactaagaattattcagaggtgattgaggtagatgaatcagatgtggaagaagacatttttcctaccacttcaaagacagatcaaaggtggtccagcacatcatccagcaaaatcatgtcccagagtcaagtatcgaaaggggttgattttgaatcaagtgaggatgatgatgatgatccttttrtgaacactagttctttaagaagaaatagaagataatatatttaatggcactgagaaacatgcaagatacaggaaaaatgaaaatgttacaagctaagagtttacagtttaagattttaagtattrtttcctgagcataactccataagtaagaaatttctagttcacagacatacaatagcattgattcaccttgtttttttaacctggttgttgtartaagagctttgtttcaatatcastcttgagtaaagattaaaataaagctaccattttacatttctatttcataatgaaaaactatgtcagtattttaatatggttacatttagccaaagttgagggaaagagcttataaaatttaacttcttcataattttagtaatttcctagaggttctgggttttctgaaagtaaaacaatttatgcgaacctatgtctaaattcactgtttgttactatgtatgtttttttccartgcttcttataagactaaatgattagaagtacctaatagtttgaacagatatgtttttatttaaaagagtagaataacctttcagaattactgagttttttattccagttgtagcaaagatttcaaaagattgtgttcccattaagtggtagtaatttcctttattattctgtatccttaatggtgttctctctc

SEQ ID NO: 3856 - DNA, 3038 bp, Homo sapiens
agagaaacggacgccgttctctcccgcggaattcaggtttacggccctgcgggttctcagaggcaarttcagaccgtgttgttttcttttcacggatcctgccctttcttcccgaaaagaagacagccttgggtcgcgattgtggggcttcgaagagtccagcagtgggaatttctagaatttggaatcgagtgcattttctgacatttgagtacagtacccaggggttcttggagaagaacctggtcccagaggagcttgactgaccataaaaatgagtactgcagatgcacttgatgatgaaaacacatttaaaatattagttgcaacagatattcatcttggatttatggagaaagatgcagycagaggaaatgatacgtttgtaacactygatgaaattttaagacttgcccaggaaaatgaagtggattttattttgttaggtggtgatctttttcatgaaaataagccctcaaggaaaacattacatacctgcctcgagttattaagaaaatattgtatgggtgatcggcctgtccagtttgaaattctcagtgatcagtcagtcaactttggttttagtaagtttccatgggtgaactatcaagatggcaacctcaacatttcaattccagtgtttagtattcatggcaatcatgacgatcccacaggggcagatgcactttgtgccttggayattttaagttgtgctggatttgtaaatcactttggacgttcaatgtctgtggagaagatagacattagtccggttttgcttcaaaaaggaagcacaaagattgcgctatatggtttaggatccattccagatgaaaggctctatcgaatgtttgtcaataaaaaagtaacaatgttgagaccaaaggaagatgagaactcttggtttaacttatttgtgattcatcagaacaggagtaaacatggaagtactaacttcattccagaacaatttttggatgacttcattgatcttgttatctggggccatgaacatgagtgtaaaatagctccaaccaaaaatgaacaacagctgttttatatctcacaacctggaagctcagtggttacttctctttccccaggagaagctgtaaagaaacatgttggtttgctgcgtattaaagggaggaagatgaatatgcataaaattcctcttcacacagtgcggcagtttttcatggaggatattgttctagctaatcatccagacatttttaacccrgataatcctaaagtaacccaagccatacaaagcttctgtttggagaagattgaagaaatgctkgaaaatgctgaacgggaacgtctgggtaattctcaccagccagagaagcctcttgtacgactgcgagtggactatagtggaggttttgaacctttcagtgttcttcgctttagccagaaatttgtggatcgggtagctaatccaaaagacattatccattttttcaggcatagagaacaaaaggaaaaaacaggagaagagatcaactttgggaaacttatcacaaagccttcagaaggaacaactttaagggtagaagatcttgtaaaacagtactttcaaaccgcagagaagaatgtgcagctctcactgctaacagaaagagggatgggtgaagcagtacaagaatttgtggacaaggaggagaaagrtgccattgaggaattagtgaaataccagttggaaaaaacacagcgatttcttaaagaacgtcatattgatgccctcgaagacaaaatcgatgaggaggtacgtcgtttcagagaaaccagacaaaaaaatactaatgaagaagatgatgaagtccgtgaggctatgaccagggccagagcactcagatctcagtcagaggagtctgcttctgcctttagtgctgatgaccttatgagtatagatttagcagaacagatggctaatgactctgatgatagcatctcagcagcaaccaacaaaggaagaggccgaggaagaggtcgaagaggtggaagagggcagaattcagcatcgagaggagggtctcaaagaggaagagcagacactggtctggagacttctacccgtagcaggaactcaaagactgctgtgtcagcatctagaaatatgtctattatagatgcctttaaatctacaagacagcagccttcccgaaatgtcactactaagaattattcagaggtgattgaggtagatgaatcagatgtggaagaagacatttttcctaccacttcaaagacagatcaaaggtggtccagcacatcatccagcaaaatcatgtcccagagtcaagtatcgaaaggggttgattttgaatcaagtgaggatgatgatgatgatccttttrtgaacactagttctttaagaagaaatagaagataatatatttaatggcactgagaaacatgcaagatacaggaaaaatgaaaatgttacaagctaagagtttacagtttaagattttaagtattrtttcctgagcataactccataagtaagaaatttctagttcacagacatacaatagcattgattcaccttgtttttttaacctggttgttgtartaagagctttgtttcaatatcastcttgagtaaagattaaaataaagctaccattttacatttctatttcataatgaaaaactatgtcagtattttaatatggttacatttagccaaagttgagggaaagagcttataaaatttaacttcttcataattttagtaatttcctagaggttctgggttttctgaaagtaaaacaatttatgcgaacctatgtctaaattcactgtttgttactatgtatgtttttttccartgcttcttataagactaaatgattagaagtacctaatagtttgaacagatatgtttttatttaaaagagtagaataacctttcagaattactgagttttttattccagttgtagcaaagatttcaaaagattgtgttcccattaagtggtagtaatttcctttattattctgtatccttaatggtgttctctctc

SEQ ID NO: 3857 - DNA, 2927 bp, Homo sapiens
ggacgccgttctctcccgcggaattcaggtttacggccctgcgggttctcagaggcaaaatttctagaatttggaatcgagtgcattttctgacatttgagtacagtacccaggggttcttggagaagaacctggtcccagaggagcttgactgaccataaaaatgagtactgcagatgcacttgatgatgaaaacacatttaaaatattagttgcaacagatattcatcttggatttatggagaaagatgcagycagaggaaatgatacgtttgtaacactygatgaaattttaagacttgcccaggaaaatgaagtggattttattttgttaggtggtgatctttttcatgaaaataagccctcaaggaaaacattacatacctgcctcgagttattaagaaaatattgtatgggtgatcggcctgtccagtttgaaattctcagtgatcagtcagtcaactttggttttagtaagtttccatgggtgaactatcaagatggcaacctcaacatttcaattccagtgtttagtattcatggcaatcatgacgatcccacaggggcagatgcactttgtgccttggayattttaagttgtgctggatttgtaaatcactttggacgttcaatgtctgtggagaagatagacattagtccggttttgcttcaaaaaggaagcacaaagattgcgctatatggtttaggatccattccagatgaaaggctctatcgaatgtttgtcaataaaaaagtaacaatgttgagaccaaaggaagatgagaactcttggtttaacttatttgtgattcatcagaacaggagtaaacatggaagtactaacttcattccagaacaatttttggatgacttcattgatcttgttatctggggccatgaacatgagtgtaaaatagctccaaccaaaaatgaacaacagctgttttatatctcacaacctggaagctcagtggttacttctctttccccaggagaagctgtaaagaaacatgttggtttgctgcgtattaaagggaggaagatgaatatgcataaaattcctcttcacacagtgcggcagtttttcatggaggatattgttctagctaatcatccagacatttttaacccrgataatcctaaagtaacccaagccatacaaagcttctgtttggagaagattgaagaaatgctkgaaaatgctgaacgggaacgtctgggtaattctcaccagccagagaagcctcttgtacgactgcgagtggactatagtggaggttttgaacctttcagtgttcttcgctttagccagaaatttgtggatcgggtagctaatccaaaagacattatccattttttcaggcatagagaacaaaaggaaaaaacaggagaagagatcaactttgggaaacttatcacaaagccttcagaaggaacaactttaagggtagaagatcttgtaaaacagtactttcaaaccgcagagaagaatgtgcagctctcactgctaacagaaagagggatgggtgaagcagtacaagaatttgtggacaaggaggagaaagrtgccattgaggaattagtgaaataccagttggaaaaaacacagcgatttcttaaagaacgtcatattgatgccctcgaagacaaaatcgatgaggaggtacgtcgtttcagagaaaccagacaaaaaaatactaatgaagaagatgatgaagtccgtgaggctatgaccagggccagagcactcagatctcagtcagaggagtctgcttctgcctttagtgctgatgaccttatgagtatagatttagcagaacagatggctaatgactctgatgatagcatctcagcagcaaccaacaaaggaagaggccgaggaagaggtcgaagaggtggaagagggcagaattcagcatcgagaggagggtctcaaagaggaagagcagacactggtctggagacttctacccgtagcaggaactcaaagactgctgtgtcagcatctagaaatatgtctattatagatgcctttaaatctacaagacagcagccttcccgaaatgtcactactaagaattattcagaggtgattgaggtagatgaatcagatgtggaagaagacatttttcctaccacttcaaagacagatcaaaggtggtccagcacatcatccagcaaaatcatgtcccagagtcaagtatcgaaaggggttgattttgaatcaagtgaggatgatgatgatgatccttttrtgaacactagttctttaagaagaaatagaagataatatatttaatggcactgagaaacatgcaagatacaggaaaaatgaaaatgttacaagctaagagtttacagtttaagattttaagtattrtttcctgagcataactccataagtaagaaatttctagttcacagacatacaatagcattgattcaccttgtttttttaacctggttgttgtartaagagctttgtttcaatatcastcttgagtaaagattaaaataaagctaccattttacatttctatttcataatgaaaaactatgtcagtattttaatatggttacatttagccaaagttgagggaaagagcttataaaatttaacttcttcataattttagtaatttcctagaggttctgggttttctgaaagtaaaacaatttatgcgaacctatgtctaaattcactgtttgttactatgtatgtttttttccartgcttcttataagactaaatgattagaagtacctaatagtttgaacagatatgtttttatttaaaagagtagaataacctttcagaattactgagttttttattccagttgtagcaaagatttcaaaagattgtgttcccattaagtggtagtaatttcctttattattctgtatccttaatggtgttctctctr

SEQ ID NO: 3858 - DNA, 2954 bp, Homo sapiens
agagaaacggacgccgttctctcccgcggaattcaggtttacggccctgcgggttctcagaggcaarttcagaccgtgttgttttcttttcacggatcctgccctttcttcccgaaaagaagacagccttgggtcgcgattgtggggcttcgaagagtccagcagtgggaatttctagaatttggaatcgagtgcattttctgacatttgagtacagtacccaggggttcttggagaagaacctggtcccagaggagcttgactgaccataaaaatgagtactgcagatgcacttgatgatgaaaacacatttaaaatattagttgcaacagatattcatcttggatttatggagaaagatgcagycagaggaaatgatacgtttgtaacactygatgaaattttaagacttgcccaggaaaatgaagtggattttattttgttaggtggtgatctttttcatgaaaataagccctcaaggaaaacattacatacctgcctcgagttattaagaaaatattgtatgggtgatcggcctgtccagtttgaaattctcagtgatcagtcagtcaactttggttttagtaagtttccatgggtgaactatcaagatggcaacctcaacatttcaattccagtgtttagtattcatggcaatcatgacgatcccacaggggcagatgcactttgtgccttggayattttaagttgtgctggatttgtaaatcactttggacgttcaatgtctgtggagaagatagacattagtccggttttgcttcaaaaaggaagcacaaagattgcgctatatggtttaggatccattccagatgaaaggctctatcgaatgtttgtcaataaaaaagtaacaatgttgagaccaaaggaagatgagaactcttggtttaacttatttgtgattcatcagaacaggagtaaacatggaagtactaacttcattccagaacaatttttggatgacttcattgatcttgttatctggggccatgaacatgagtgtaaaatagctccaaccaaaaatgaacaacagctgttttatatctcacaacctggaagctcagtggttacttctctttccccaggagaagctgtaaagaaacatgttggtttgctgcgtattaaagggaggaagatgaatatgcataaaattcctcttcacacagtgcggcagtttttcatggaggatattgttctagctaatcatccagacatttttaacccrgataatcctaaagtaacccaagccatacaaagcttctgtttggagaagattgaagaaatgctkgaaaatgctgaacgggaacgtctgggtaattctcaccagccagagaagcctcttgtacgactgcgagtggactatagtggaggttttgaacctttcagtgttcttcgctttagccagaaatttgtggatcgggtagctaatccaaaagacattatccattttttcaggcatagagaacaaaaggaaaaaacaggagaagagatcaactttgggaaacttatcacaaagccttcagaaggaacaactttaagggtagaagatcttgtaaaacagtactttcaaaccgcagagaagaatgtgcagctctcactgctaacagaaagagggatgggtgaagcagtacaagaatttgtggacaaggaggagaaagrtgccattgaggaattagtgaaataccagttggaaaaaacacagcgatttcttaaagaacgtcatattgatgccctcgaagacaaaatcgatgaggaggtacgtcgtttcagagaaaccagacaaaaaaatactaatgaagaagatgatgaagtccgtgaggctatgaccagggccagagcactcagatctcagtcagaggagtctgcttctgcctttagtgctgatgaccttatgagtatagatttagcagaacagatggctaatgactctgatgatagcatctcagcagcaaccaacaaaggaagaggccgaggaagaggtcgaagaggtggaagagggcagaattcagcatcgagaggagggtctcaaagaggaagagcctttaaatctacaagacagcagccttcccgaaatgtcactactaagaattattcagaggtgattgaggtagatgaatcagatgtggaagaagacatttttcctaccacttcaaagacagatcaaaggtggtccagcacatcatccagcaaaatcatgtcccagagtcaagtatcgaaaggggttgattttgaatcaagtgaggatgatgatgatgatccttttrtgaacactagttctttaagaagaaatagaagataatatatttaatggcactgagaaacatgcaagatacaggaaaaatgaaaatgttacaagctaagagtttacagtttaagattttaagtattrtttcctgagcataactccataagtaagaaatttctagttcacagacatacaatagcattgattcaccttgtttttttaacctggttgttgtartaagagctttgtttcaatatcastcttgagtaaagattaaaataaagctaccattttacatttctatttcataatgaaaaactatgtcagtattttaatatggttacatttagccaaagttgagggaaagagcttataaaatttaacttcttcataattttagtaatttcctagaggttctgggttttctgaaagtaaaacaatttatgcgaacctatgtctaaattcactgtttgttactatgtatgtttttttccartgcttcttataagactaaatgattagaagtacctaatagtttgaacagatatgtttttatttaaaagagtagaataacctttcagaattactgagttttttattccagttgtagcaaagatttcaaaagattgtgttcccattaagtggtagtaatttcctttattattctgtatccttaatggtgttctctctc

SEQ ID NO: 3859 - DNA, 6106 bp, Homo sapiens
agagaaacggacgccgttctctcccgcggaattcaggtttacggccctgcgggttctcagaggcaarttcagaccgtgttgttttcttttcacggatcctgccctttcttcccgaaaagaagacagccttgggtcgcgattgtggggcttcgaagagtccagcagtgggaatttctagaatttggaatcgagtgcattttctgacatttgagtacagtacccaggggttcttggagaagaacctggtcccagaggagcttgactgaccataaaaatgagtactgcagatgcacttgatgatgaaaacacatttaaaatattagttgcaacagatattcatcttggatttatggagaaagatgcagycagaggaaatgatacgtttgtaacactygatgaaattttaagacttgcccaggaaaatgaagtggattttattttgttaggtggtgatctttttcatgaaaataagccctcaaggaaaacattacatacctgcctcgagttattaagaaaatattgtatgggtgatcggcctgtccagtttgaaattctcagtgatcagtcagtcaactttggttttagtaagtttccatgggtgaactatcaagatggcaacctcaacatttcaattccagtgtttagtattcatggcaatcatgacgatcccacaggggcagatgcactttgtgccttggayattttaagttgtgctggatttgtaaatcactttggacgttcaatgtctgtggagaagatagacattagtccggttttgcttcaaaaaggaagcacaaagattgcgctatatggtttaggatccattccagatgaaaggctctatcgaatgtttgtcaataaaaaagtaacaatgttgagaccaaaggaagatgagaactcttggtttaacttatttgtgattcatcagaacaggagtaaacatggaagtactaacttcattccagaacaatttttggatgacttcattgatcttgttatctggggccatgaacatgagtgtaaaatagctccaaccaaaaatgaacaacagctgttttatatctcacaacctggaagctcagtggttacttctctttccccaggagaagctgtaaagaaacatgttggtttgctgcgtattaaagggaggaagatgaatatgcataaaattcctcttcacacagtgcggcagtttttcatggaggatattgttctagctaatcatccagacatttttaacccrgataatcctaaagtaacccaagccatacaaagcttctgtttggagaagattgaagaaatgctkgaaaatgctgaacgggaacgtctgggtaattctcaccagccagagaagcctcttgtacgactgcgagtggactatagtggaggttttgaacctttcagtgttcttcgctttagccagaaatttgtggatcgggtagctaatccaaaagacattatccattttttcaggcatagagaacaaaaggaaaaaacaggagaagagatcaactttgggaaacttatcacaaagccttcagaaggaacaactttaagggtagaagatcttgtaaaacagtactttcaaaccgcagagaagaatgtgcagctctcactgctaacagaaagagggatgggtgaagcagtacaagaatttgtggacaaggaggagaaagrtgccattgaggaattagtgaaataccagttggaaaaaacacagcgatttcttaaagaacgtcatattgatgccctcgaagacaaaatcgatgaggaggtacgtcgtttcagagaaaccagacaaaaaaatactaatgaagaagatgatgaagtccgtgaggctatgaccagggccagagcactcagatctcagtcagaggagtctgcttctgcctttagtgctgatgaccttatgagtatagatttagcagaacagatggctaatgactctgatgatagcatctcagcagcaaccaacaaaggaagaggccgaggaagaggtcgaagaggtggaagagggcagaattcagcatcgagaggagggtctcaaagaggaagagcctttaaatctacaagacagcagccttcccgaaatgtcactactaagaattattcagaggtgattgaggtagatgaatcagatgtggaagaagacatttttcctaccacttcaaagacagatcaaaggtggtccagcacatcatccagcaaaatcatgtcccagagtcaagtatcgaaaggggttgattttgaatcaagtgaggatgatgatgatgatccttttrtgaacactagttctttaagaagaaatagaagataatatatttaatggcactgagaaacatgcaagatacaggaaaaatgaaaatgttacaagctaagagtttacagtttaagattttaagtattrtttcctgagcataactccataagtaagaaatttctagttcacagacatacaatagcattgattcaccttgtttttttaacctggttgttgtartaagagctttgtttcaatatcastcttgagtaaagattaaaataaagctaccattttacatttctatttcataatgaaaaactatgtcagtattttaatatggttacatttagccaaagttgagggaaagagcttataaaatttaacttcttcataattttagtaatttcctagaggttctgggttttctgaaagtaaaacaatttatgcgaacctatgtctaaattcactgtttgttactatgtatgtttttttccartgcttcttataagactaaatgattagaagtacctaatagtttgaacagatatgtttttatttaaaagagtagaataacctttcagaattactgagttttttattccagttgtagcaaagatttcaaaagattgtgttcccattaagtggtagtaatttcctttattattctgtatccttaatggtgttctctctctagttctaggaggaaacgggttaaaaattgttttaaactacatcttgaaaatattgaagaatttgttttaggtagagtggtcagttgaaccttacagtaaagtatagaaatatatttaatgtggaatgtcaatgccaggatttctcattaacaatattttatctcaactttggttcctgtgatacatttctgaatgggcaattccagaaatcttagtagcccatgttaagcttctattttttacttgttttcggggagaaataagaattagacatcttcagatttaagttaaataatcccattctttataatcctctgtaaaaagatccctgagattattccttcttctagttttatgcgacagctttactttaaaattcaagttatacatcttgggagtacaatggcccgacatttcttcataggtagaaacaaatacttgactcagtgatactcatgaccattagaatagtcatacctggaatgtgtcaaattataagagacagacacttggttagtggctgcctcatatagcacttttgaagaggcctaagtcaaaacttgcaatataacattctattgactttcttaaaaatattttttctgtacctaacttgagcataagggttatttgagcaagtaacattaactcagtggaaggcattgtcctgtgaaatattcttaggcagatctgcccacatctttattgaacttgaaatctaatatttctagtatttgaacaaagcagaaggttaagtcagggaagagcagtgctgtccatgatgtaatggaagctaccaggggaggcagtgtctggatgatgctgtgctacctacccctgcacaagccatgctggctcagtctgagctgtgggccacatcagctagtggctcttctcatgcatcagttaggtgggtctgggtgagagttatagtgagggaatggtcactaaagtatcctgacaagttcctaggaaaaaaggaataaagtttttttccttaaaaaaaaaaaaattgctcttggctgtgaaaagaggtactaaatgcgattcagttcaccgctaaggaaagtgatgacatagcagttacagagggtgataaatctctccagctaattcaggtcattttgtgaatactatgtatcaagccctgaaaatatggtaaataaaacgtgacagggaaacctttttttgattgaatattgttacatagttaaatgtgctatatatccttaatattttatattgatcctgcaaaatctgttggttttaggggagttttgttttttgtttctaacaattttcagacctgttggtataggaatgtagaagtctttcagatgatttgaaagcagctgcatttgctcttggaggctttgggagagcaggaatgaaaacattcagaggaagacatctgtagggaattcttctgttacttaccaaagaataagtgtctttctggtgttttatttcctatcataaaaatacaacagtgcatttacaaggttaaagattcctcgaagttctaggaaattcttgaaaatataagtggtgcttagaaaattcaagcatttaggaatgtgacctttaattcaggtatgtaaaagacttttttcccaaacttttaaaagtaggaaatacaataaatacagaaaagtcatatggttgaataaataattataaattgagcactgatggaatccctctacaggtcaagaaatagcgcagtgtcctggatgcccattatattgttttctcctttctgggtaacargccctaacttctgtaatttaaaagctcctacttttgccacaaggtggtgcttctgccattagacgcagttaggaggatgcaactgcaaatctaaaattacgaagttagtgtagttgcaataaacttagaacatatgcattaatactaaacctatgcagtaataccataattagccttctaatcatgtaatttgctttacttaggtatttcatttggttcagcctgttatggaatttaccagcttgataaatttgcctataaagttttataaagaaaaggaatattttgttttcataaagaggaaaatccattcttagaaaaaaactgagtaaaaaagtatctcaatggtgctgggattacaggcctgagccaccacgcccagcctattttgtgtttttttaaagctaactaccattaagatcattatagaagtttggtataatgaagatttgggtttttcagtccaatgagtttccatattcttgaatgaaaaagatccacatttcatcatttgcctgtttcattttcttttagtacttttgaacttagtttggtcagaaaatactagaattttagtttgatctaaagaaccagcttatataacttgctgttgccatgtacatttgtatgtctttgctgtgtcaaataactggatctgattttagctctttttaagtggtgaaagcaatgcatttttattcttcaaattcagacattgaatgtgtattaaaatgtgtgtgcttacctttaatcctctccccaccracaattaggaacacgtttctccaattactgttggcaagactaccaagaaaaattgttgaattagaatcccagcaccgggcacggtggctcacgcctgtgatcctagcactttgggaggccaaagcaggcggatcacctgaggtcaggagttcgagaccagcagggccaacatggygaaaccccgactctactaaaaatacaaaaattagccaggcatggtggtgggcrcctgtaatcccaactactcaggaggctgaggcaggagaattgcttgaacctgggagttggaggtcacggtgagctgatatcacrccattgcactccagcctgggcaacagagcaagactctgtctcaatcaatctatccatcaatcgataagaaccccagattgtatagctacatgttttagcccccttttcaaagtatatgttctccttgvtacttattttgacattctgacttttctacatatgctttatcaacctcttaattaaaccatcattgtctattttgagagataactgcgctgcttcccrttgtgtgttttaaatgttattgttcagtttgagtcaaataaaaggatatttaatctgtggtgccttgacattaaaagtg

SEQ ID NO: 3860 - DNA, 6190 bp, Homo sapiens
agagaaacggacgccgttctctcccgcggaattcaggtttacggccctgcgggttctcagaggcaarttcagaccgtgttgttttcttttcacggatcctgccctttcttcccgaaaagaagacagccttgggtcgcgattgtggggcttcgaagagtccagcagtgggaatttctagaatttggaatcgagtgcattttctgacatttgagtacagtacccaggggttcttggagaagaacctggtcccagaggagcttgactgaccataaaaatgagtactgcagatgcacttgatgatgaaaacacatttaaaatattagttgcaacagatattcatcttggatttatggagaaagatgcagycagaggaaatgatacgtttgtaacactygatgaaattttaagacttgcccaggaaaatgaagtggattttattttgttaggtggtgatctttttcatgaaaataagccctcaaggaaaacattacatacctgcctcgagttattaagaaaatattgtatgggtgatcggcctgtccagtttgaaattctcagtgatcagtcagtcaactttggttttagtaagtttccatgggtgaactatcaagatggcaacctcaacatttcaattccagtgtttagtattcatggcaatcatgacgatcccacaggggcagatgcactttgtgccttggayattttaagttgtgctggatttgtaaatcactttggacgttcaatgtctgtggagaagatagacattagtccggttttgcttcaaaaaggaagcacaaagattgcgctatatggtttaggatccattccagatgaaaggctctatcgaatgtttgtcaataaaaaagtaacaatgttgagaccaaaggaagatgagaactcttggtttaacttatttgtgattcatcagaacaggagtaaacatggaagtactaacttcattccagaacaatttttggatgacttcattgatcttgttatctggggccatgaacatgagtgtaaaatagctccaaccaaaaatgaacaacagctgttttatatctcacaacctggaagctcagtggttacttctctttccccaggagaagctgtaaagaaacatgttggtttgctgcgtattaaagggaggaagatgaatatgcataaaattcctcttcacacagtgcggcagtttttcatggaggatattgttctagctaatcatccagacatttttaacccrgataatcctaaagtaacccaagccatacaaagcttctgtttggagaagattgaagaaatgctkgaaaatgctgaacgggaacgtctgggtaattctcaccagccagagaagcctcttgtacgactgcgagtggactatagtggaggttttgaacctttcagtgttcttcgctttagccagaaatttgtggatcgggtagctaatccaaaagacattatccattttttcaggcatagagaacaaaaggaaaaaacaggagaagagatcaactttgggaaacttatcacaaagccttcagaaggaacaactttaagggtagaagatcttgtaaaacagtactttcaaaccgcagagaagaatgtgcagctctcactgctaacagaaagagggatgggtgaagcagtacaagaatttgtggacaaggaggagaaagrtgccattgaggaattagtgaaataccagttggaaaaaacacagcgatttcttaaagaacgtcatattgatgccctcgaagacaaaatcgatgaggaggtacgtcgtttcagagaaaccagacaaaaaaatactaatgaagaagatgatgaagtccgtgaggctatgaccagggccagagcactcagatctcagtcagaggagtctgcttctgcctttagtgctgatgaccttatgagtatagatttagcagaacagatggctaatgactctgatgatagcatctcagcagcaaccaacaaaggaagaggccgaggaagaggtcgaagaggtggaagagggcagaattcagcatcgagaggagggtctcaaagaggaagagcagacactggtctggagacttctacccgtagcaggaactcaaagactgctgtgtcagcatctagaaatatgtctattatagatgcctttaaatctacaagacagcagccttcccgaaatgtcactactaagaattattcagaggtgattgaggtagatgaatcagatgtggaagaagacatttttcctaccacttcaaagacagatcaaaggtggtccagcacatcatccagcaaaatcatgtcccagagtcaagtatcgaaaggggttgattttgaatcaagtgaggatgatgatgatgatccttttrtgaacactagttctttaagaagaaatagaagataatatatttaatggcactgagaaacatgcaagatacaggaaaaatgaaaatgttacaagctaagagtttacagtttaagattttaagtattrtttcctgagcataactccataagtaagaaatttctagttcacagacatacaatagcattgattcaccttgtttttttaacctggttgttgtartaagagctttgtttcaatatcastcttgagtaaagattaaaataaagctaccattttacatttctatttcataatgaaaaactatgtcagtattttaatatggttacatttagccaaagttgagggaaagagcttataaaatttaacttcttcataattttagtaatttcctagaggttctgggttttctgaaagtaaaacaatttatgcgaacctatgtctaaattcactgtttgttactatgtatgtttttttccartgcttcttataagactaaatgattagaagtacctaatagtttgaacagatatgtttttatttaaaagagtagaataacctttcagaattactgagttttttattccagttgtagcaaagatttcaaaagattgtgttcccattaagtggtagtaatttcctttattattctgtatccttaatggtgttctctctctagttctaggaggaaacgggttaaaaattgttttaaactacatcttgaaaatattgaagaatttgttttaggtagagtggtcagttgaaccttacagtaaagtatagaaatatatttaatgtggaatgtcaatgccaggatttctcattaacaatattttatctcaactttggttcctgtgatacatttctgaatgggcaattccagaaatcttagtagcccatgttaagcttctattttttacttgttttcggggagaaataagaattagacatcttcagatttaagttaaataatcccattctttataatcctctgtaaaaagatccctgagattattccttcttctagttttatgcgacagctttactttaaaattcaagttatacatcttgggagtacaatggcccgacatttcttcataggtagaaacaaatacttgactcagtgatactcatgaccattagaatagtcatacctggaatgtgtcaaattataagagacagacacttggttagtggctgcctcatatagcacttttgaagaggcctaagtcaaaacttgcaatataacattctattgactttcttaaaaatattttttctgtacctaacttgagcataagggttatttgagcaagtaacattaactcagtggaaggcattgtcctgtgaaatattcttaggcagatctgcccacatctttattgaacttgaaatctaatatttctagtatttgaacaaagcagaaggttaagtcagggaagagcagtgctgtccatgatgtaatggaagctaccaggggaggcagtgtctggatgatgctgtgctacctacccctgcacaagccatgctggctcagtctgagctgtgggccacatcagctagtggctcttctcatgcatcagttaggtgggtctgggtgagagttatagtgagggaatggtcactaaagtatcctgacaagttcctaggaaaaaaggaataaagtttttttccttaaaaaaaaaaaaattgctcttggctgtgaaaagaggtactaaatgcgattcagttcaccgctaaggaaagtgatgacatagcagttacagagggtgataaatctctccagctaattcaggtcattttgtgaatactatgtatcaagccctgaaaatatggtaaataaaacgtgacagggaaacctttttttgattgaatattgttacatagttaaatgtgctatatatccttaatattttatattgatcctgcaaaatctgttggttttaggggagttttgttttttgtttctaacaattttcagacctgttggtataggaatgtagaagtctttcagatgatttgaaagcagctgcatttgctcttggaggctttgggagagcaggaatgaaaacattcagaggaagacatctgtagggaattcttctgttacttaccaaagaataagtgtctttctggtgttttatttcctatcataaaaatacaacagtgcatttacaaggttaaagattcctcgaagttctaggaaattcttgaaaatataagtggtgcttagaaaattcaagcatttaggaatgtgacctttaattcaggtatgtaaaagacttttttcccaaacttttaaaagtaggaaatacaataaatacagaaaagtcatatggttgaataaataattataaattgagcactgatggaatccctctacaggtcaagaaatagcgcagtgtcctggatgcccattatattgttttctcctttctgggtaacargccctaacttctgtaatttaaaagctcctacttttgccacaaggtggtgcttctgccattagacgcagttaggaggatgcaactgcaaatctaaaattacgaagttagtgtagttgcaataaacttagaacatatgcattaatactaaacctatgcagtaataccataattagccttctaatcatgtaatttgctttacttaggtatttcatttggttcagcctgttatggaatttaccagcttgataaatttgcctataaagttttataaagaaaaggaatattttgttttcataaagaggaaaatccattcttagaaaaaaactgagtaaaaaagtatctcaatggtgctgggattacaggcctgagccaccacgcccagcctattttgtgtttttttaaagctaactaccattaagatcattatagaagtttggtataatgaagatttgggtttttcagtccaatgagtttccatattcttgaatgaaaaagatccacatttcatcatttgcctgtttcattttcttttagtacttttgaacttagtttggtcagaaaatactagaattttagtttgatctaaagaaccagcttatataacttgctgttgccatgtacatttgtatgtctttgctgtgtcaaataactggatctgattttagctctttttaagtggtgaaagcaatgcatttttattcttcaaattcagacattgaatgtgtattaaaatgtgtgtgcttacctttaatcctctccccaccracaattaggaacacgtttctccaattactgttggcaagactaccaagaaaaattgttgaattagaatcccagcaccgggcacggtggctcacgcctgtgatcctagcactttgggaggccaaagcaggcggatcacctgaggtcaggagttcgagaccagcagggccaacatggygaaaccccgactctactaaaaatacaaaaattagccaggcatggtggtgggcrcctgtaatcccaactactcaggaggctgaggcaggagaattgcttgaacctgggagttggaggtcacggtgagctgatatcacrccattgcactccagcctgggcaacagagcaagactctgtctcaatcaatctatccatcaatcgataagaaccccagattgtatagctacatgttttagcccccttttcaaagtatatgttctccttgvtacttattttgacattctgacttttctacatatgctttatcaacctcttaattaaaccatcattgtctattttgagagataactgcgctgcttcccrttgtgtgttttaaatgttattgttcagtttgagtcaaataaaaggatatttaatctgtggtgccttgacattaaaagtg

SEQ ID NO: 3861 - DNA, 2497 bp, Homo sapiens
ttccccagtcgttcgccggaaagcatttgtctcccacctcttcataacaacaattaatttcctctgrggcctgaggagggcagaatttcaaccttcggtgtgcttgggagtggcgattgtgatttacacgacaaaatgccgaggtgctcggtggagtcatggcagtgccctttgtggaagactgggacttggtgcaaaccctgggagaaggtgcctatggagaagttcaacttgctgtgaatagagtaactgaagaagcagtcgcagtgaagattgtagatatgaagcgtgccgtagactgtccagaaaatattaagaaagagatctgtatcaataaaatgctaaatcatgaaaatgtagtaaaattctatggtcacaggagagaaggcaatatccaatatttatttctggagtactgtagtggaggagagctttttgacagaatagagccagacataggcatgcctgaaccagatgctcagagattcttccatcaactcatggcaggggtggtttatctgcatggtattggaataactcacagggatattaaaccagaaaatcttctgttggatgaaagggataacctcaaaatctcagactttggcttggcaacagtatttcggtataataatcgtgagcgtttgttgaacaagatgtgtggtactttaccatatgttgctccagaacttctgaagagaagagaatttcatgcagaaccagttgatgtttggtcctgtggaatagtacttactgcaatgctcgctggagaattgccatgggaccaacccagtgacagctgtcaggagtattctgactggaaagaaaaaaaaacatacctcaacccttggaaaaaaatcgattctgctcctctagctctgctgcataaaatcttagttgagaatccatcagcaagaattaccattccagacatcaaaaaagatagatggtacaacaaacccctcaagaaaggggcaaaaaggccccgagtcacttcaggtggtgtgtcagagtctcccagtggattttctaagcacattcaatccaatttggacttctctccagtaaacagtgcttctagtgaagaaaatgtgaagtactccagttctcagccagaaccccgcacaggtctttcyttatgggataccagcccctcatacattgataaattggtacaagggatcagcttttcccagcccacatgtcctgatcatatgcttttgaatagtcagttacttggcaccccaggatcctcacagaacccctggcagcggttggtcaaaagaatgacacgattctttaccaaattggatgcagacaaatcttatcaatgcctgaaagagacttgtgagaagttgggctatcaatggaagaaaagttgtatgaatcaggttactatatcaacaactgataggagaaacaataaactcattttcaaagtgaatttgttagaaatggatgataaaatattggttgacttccggctttctaagggtgatggattggagttcaagagacacttcctgaagattaaagggaagctgattgatattgtgagcagccagaagrtttggcttcctgccacatgatcggaccatcggctctggggaatcctggtgaatatagtgctgctatgttgacattattcttcctagagaagattatcctgtcctgcaaactgcaaatagtagttcctgaagtgttcacttccctgtttatccaaacatcttccaatttattttgtttgttcggcatacaaataatacctatatcttaattgtaagcaaaactttggggaaaggatgaatagaattcatttgattatttcttcatgtgtgtttagtatctgaatttgaaactcatctggtggaaaccaagtttcaggggacatgagttttccagcttttatacacacgtatctcatttttatcaaaacattttgtttaattcaaaaagtacataytccatgttgatttaattctaagatgaaccaataaagacataattcttgtgacttttggacagtagatttatcagtctgtgaagcgaagccagcttcaaaacatatccccaagatttgtacttatattttcaaaagggcctggccagttatataaacctgtttttgaattataatgattaattaaaattgcaagtaggtgttttttccagtgtagttagtaaaatacttgtattttacagtgttgcataaactctagtgcttaactaactttactctaaaaattactgttgaacatcttaaatatttttctatattttctactttcatagccatattttaaccttttcaacttactggtgaccaagcttttaggtgataaagaataaaagagggaagggaagagtaaggaagctataagaaaaatagatctgattctttgttcctttacctgttagacttacaaaaagtttgtttttctaataaaatttgtatcaactttggggcatattaggttgaggccttggctcctgcctg

SEQ ID NO: 3862 - DNA, 2498 bp, Homo sapiens
gagcaattgggaggaggcgctgccgcaggcgttttctgccccatwccgctccctatatcctcttcctctcttccccagacccccacctctccctcctccttccccagtcgttcgccggaaagcatttgtctcccacctcttcataacaacaattaatttcctctgrggcctgaggagggcagaatttcaaccttcggtgtgcttgggagtggcgattgtgatttacacgacaaaatggtcaggtttagaatagttgttcgtggttgaaagacttggataaatgtggatgagatagaaggggaagccgaggtgctcggtggagtcatggcagtgccctttgtggaagactgggacttggtgcaaaccctgggagaaggtgcctatggagaagccagacataggcatgcctgaaccagatgctcagagattcttccatcaactcatggcaggggtggtttatctgcatggtattggaataactcacagggatattaaaccagaaaatcttctgttggatgaaagggataacctcaaaatctcagactttggcttggcaacagtatttcggtataataatcgtgagcgtttgttgaacaagatgtgtggtactttaccatatgttgctccagaacttctgaagagaagagaatttcatgcagaaccagttgatgtttggtcctgtggaatagtacttactgcaatgctcgctggagaattgccatgggaccaacccagtgacagctgtcaggagtattctgactggaaagaaaaaaaaacatacctcaacccttggaaaaaaatcgattctgctcctctagctctgctgcataaaatcttagttgagaatccatcagcaagaattaccattccagacatcaaaaaagatagatggtacaacaaacccctcaagaaaggggcaaaaaggccccgagtcacttcaggtggtgtgtcagagtctcccagtggattttctaagcacattcaatccaatttggacttctctccagtaaacagtgcttctagtgaagaaaatgtgaagtactccagttctcagccagaaccccgcacaggtctttcyttatgggataccagcccctcatacattgataaattggtacaagggatcagcttttcccagcccacatgtcctgatcatatgcttttgaatagtcagttacttggcaccccaggatcctcacagaacccctggcagcggttggtcaaaagaatgacacgattctttaccaaattggatgcagacaaatcttatcaatgcctgaaagagacttgtgagaagttgggctatcaatggaagaaaagttgtatgaatcaggttactatatcaacaactgataggagaaacaataaactcattttcaaagtgaatttgttagaaatggatgataaaatattggttgacttccggctttctaagggtgatggattggagttcaagagacacttcctgaagattaaagggaagctgattgatattgtgagcagccagaagrtttggcttcctgccacatgatcggaccatcggctctggggaatcctggttgaggccttggctcctgcctgtagtcccagctacttaggaggctgagagaggaggatcrcgtgaacctggaagtttgaggctgtagtgagctatgattgcaccagtgcactccagcttggatgacagagtaagaccctacctctaataaaaatttttaaaattgtaaaacattataaaattaatcagttattttaatctgaagccaagaacatgtagaatgttatgattagagtttatcacatattaatgtatactggcaaattgtgttactggagtatacccataggaggaataaattcaaacctgttttatttatttgaacctatttacggtatgcttaagaattgaatcagtataaattctcaaatatgggagaaattttgttcttgagaattatctgagtcattaatatttttcaaaaacagctctcactgacttgaacctcttctgtaagctctaaccttttacctgctttacatttccacttgaatgtctagtaggcatctcttgaccaaaaacagcttttgattcctgttctccaacctgttcctctcctagttttctccatctcagaaatgttacttcctctgcaaagtctttccctgacttatctaaaataataacctcctctgtttgctgtgggaatttgtatagaatggtgggaaaatttcaagtttcatatttggattagctctgacatttatttatctgaacactggtaattgcctcagtaaagacactgataataagtaccttttagagttattttaatctttaatgctttaatgtgtaggaagagtatagtgtcctgttttgcacagaaaggcattctgtaaataataagttgccttaattttcctgtaatgttcattatattgttgtgggaaggtatttactcctattattaaaaataaaaatgtgtaaaatttactacctg

SEQ ID NO: 3863 - DNA, 3046 bp, Homo sapiens
ggagcggtccgggaggcggacccggctcctgccagggttgggtgcgccgctgaacggatggctgagggagccccgcggatcgtttaggaaagccggccagctgatcgtcgtgtgttgccacccattcatgtcaagatgactaagtttggatttttgcgattgtcctatgagaagcaggacacacttytgaagcttctcattctgtcaatggctgctgtattatccttctccactcgtctgtttgctgtcctgagatttgaaagtgttatccatgagtttgatccgtactttaattatcggactaccaggttcctggctgaggaggggttttataaattccataactggtttgatgaccgagcctggtaccctttgggacgaatcattggaggaacaatttacccaggtttaatgatcacctctgctgcaatctaccatgtactccattttttccacatcaccatcgacattcggaatgtctgtgtgttcctggcccctctcttctcctccttcaccaccatcgtcacgtaccaccttaccaaagagctcaaggatgcaggggctgggcttcttgctgctgccatgattgctgtagttcctggatatatctcccgatctgtggctggctcctatgataatgaagggattgccatcttttgcatgctactcacctactacatgtggatcaaggcagtaaagactggttccatctgttgggcagctaagtgtgcccttgcttatttctacatggtctcgtcatggggaggttatgtgttcctgatcaacttaattcctctccacgtcctsgtgctgatgctcacaggccgtttctctcaccggatctatgtggcctactgtactgtttactgcctgggcactatactttctatgcagatctcctttgtgggtttccagcctgtcctttcatcagagcacatggcagcctttggggtctttggtctctgccagatccatgcctttgtggattacctgcgcagcaagttgaatccacaacaatttgaagttctyttccggagcgtcatctctctggtaggctttgtccttctcaccgtgggagctctcctcatgctgacaggaaaaatatctccctggacggggcgtttctactcrctgctggatccctcttatgctaagaacaacatccccatcattgcttctgtgtctgagcatcagcccacaacctggtcctcatactattttgacctgcagctcctcgtcttcatgtttccagttggcctctattactgctttagcaacctgtctgatgcccggatttttatcatcatgtatggtgtgaccagcatgtacttttcagctgtaatggtgcgtctaatgctagtgttggcacctgttatgtgcattctctctggcattggagtctcccaggtgctgtccacatacatgaagaatctggacataagtcgyccagacaagaagagcaagaagcaacaggattccacctaccctattaagaatgaagtggcaagtgggatgatactggtcatggctttctttctcatcacctacacctttcattcaacctgggtgaccagtgaggcctactcttctccgtccatygtactatctgcccgtggtggggatggcagtaggatcatatttgatgacttccgagaagcatattattggcttcgtcataatactccagaggatgcgaaggtcatgtcctggtgggattatggctatcagattacagctatggcaaaccgaacrattttagtggacaataacacatggaataatacccatatttctcgagtagggcaggcaatggcgtccacagaggaaaaagcctatgagatcatgagggagctcgatgtcagctatgtgctggtcatttttggaggcctcactgggtattcctctgatgatatcaacaagtttctttggatggtccggattggagggagcacagatacaggcaaacatatcaaggagaatgactattatactccaactggggagttccgtgtggaccgtgaaggttctccagtgctgctcaactgcctcatgtacaagatgtgttactatcgctttggacaggtttacacagaagccaagcgtcctccaggctttgaccgtgtccgaaatgctgagattgggaataaagactttgagcttgatgtcctggaggaagcatataccacagaacattggctggtcaggatatacaaggtaaaggacctggataatcgaggcttgtcaaggacataaatgtcacgtccagctytgatatgcttcgcactgagcacatcacatttaggacgttgaagatttttttttttttttttttttaatatgcagtttgtaagaacaaaactggatggcatcagaattgtctggaagttttgtcttgggcagtatgggctgggccaaatgaaatgatttttataattctaamcaggttaccaaatgaaatgtcatggctttactttggtcaattaaaggggggaatttttttwaaaaatgtgccttatttgttttgacttataactgatttgagggaggcaaaagctatgctaggctgccagaaggacataagcagaccttgtccattctcttagctccctaaattagccaaatagagacttctttctcaaatcaggraaactatcaaagaccaattcagatcctacatttacagacagttttgtcataaccctttgcattgcagcacctagtacaattccttggaaacagcgtggctcaataaatttttattgaatgaataaatgtgggaccagaagagtgctagaagagtgcctttctgggctactatgtctctgttctcaatgtcttttatccttagacgctctttgactttataaatcagcagttttgaagactcaagacaaacagtgaaattattggtttatcaatggagaggaagaaactcttccagcattacatatagagcttgatggtcagtaggtgtttttgaatcagcttaaatataatcatacatatcaatttgaaatggagcttttcagtactctcacttattcat

SEQ ID NO: 3864 - DNA, 5404 bp, Homo sapiens
ggagcggtccgggaggcggacccggctcctgccagggttgggtgcgccgctgaacggatggctgagggagccccgcggatcgtttaggaaagccggccagctgatcgtcgtgtgttgccacccattcatgtcaagatgactaagtttggatttttgcgattgtcctatgagaagcaggacacacttytgaagcttctcattctgtcaatggctgctgtattatccttctccactcgtctgtttgctgtcctgagatttgaaagtgttatccatgagtttgatccgtactttaattatcggactaccaggttcctggctgaggaggggttttataaattccataactggtttgatgaccgagcctggtaccctttgggacgaatcattggaggaacaatttacccaggtttaatgatcacctctgctgcaatctaccatgtactccattttttccacatcaccatcgacattcggaatgtctgtgtgttcctggcccctctcttctcctccttcaccaccatcgtcacgtaccaccttaccaaagagctcaaggatgcaggggctgggcttcttgctgctgccatgattgctgtagttcctggatatatctcccgatctgtggctggctcctatgataatgaagggattgccatcttttgcatgctactcacctactacatgtggatcaaggcagtaaagactggttccatctgttgggcagctaagtgtgcccttgcttatttctacatggtctcgtcatggggaggttatgtgttcctgatcaacttaattcctctccacgtcctsgtgctgatgctcacaggccgtttctctcaccggatctatgtggcctactgtactgtttactgcctgggcactatactttctatgcagatctcctttgtgggtttccagcctgtcctttcatcagagcacatggcagcctttggggtctttggtctctgccagatccatgcctttgtggattacctgcgcagcaagttgaatccacaacaatttgaagttctyttccggagcgtcatctctctggtaggctttgtccttctcaccgtgggagctctcctcatgctgacaggaaaaatatctccctggacggggcgtttctactcrctgctggatccctcttatgctaagaacaacatccccatcattgcttctgtgtctgagcatcagcccacaacctggtcctcatactattttgacctgcagctcctcgtcttcatgtttccagttggcctctattactgctttagcaacctgtctgatgcccggatttttatcatcatgtatggtgtgaccagcatgtacttttcagctgtaatggtgcgtctaatgctagtgttggcacctgttatgtgcattctctctggcattggagtctcccaggtgctgtccacatacatgaagaatctggacataagtcgyccagacaagaagagcaagaagcaacaggattccacctaccctattaagaatgaagtggcaagtgggatgatactggtcatggctttctttctcatcacctacacctttcattcaacctgggtgaccagtgaggcctactcttctccgtccatygtactatctgcccgtggtggggatggcagtaggatcatatttgatgacttccgagaagcatattattggcttcgtcataatactccagaggatgcgaaggtcatgtcctggtgggattatggctatcagattacagctatggcaaaccgaacrattttagtggacaataacacatggaataatacccatatttctcgagtagggcaggcaatggcgtccacagaggaaaaagcctatgagatcatgagggagctcgatgtcagctatgtgctggtcatttttggaggcctcactgggtattcctctgatgatatcaacaagtttctttggatggtccggattggagggagcacagatacaggcaaacatatcaaggagaatgactattatactccaactggggagttccgtgtggaccgtgaaggttctccagtgctgctcaactgcctcatgtacaagatgtgttactatcgctttggacaggtttacacagaagccaagcgtcctccaggctttgaccgtgtccgaaatgctgagattgggaataaagactttgagcttgatgtcctggaggaagcatataccacagaacattggctggtcaggatatacaagacgctctttgactttataaatcagcagttttgaagactcaagacaaacagtgaaattattggtttatcaatggagaggaagaaactcttccagcattacatatagagcttgatgagatggggtctccctatgttccccaggctggtcctgaactcctggcctcaagccattctcctgcctcgccttcccaaagtgctggaattacaggcaggagccactgcgcccggccagtgctggagaatgtaatggagatgatcctgcctatccctgagttccagtctagtttactgtcagagaatacttatttccatttttcctattttgttcttgagtctctttcctcagaatttacttttccacttaaatgaygtacgcagcttttaaatttgcgttgtaagatttattttggctctccccgcctgttctttgcacattaaaaatgaaaaagtttgtagaactaagctaagcagatggtcttcctgcaaaaagaccgggctgaagtaaagcattgttttggagctggttcacagaaaaaaggcaaaactggttatcctgacyycaagctccaacataaactgctcgctttctccgggaaacttgccccgccacayacacttgactgcgtggccagttctttcgaagcctctcgctcccaacacggagttcctcccatttcttcacagtcggctctcagcagctgctgctggtttctcggctccagcaccacgagtaccgcactctgaggtttacaaagcactctgcttcaccgactgtgatcctcacagtcctgtccggtggcctcacgcaggtggcggtgcagcctttcaggcccagagcggccaggagcgaagcccgcagccccgcctgkaagcgcagcgcggtcggtcgcgcgcccctgaggcttggaggcctgggcttcccccagcagcgctcgagcaccgcccagtcgagcctcacaccggatgccacttcatatttgggcccagagctcaattcgcgccgatgcggtccgccgtccttaaatctcttcagccaggatctctccccgactgcaaagcagccctgggcgggagcggcaacatctccacgtcacccttttggagccgccgacattcagaggggcaggacacgggaacgcgcgctgtcttgctttacggcgcgggtgcgcgagtttgcggcagcgtgacgccctcaagttttggcgggaaaagcgctgcatttggattcctgcagtggtgggcaaaggacagtccgccgaggtgctcggtggagtcatggcagtgccctttgtggaagactgggacttggtgcaaaccctgggagaaggtgcctatggagaagttcaacttgctgtgaatagagtaactgaagaagcagtcgcagtgaagattgtagatatgaagcgtgccgtagactgtccagaaaatattaagaaagagatctgtatcaataaaatgctaaatcatgaaaatgtagtaaaattctatggtcacaggagagaaggcaatatccaatatttatttctggagtactgtagtggaggagagctttttgacagaatagagccagacataggcatgcctgaaccagatgctcagagattcttccatcaactcatggcaggggtggtttatctgcatggtattggaataactcacagggatattaaaccagaaaatcttctgttggatgaaagggataacctcaaaatctcagactttggcttggcaacagtatttcggtataataatcgtgagcgtttgttgaacaagatgtgtggtactttaccatatgttgctccagaacttctgaagagaagagaatttcatgcagaaccagttgatgtttggtcctgtggaatagtacttactgcaatgctcgctggagaattgccatgggaccaacccagtgacagctgtcaggagtattctgactggaaagaaaaaaaaacatacctcaacccttggaaaaaaatcgattctgctcctctagctctgctgcataaaatcttagttgagaatccatcagcaagaattaccattccagacatcaaaaaagatagatggtacaacaaacccctcaagaaaggggcaaaaaggccccgagtcacttcaggtggtgtgtcagagtctcccagtggattttctaagcacattcaatccaatttggacttctctccagtaaacagtgcttctagtgaagaaaatgtgaagtactccagttctcagccagaaccccgcacaggtctttcyttatgggataccagcccctcatacattgataaattggtacaagggatcagcttttcccagcccacatgtcctgatcatatgcttttgaatagtcagttacttggcaccccaggatcctcacagaacccctggcagcggttggtcaaaagaatgacacgattctttaccaaattggatgcagacaaatcttatcaatgcctgaaagagacttgtgagaagttgggctatcaatggaagaaaagttgtatgaatcaggttactatatcaacaactgataggagaaacaataaactcattttcaaagtgaatttgttagaaatggatgataaaatattggttgacttccggctttctaagggtgatggattggagttcaagagacacttcctgaagattaaagggaagctgattgatattgtgagcagccagaagrtttggcttcctgccacatgatcggaccatcggctctggggaatcctggttgaggccttggctcctgcctgtagtcccagctacttaggaggctgagagaggaggatcrcgtgaacctggaagtttgaggctgtagtgagctatgattgcaccagtgcactccagcttggatgacagaatggagtttcactcttgtctcccaggctggagtacaatggcatgatctcagcttactgcaacctccgtctcctgggttcaagcgattctcctgcctcagccttccaagtagctgggattacaggtgcccaccaccacacctggctaggttttgtatttttagtagagatggggttttttcatgttggccaggctgatctggaactcctgacctcaagtgatccacctgccttggcctcccaaagtgctgggattttaggtgtgagccacctcgcctggcaagggattctgttcttagtccttgaaaaaataaagttctgaatcttcaa

SEQ ID NO: 3865 - DNA, 5827 bp, Homo sapiens
ggagcggtccgggaggcggacccggctcctgccagggttgggtgcgccgctgaacggatggctgagggagccccgcggatcgtttaggaaagccggccagctgatcgtcgtgtgttgccacccattcatgtcaagatgactaagtttggatttttgcgattgtcctatgagaagcaggacacacttytgaagcttctcattctgtcaatggctgctgtattatccttctccactcgtctgtttgctgtcctgagatttgaaagtgttatccatgagtttgatccgtactttaattatcggactaccaggttcctggctgaggaggggttttataaattccataactggtttgatgaccgagcctggtaccctttgggacgaatcattggaggaacaatttacccaggtttaatgatcacctctgctgcaatctaccatgtactccattttttccacatcaccatcgacattcggaatgtctgtgtgttcctggcccctctcttctcctccttcaccaccatcgtcacgtaccaccttaccaaagagctcaaggatgcaggggctgggcttcttgctgctgccatgattgctgtagttcctggatatatctcccgatctgtggctggctcctatgataatgaagggattgccatcttttgcatgctactcacctactacatgtggatcaaggcagtaaagactggttccatctgttgggcagctaagtgtgcccttgcttatttctacatggtctcgtcatggggaggttatgtgttcctgatcaacttaattcctctccacgtcctsgtgctgatgctcacaggccgtttctctcaccggatctatgtggcctactgtactgtttactgcctgggcactatactttctatgcagatctcctttgtgggtttccagcctgtcctttcatcagagcacatggcagcctttggggtctttggtctctgccagatccatgcctttgtggattacctgcgcagcaagttgaatccacaacaatttgaagttctyttccggagcgtcatctctctggtaggctttgtccttctcaccgtgggagctctcctcatgctgacaggaaaaatatctccctggacggggcgtttctactcrctgctggatccctcttatgctaagaacaacatccccatcattgcttctgtgtctgagcatcagcccacaacctggtcctcatactattttgacctgcagctcctcgtcttcatgtttccagttggcctctattactgctttagcaacctgtctgatgcccggatttttatcatcatgtatggtgtgaccagcatgtacttttcagctgtaatggtgcgtctaatgctagtgttggcacctgttatgtgcattctctctggcattggagtctcccaggtgctgtccacatacatgaagaatctggacataagtcgyccagacaagaagagcaagaagcaacaggattccacctaccctattaagaatgaagtggcaagtgggatgatactggtcatggctttctttctcatcacctacacctttcattcaacctgggtgaccagtgaggcctactcttctccgtccatygtactatctgcccgtggtggggatggcagtaggatcatatttgatgacttccgagaagcatattattggcttcgtcataatactccagaggatgcgaaggtcatgtcctggtgggattatggctatcagattacagctatggcaaaccgaacrattttagtggacaataacacatggaataatacccatatttctcgagtagggcaggcaatggcgtccacagaggaaaaagcctatgagatcatgagggagctcgatgtcagctatgtgctggtcatttttggaggcctcactgggtattcctctgatgatatcaacaagtttctttggatggtccggattggagggagcacagatacaggcaaacatatcaaggagaatgactattatactccaactggggagttccgtgtggaccgtgaaggttctccagtgctgctcaactgcctcatgtacaagatgtgttactatcgctttggacaggtttacacagaagccaagcgtcctccaggctttgaccgtgtccgaaatgctgagattgggaataaagactttgagcttgatgtcctggaggaagcatataccacagaacattggctggtcaggatatacaagacgctctttgactttataaatcagcagttttgaagactcaagacaaacagtgaaattattggtttatcaatggagaggaagaaactcttccagcattacatatagagcttgatgagatggggtctccctatgttccccaggctggtcctgaactcctggcctcaagccattctcctgcctcgccttcccaaagtgctggaattacaggcaggagccactgcgcccggccagtgctggagaatgtaatggagatgatcctgcctatccctgagttccagtctagtttactgtcagagaatacttatttccatttttcctattttgttcttgagtctctttcctcagaatttacttttccacttaaatgaygtacgcagcttttaaatttgcgttgtaagatttattttggctctccccgcctgttctttgcacattaaaaatgaaaaagtttgtagaactaagctaagcagatggtcttcctgcaaaaagaccgggctgaagtaaagcattgttttggagctggttcacagaaaaaaggcaaaactggttatcctgacyycaagctccaacataaactgctcgctttctccgggaaacttgccccgccacayacacttgactgcgtggccagttctttcgaagcctctcgctcccaacacggagttcctcccatttcttcacagtcggctctcagcagctgctgctggtttctcggctccagcaccacgagtaccgcactctgaggtttacaaagcactctgcttcaccgactgtgatcctcacagtcctgtccggtggcctcacgcaggtggcggtgcagcctttcaggcccagagcggccaggagcgaagcccgcagccccgcctgkaagcgcagcgcggtcggtcgcgcgcccctgaggcttggaggcctgggcttcccccagcagcgctcgagcaccgcccagtcgagcctcacaccggatgccacttcatatttgggcccagagctcaattcgcgccgatgcggtccgccgtccttaaatctcttcagccaggatctctccccgactgcaaagcagccctgggcgggagcggcaacatctccacgtcacccttttggagccgccgacattcagaggggcaggacacgggaacgcgcgctgtcttgctttacggcgcgggtgcgcgagtttgcggcagcgtgacgccctcaagttttggcgggaaaagcgctgcatttggattcctgcagtggtgggcaaaggacagtccgccgaggtgctcggtggagtcatggcagtgccctttgtggaagactgggacttggtgcaaaccctgggagaaggtgcctatggagaagttcaacttgctgtgaatagagtaactgaagaagcagtcgcagtgaagattgtagatatgaagcgtgccgtagactgtccagaaaatattaagaaagagatctgtatcaataaaatgctaaatcatgaaaatgtagtaaaattctatggtcacaggagagaaggcaatatccaatatttatttctggagtactgtagtggaggagagctttttgacagaatagagccagacataggcatgcctgaaccagatgctcagagattcttccatcaactcatggcaggggtggtttatctgcatggtattggaataactcacagggatattaaaccagaaaatcttctgttggatgaaagggataacctcaaaatctcagactttggcttggcaacagtatttcggtataataatcgtgagcgtttgttgaacaagatgtgtggtactttaccatatgttgctccagaacttctgaagagaagagaatttcatgcagaaccagttgatgtttggtcctgtggaatagtacttactgcaatgctcgctggagaattgccatgggaccaacccagtgacagctgtcaggagtattctgactggaaagaaaaaaaaacatacctcaacccttggaaaaaaatcgattctgctcctctagctctgctgcataaaatcttagttgagaatccatcagcaagaattaccattccagacatcaaaaaagatagatggtacaacaaacccctcaagaaaggggcaaaaaggccccgagtcacttcaggtggtgtgtcagagtctcccagtggattttctaagcacattcaatccaatttggacttctctccagtaaacagtgcttctagtgaagaaaatgtgaagtactccagttctcagccagaaccccgcacaggtctttcyttatgggataccagcccctcatacattgataaattggtacaagggatcagcttttcccagcccacatgtcctgatcatatgcttttgaatagtcagttacttggcaccccaggatcctcacagaacccctggcagcggttggtcaaaagaatgacacgattctttaccaaattggatgcagacaaatcttatcaatgcctgaaagagacttgtgagaagttgggctatcaatggaagaaaagttgtatgaatcaggttactatatcaacaactgataggagaaacaataaactcattttcaaagtgaatttgttagaaatggatgataaaatattggttgacttccggctttctaagggtgatggattggagttcaagagacacttcctgaagattaaagggaagctgattgatattgtgagcagccagaagrtttggcttcctgccacatgatcggaccatcggctctggggaatcctggtgaatatagtgctgctatgttgacattattcttcctagagaagattatcctgtcctgcaaactgcaaatagtagttcctgaagtgttcacttccctgtttatccaaacatcttccaatttattttgtttgttcggcatacaaataatacctatatcttaattgtaagcaaaactttggggaaaggatgaatagaattcatttgattatttcttcatgtgtgtttagtatctgaatttgaaactcatctggtggaaaccaagtttcaggggacatgagttttccagcttttatacacacgtatctcatttttatcaaaacattttgtttaattcaaaaagtacataytccatgttgatttaattctaagatgaaccaataaagacataattcttgtgacttttggacagtagatttatcagtctgtgaagcgaagccagcttcaaaacatatccccaagatttgtacttatattttcaaaagggcctggccagttatataaacctgtttttgaattataatgattaattaaaattgcaagtaggtgttttttccagtgtagttagtaaaatacttgtattttacagtgttgcataaactctagtgcttaactaactttactctaaaaattactgttgaacatcttaaatatttttctatattttctactttcatagccatattttaaccttttcaacttactggtgaccaagcttttaggtgataaagaataaaagagggaagggaagagtaaggaagctataagaaaaatagatctgattctttgttcctttacctgttagacttacaaaaagtttgtttttctaataaaatttgtatcaactttggggcatattaggttgaggccttggctcctgcctg

SEQ ID NO: 3866 - DNA, 5074 bp, Homo sapiens
ggagcgggagggaaggagcgaaggagcgaaggagcaagcggagcggccgtcgcccaagccaagccgcgctgccaaccctcccgcccgcccgcgctcctgtccgccgtgtctagcagcggggcccagcatggtcatggcggatggcccgaggcacttgcagcgcgggccggtccgggtggggttctacgacatcgagggcacgctgggcaagggcaacttcgctgtggtgaagctggggcggcaccggatcaccaagacggaggtggcaataaaaataatcgataagtctcagctggatgcagtgaaccttgagaaaatctaccgagaagtacaaataatgaaaatgttagaccaccctcacataatcaaactttatcaggtaatggagaccaaaagtatgttgtaccttgtgacagaatatgccaaaaatggagaaatttttgactatcttgctaatcatggccggttaaatgagtctgaagccaggcgaaaattctggcaaatcctgtctgctgttgattattgtcatggtcggaagattgtgcaccgtgacctcaaagctgaaaatctcctgctggataacaacatgaatatcaaaatagcagatttcggttttggaaatttctttaaaagtggtgaactgctggcaacatggtgtggcagccccccttatgcagccccagaagtctttgaagggcagcagtatgaaggaccacagctggacatctggagtatgggagttgttctttatgtccttgtctgtggagctctgccctttgatggaccgactcttccaattttgaggcagagggttctggaaggaagattccggattccgtatttcatgtcagaagattgcgagcaccttatccgaaggatgttggtcctagacccatccaaacggctaaccatagcccaaatcaaggagcataaatggatgctcatagaagttcctgtccagagacctgttctctatccacaagagcaagaaaatgagccatccatcggggagtttaatgagcaggttctgcgactgatgcacagccttggaatagatcagcagaaaaccattgagtctttgcagaacaagagctataaccactttgctgccatttatttcttgttggtggagcgcctgaaatcacatcggagcagtttcccagtggagcagagacttgatggccgccagcgtcggcctagcaccattgctgagcaaacagttgccaaggcacagactgtggggctcccagtgaccatgcattcaccgaacatgaggctgctgcgatctgccctcctcccccaggcatccaacgtggaggccttttcatttccagcatctggctgtcaggcggaagctgcattcatggaagaagagtgtgtggacactccaaaggtcaatggctgtctgcttgaccctgtgcctcctgtcctggtgcggaagggatgccagtcactgcccagcaacatgatggagacctccattgacgaagggctggagacagaaggagaggccgaggaagaccccgctcatgcctttgaggcatttcagtccacacgcagcgggcagagacggcacactctgtcagaagtgaccaatcaactggtcgtgatgcctggggcagggaaaattttctccatgaatgacagcccctcccttgacagtgtggactctgagtatgatatggggtctgttcagagggacctgaactttctggaagacaacccttcccttaaggacatcatgttagccaatcagccttcaccccgcatgacatctcccttcataagcctgagacctaccaacccagccatgcaggctctgagctcccagaaacgagaggtccacaacaggtctccagtgagcttcagagagggccgcagagcatcagatacctccctcacccagggaattgtagcatttagacaacatcttcagaatctggctagaaccaaaggaattctagagttgaacaaagtgcagttgttgtatgaacaaataggaccggaggcagaccctaacctggcgccggcggctcctcagctccaggaccttgctagcagctgccctcaggaagaagtttctcagcagcaggaaagcgtctccactctccctgccagcgtgcatccccagctgtccccacggcagagcctggagacccagtacctgcagcacagactccagaagcccagccttctgtcaaaggcccagaacacctgtcagctttattgcaaagaaccaccrcggagccttgagcagcagctgcaggaacataggctccagcagaagcgactctttcttcagaagcagtctcaactgcaggcctattttaatcagatgcagatagcagagagctcctacccacagccaagtcagcagctgccccttccccgccaggagactccaccgccttctcagcaggccccaccgttcagcctgacccagcccctgagccccgtcctggagccttcctccgagcagatgcaatacagccctttcctcagccagtaccaagagatgcagcttcagcccctgccctccacttccggtccccgggctgctcctcctctgcccacrcagctacagcagcagcagccgccaccgccaccaccccctccaccaccacgacagccaggagctgccccagcccccttacagttctcctatcagacttgtgagctgccaagcgctgcttcccctgcgccagactatcccactccctgtcagtatcctgtggatggagcccagcagagcgacctaacggggccagactgtcccagaagcccaggactgcaagaggccccctccagctacgacccactagccctctctgagctacctggactctttgattgtgaaatgctagacgctgtggatccacaacacaacgggtatgtcctggtgaattagtctcagcacaggaattgaggtgggtcaggtgaaggaagagtgtatgttcctatttttattccagccttttaaatttaaagcttattttcttgccctctccctaacggggagaaatcgagccacccaactggaatcagagggtctggctggggtggatgttgcttcctcctggttctgccccaccacaaagttttctgtggcaagtgctggaacatagttgtaggctgaggctcctgcccttcggtcgagtggagcaagctctcgagggcagcactgacaaatgtgttcctaagaagacattcagacccaggtsttatgcaggattacatccgtttrttatcaagggcaaccttggtgaaagcagaaagggtgtgtgctattgcatatatatgggggaaaaggcaatatatttttcactgaagctgagcaaccacatattgctacaaggcaaatcaagaagacatcaggaaatcagatgcacaggaaataaaggaaagctgtgctttgtcattgaatcctaagttcttagctgctgatgcaagttgtcccccaaggccatcacaaagcagtggggcatgagctgtgtttcaggggccactaaataacagctggtactgaccccagaaaccrccttcatctccattcggaagcaggtgacacaccccttcagaaggtgccctgggttgccgagtgtcagaatatactcaggactccagaggtgtcacacgtggaactgacaggagacccgccaccgtggaggcagggggcaagaaactcaagaacgcatcaagagcaccagccctgggccagggaagacaggctcttcctgcagtttctcgtggacactgctggcttgcgggcagtcggtctccagggtacctgttgtctcttttccgatgtaataactactttgaccttacactatatgttgctagtagtttattgagctttgtatatttggacagtttcatatagggcttagagattttaaggacatgataaatgaacttttctgtcccatgtgaagtggtagtgcggtgcctttcccccagatcatgctttaattctttcttttctgtagaaaccaacagtttccatttatgtcaatgctaaatccaaagtcacttcagagtttgttttccaccatgtgggaatcagcattcttaatttcgttaaagttttgacttgtaatgaaatgttcaagtattacagcaatattcaaagaaagaaccacagatgtgttaaccatttaagcagatcatctgccaaacattatattactaataaaacttaaccaacacttacaattcagtcatcaaagtaagtaaaaattagatgctacagctagctaactgtatccctagaaatgatgaataatttgccatttggacagttaacatccaggtgttacaaagtcagtgttaattctaaagatgatcatttctgccctttagaatggcttgtcccatcagcagatgaatgtgttaagcacaaagcatcttccttaaagcacaaagagagggactaactgatgctgcatctagaaaacacctttaagttgcctttcctctttgtagttagcgttcaggcaggtgacgtgtggaaagtctagggggttccattctggccatgcgagcccagctcctaccaacgtcggtaacttgagcagtccctgttgctggccagagactgcctggtcgccagcgctcaccatgggtgccaggatgcttcgcagaggcactgtgctcacggttggacttggtgtcagtgggaaagggcagtgtggggactgtcatttttgtgatttaataacacmcagtgaaaatccaggaagaatgaattaagcttcttctgggagttgtttattcctgctcgtgcttaagattgatgatttcgtgaaataaagaacatcatttcatttaagagatcatttcattaagatctctaatctgttttgagtctttacaaaatagccagttataaaatggggcttgatttgtttagactgaaggaagacgttttcccaaaaaaattgcctaaaatgcagtgtaataaataatctctgtaccaaatagtaatttaaatggggtaattttctgcaaggaaaatgtactgtttttatgtttccaaccctcttgaattaaaataaaaacaacttcttttcta

SEQ ID NO: 3867 - DNA, 4976 bp, Homo sapiens
ggagcgggagggaaggagcgaaggagcgaaggagcaagcggagcggccgtcgcccaagccaagccgcgctgccaaccctcccgcccgcccgcgctcctgtccgccgtgtctagcagcggggcccagcatggtcatggcggatggcccgaggcacttgcagcgcgggccggtccgggtggggttctacgacatcgagggcacgctgggcaagggcaacttcgctgtggtgaagctggggcggcaccggatcaccaagacggaggtggcaataaaaataatcgataagtctcagctggatgcagtgaaccttgagaaaatctaccgagaagtacaaataatgaaaatgttagaccaccctcacataatcaaactttatcagactatcttgctaatcatggccggttaaatgagtctgaagccaggcgaaaattctggcaaatcctgtctgctgttgattattgtcatggtcggaagattgtgcaccgtgacctcaaagctgaaaatctcctgctggataacaacatgaatatcaaaatagcagatttcggttttggaaatttctttaaaagtggtgaactgctggcaacatggtgtggcagccccccttatgcagccccagaagtctttgaagggcagcagtatgaaggaccacagctggacatctggagtatgggagttgttctttatgtccttgtctgtggagctctgccctttgatggaccgactcttccaattttgaggcagagggttctggaaggaagattccggattccgtatttcatgtcagaagattgcgagcaccttatccgaaggatgttggtcctagacccatccaaacggctaaccatagcccaaatcaaggagcataaatggatgctcatagaagttcctgtccagagacctgttctctatccacaagagcaagaaaatgagccatccatcggggagtttaatgagcaggttctgcgactgatgcacagccttggaatagatcagcagaaaaccattgagtctttgcagaacaagagctataaccactttgctgccatttatttcttgttggtggagcgcctgaaatcacatcggagcagtttcccagtggagcagagacttgatggccgccagcgtcggcctagcaccattgctgagcaaacagttgccaaggcacagactgtggggctcccagtgaccatgcattcaccgaacatgaggctgctgcgatctgccctcctcccccaggcatccaacgtggaggccttttcatttccagcatctggctgtcaggcggaagctgcattcatggaagaagagtgtgtggacactccaaaggtcaatggctgtctgcttgaccctgtgcctcctgtcctggtgcggaagggatgccagtcactgcccagcaacatgatggagacctccattgacgaagggctggagacagaaggagaggccgaggaagaccccgctcatgcctttgaggcatttcagtccacacgcagcgggcagagacggcacactctgtcagaagtgaccaatcaactggtcgtgatgcctggggcagggaaaattttctccatgaatgacagcccctcccttgacagtgtggactctgagtatgatatggggtctgttcagagggacctgaactttctggaagacaacccttcccttaaggacatcatgttagccaatcagccttcaccccgcatgacatctcccttcataagcctgagacctaccaacccagccatgcaggctctgagctcccagaaacgagaggtccacaacaggtctccagtgagcttcagagagggccgcagagcatcagatacctccctcacccagggaattgtagcatttagacaacatcttcagaatctggctagaaccaaaggaattctagagttgaacaaagtgcagttgttgtatgaacaaataggaccggaggcagaccctaacctggcgccggcggctcctcagctccaggaccttgctagcagctgccctcaggaagaagtttctcagcagcaggaaagcgtctccactctccctgccagcgtgcatccccagctgtccccacggcagagcctggagacccagtacctgcagcacagactccagaagcccagccttctgtcaaaggcccagaacacctgtcagctttattgcaaagaaccaccrcggagccttgagcagcagctgcaggaacataggctccagcagaagcgactctttcttcagaagcagtctcaactgcaggcctattttaatcagatgcagatagcagagagctcctacccacagccaagtcagcagctgccccttccccgccaggagactccaccgccttctcagcaggccccaccgttcagcctgacccagcccctgagccccgtcctggagccttcctccgagcagatgcaatacagccctttcctcagccagtaccaagagatgcagcttcagcccctgccctccacttccggtccccgggctgctcctcctctgcccacrcagctacagcagcagcagccgccaccgccaccaccccctccaccaccacgacagccaggagctgccccagcccccttacagttctcctatcagacttgtgagctgccaagcgctgcttcccctgcgccagactatcccactccctgtcagtatcctgtggatggagcccagcagagcgacctaacggggccagactgtcccagaagcccaggactgcaagaggccccctccagctacgacccactagccctctctgagctacctggactctttgattgtgaaatgctagacgctgtggatccacaacacaacgggtatgtcctggtgaattagtctcagcacaggaattgaggtgggtcaggtgaaggaagagtgtatgttcctatttttattccagccttttaaatttaaagcttattttcttgccctctccctaacggggagaaatcgagccacccaactggaatcagagggtctggctggggtggatgttgcttcctcctggttctgccccaccacaaagttttctgtggcaagtgctggaacatagttgtaggctgaggctcctgcccttcggtcgagtggagcaagctctcgagggcagcactgacaaatgtgttcctaagaagacattcagacccaggtsttatgcaggattacatccgtttrttatcaagggcaaccttggtgaaagcagaaagggtgtgtgctattgcatatatatgggggaaaaggcaatatatttttcactgaagctgagcaaccacatattgctacaaggcaaatcaagaagacatcaggaaatcagatgcacaggaaataaaggaaagctgtgctttgtcattgaatcctaagttcttagctgctgatgcaagttgtcccccaaggccatcacaaagcagtggggcatgagctgtgtttcaggggccactaaataacagctggtactgaccccagaaaccrccttcatctccattcggaagcaggtgacacaccccttcagaaggtgccctgggttgccgagtgtcagaatatactcaggactccagaggtgtcacacgtggaactgacaggagacccgccaccgtggaggcagggggcaagaaactcaagaacgcatcaagagcaccagccctgggccagggaagacaggctcttcctgcagtttctcgtggacactgctggcttgcgggcagtcggtctccagggtacctgttgtctcttttccgatgtaataactactttgaccttacactatatgttgctagtagtttattgagctttgtatatttggacagtttcatatagggcttagagattttaaggacatgataaatgaacttttctgtcccatgtgaagtggtagtgcggtgcctttcccccagatcatgctttaattctttcttttctgtagaaaccaacagtttccatttatgtcaatgctaaatccaaagtcacttcagagtttgttttccaccatgtgggaatcagcattcttaatttcgttaaagttttgacttgtaatgaaatgttcaagtattacagcaatattcaaagaaagaaccacagatgtgttaaccatttaagcagatcatctgccaaacattatattactaataaaacttaaccaacacttacaattcagtcatcaaagtaagtaaaaattagatgctacagctagctaactgtatccctagaaatgatgaataatttgccatttggacagttaacatccaggtgttacaaagtcagtgttaattctaaagatgatcatttctgccctttagaatggcttgtcccatcagcagatgaatgtgttaagcacaaagcatcttccttaaagcacaaagagagggactaactgatgctgcatctagaaaacacctttaagttgcctttcctctttgtagttagcgttcaggcaggtgacgtgtggaaagtctagggggttccattctggccatgcgagcccagctcctaccaacgtcggtaacttgagcagtccctgttgctggccagagactgcctggtcgccagcgctcaccatgggtgccaggatgcttcgcagaggcactgtgctcacggttggacttggtgtcagtgggaaagggcagtgtggggactgtcatttttgtgatttaataacacmcagtgaaaatccaggaagaatgaattaagcttcttctgggagttgtttattcctgctcgtgcttaagattgatgatttcgtgaaataaagaacatcatttcatttaagagatcatttcattaagatctctaatctgttttgagtctttacaaaatagccagttataaaatggggcttgatttgtttagactgaaggaagacgttttcccaaaatatactacagaagtgctacaatatttgcgatattaaaatgcctgcagattgaaaatgggggccactcatttcagaactgcaggaatggtgtagttacagatcg

SEQ ID NO: 3868 - DNA, 2134 bp, Homo sapiens
cacccagaggctgatgctcaccatggggcgcctgcaactggttgtgttgggcctcacctgctgctgggcagtggcgagtgccgcgaagctgggcgccgtgtacacagaaggtgggttcgtggaaggcgtcaataagaagctcggcctcctgggtgactctgtggacatcttcaagggcatccccttcgcagctcccaccaaggccctggaaaatcctcagccacatcctggctggcaagggaccctgaaggccaagaacttcaagaagagatgcctgcaggccaccatcacccaggacagcacctacggggatgaagactgcctgtacctcaacatttgggtgccccagggcaggaagcaaggcacctgctgcacagggacaggggaccggctggagacagggccaggcggggcgtctggggtcaccagccgctcccccatctcagtctcccgggacctgcccgttatgatctggatctatggaggcgccttcctcatggggtccggccatggggccaacttcctcaacaactacctgtatgacggcgaggagatcgccacacgcggaaacgtcatcgtggtcaccttcaactaccgtgtcggcccccttgggttcctcagcactggggacgccaatctgccaggtaactatggccttcgggatcagcacatggccattgcttgggtgaagaggaatatcgcggccttcgggggggaccccaacaacatcacgctcttcggggagtctgctggaggtgccagcgtctctctgcagaccctctccccctacaacaagggcctcatccggcgagccatcagccagagcggcgtggccctgagtccctgggtcatccagaaaaacccactcttctgggccaaaaaggtggctgagaaggtgggttgccctgtgggtgatgccgccaggatggcccagtgtctgaaggttactgatccccgagccctgacgctggcctataaggtgccgctggcaggcctggagtaccccatgctgcactatgtgggcttcgtccctgtcattgatggagacttcatccccgctgacccgatcaacctgtacgccaacgccgccgacatcgactatatagcaggcaccaacaacatggacggccacatcttcgccagcatcgacatgcctgccatcaacaagggcaacaagaaagtcacggaggaggacttctacaagctggtcagtgagttcacaatcaccaaggggctcagaggcgccaagacgacctttgatgtctacaccgagtcctgggcccaggacccatcccaggagaataagaagaagactgtggtggactttgagaccgatgtcctcttcctggtgcccaccgagattgccctagcccagcacagagccaatgccaagagtgccaagacctacgcctacctgttttcccatccctctcggatgcccgtctaccccaaatgggtgggggccgaccatrsagatgasatycagtacgttttcgggragcccttcgccacccccacgggctaccggccccaagacaggacagtctctaaggccatgatcgcctactggaccaactttgccaaaacaggggaccccaacatgggcgactcggctgtgcccacacactgggaaccctacactacggaaaacagcggctacctggagatcaccaagaagatgggcagcagctccatgaagcggagcctgagaaccaacttcctgcgctactggaccctcacctatctggcgctgcccacagtgaccgaccaggaggccacccctgtgccccccacaggggactccgaggccactccygtgccccccacgggtgactccgagaccgcccccgtgccgcccacgggtgactccggggccccccccgtgccgcccacgggtgactccggggccccccccgtgccgcccacgggtgactccggggccccccccgtgccgcccacgggtgactccggggccccccccgtgccgcccacgggtgactccggggccccccccgtgccgcccacgggtgactccggsgccccccccgtgccgcccacgggtgaykccggcsccccccccgtgccgcccacggatgactccaaggaagctcagatgcctgcagtcattaggttt

SEQ ID NO: 3869 - DNA, 2349 bp, Homo sapiens
cacccagaggctgatgctcaccatggggcgcctgcaactggttgtgttgggcctcacctgctgctgggcagtggcgagtgccgcgaagctgggcgccgtgtacacagaaggtgggttcgtggaaggcgtcaataagaagctcggcctcctgggtgactctgtggacatcttcaagggcatccccttcgcagctcccaccaaggccctggaaaatcctcagccacatcctggctggcaagggaccctgaaggccaagaacttcaagaagagatgcctgcaggccaccatcacccaggacagcacctacggggatgaagactgcctgtacctcaacatttgggtgccccagggcaggaagcaagtctcccgggacctgcccgttatgatctggatctatggaggcgccttcctcatggggtccggccatggggccaacttcctcaacaactacctgtatgacggcgaggagatcgccacacgcggaaacgtcatcgtggtcaccttcaactaccgtgtcggcccccttgggttcctcagcactggggacgccaatctgccaggtaactatggccttcgggatcagcacatggccattgcttgggtgaagaggaatatcgcggccttcgggggggaccccaacaacatcacgctcttcggggagtctgctggaggtgccagcgtctctctgcagaccctctccccctacaacaagggcctcatccggcgagccatcagccagagcggcgtggccctgagtccctgggtcatccagaaaaacccactcttctgggccaaaaaggtggctgagaaggtgggttgccctgtgggtgatgccgccaggatggcccagtgtctgaaggttactgatccccgagccctgacgctggcctataaggtgccgctggcaggcctggagtaccccatgctgcactatgtgggcttcgtccctgtcattgatggagacttcatccccgctgacccgatcaacctgtacgccaacgccgccgacatcgactatatagcaggcaccaacaacatggacggccacatcttcgccagcatcgacatgcctgccatcaacaagggcaacaagaaagtcacggaggaggacttctacaagctggtcagtgagttcacaatcaccaaggggctcagaggcgccaagacgacctttgatgtctacaccgagtcctgggcccaggacccatcccaggagaataagaagaagactgtggtggactttgagaccgatgtcctcttcctggtgcccaccgagattgccctagcccagcacagagccaatgccaagagtgccaagacctacgcctacctgttttcccatccctctcggatgcccgtctaccccaaatgggtgggggccgaccatrsagatgasatycagtacgttttcgggragcccttcgccacccccacgggctaccggccccaagacaggacagtctctaaggccatgatcgcctactggaccaactttgccaaaacaggggaccccaacatgggcgactcggctgtgcccacacactgggaaccctacactacggaaaacagcggctacctggagatcaccaagaagatgggcagcagctccatgaagcggagcctgagaaccaacttcctgcgctactggaccctcacctatctggcgctgcccacagtgaccgaccaggaggccacccctgtgccccccacaggggactccgaggccactccygtgccccccacgggtgactccgagaccgcccccgtgccgcccacgggtgactccggggccccccccgtgccgcccacgggtgactccggggccccccccgtgccgcccacgggtgactccggggccccccccgtgccgcccacgggtgactccggggccccccccgtgccgcccacgggtgactccggggccccccccgtgccgcccacgggtgactccggsgccccccccgtgccgcccacgggtgaykccggcsccccccccgtgccgcccacgggtgacgccgggsccccccccgtgccgcccacgggtgackccggcgccccccccgtgccgcccacgggtgactccggggccccccccgtgacccccacgggtgactccgagaccgcccccgtgccgcccacgggtgactccggggccccccctgtgccccccacgggtgactctgaggctgcccctgtgccccccacagatgactccaaggaagctcagatgcctgcagtcattaggttttagcgtcccatgagccttggtatcaagaggccacaagagtgggaccccaggggctcccctcccatcttgagctcttcctgaataaagcctcatacccctgt

SEQ ID NO: 3870 - DNA, 1119 bp, Homo sapiens
cacccagaggctgatgctcaccatggggcgcctgcaactggttgtgttgggcctcacctgctgctgggcagtggcgagtgcygcgaagaccccatgctgcactatgtgggcttcgtccctgtcattgatggagacttcatccccgctgacccgatcaacctgtacgccaacgccgccgacatcgactatatagcaggcaccaacaacatggacggccacatcttcgccagcatcgacatgcctgccatcaacaagggcaacaagaaagtcacggaggaggacttctacaagctggtcagtgagttcacaatcaccaaggggctcagaggcgccaagacgacctttgatgtctacaccgagtcctgggcccaggacccatcccaggagaataagaagaagactgtggtggactttgagaccgatgtcctcttcctggtgcccaccgagattgccctagcccagcacagagccaatgccaagagtgccaagacctacgcctacctgttttcccatccctctcggatgcccgtctaccccaaatgggtgggggccgaccatrsagatgasatccagtacatctttgggragccctttgccaccccactccgggctaccggccccragacaggayagtctctaaggcyatgaccgcctactggaccaactttgccaaaacaggggaccccaacatgggcsactcggctgtgcccacacactgggaaccctacactacggaaaacagcggctacctggagatcaccaagaagatgggcagcagctccatgaagcggagcctgagaaccaacttcctgcgctactggaccctcacctatctggcgctgcccacagtgaccgaccaggaggccagttccatgccctccacaggggactctgaggccactcccrtctcccccgacaggcaactccgagtctgcccccgtccctgcaacgggtgactctcaggatgcccctgtgcccctcacaagtgactctgaggctgcccccgtgyccccctyaggtgactctgaggctcccccgtaycccctacgggtgactctgaggcccgtgcccaccttgggtgactctgaggccgcccctgtgtcccccacagatgactcc

SEQ ID NO: 3871 - DNA, 1216 bp, Homo sapiens
cacccagaggctgatgctcaccatggggcgcctgcaactggttgtgttgggcctcacctgctgctgggcagtggcgagtgcygcgaagaccccatgctgcactatgtgggcttcgtccctgtcattgatggagacttcatccccgctgacccgatcaacctgtacgccaacgccgccgacatcgactatatagcaggcaccaacaacatggacggccacatcttcgccagcatcgacatgcctgccatcaacaagggcaacaagaaagtcacggaggaggacttctacaagctggtcagtgagttcacaatcaccaaggggctcagaggcgccaagacgacctttgatgtctacaccgagtcctgggcccaggacccatcccaggagaataagaagaagactgtggtggactttgagaccgatgtcctcttcctggtgcccaccgagattgccctagcccagcacagagccaatgccaagagtgccaagacctacgcctacctgttttcccatccctctcggatgcccgtctaccccaaatgggtgggggccgaccatrsagatgasatccagtacatctttgggragccctttgccaccccactccgggctaccggccccragacaggayagtctctaaggcyatgaccgcctactggaccaactttgccaaaacaggggaccccaacatgggcsactcggctgtgcccacacactgggaaccctacactacggaaaacagcggctacctggagatcaccaagaagatgggcagcagctccatgaagcggagcctgagaaccaacttcctgcgctactggaccctcacctatctggcgctgcccacagtgaccgaccaggaggccagttccatgccctccacaggggactctgaggccactcccrtctcccccgacaggcaactccgagtctgcccccgtccctgcaacgggtgactctcaggatgcccctgtgcccctcacaagtgactctgaggctcccccgtaycccctacgggtgactctgaggcccgtgcccaccttgggtgactctgaggccgcccctgtgtcccccacagatgactccgaggaagctcagatgctgcagtcattagtttctagtgtcccatcagccttggtctcaagaggccgagagggtgcaaccccaggggctcccctcccatcttgagctcttcctgaataaaacctcattcccc

SEQ ID NO: 3872 - DNA, 1216 bp, Homo sapiens; identical to SEQ ID NO: 3871

SEQ ID NO: 3873 - DNA, 1436 bp, Homo sapiens
ctttcctttctctctcctccygccgcccaaratggtgagtgagctgtagttccgtggcactatagccrggttccggctgtatccgctgccatcctcctccaggcgcggcctcggagggcctcctgctcctcctggcgctaggagagccccactcggtgtggcacggagacaccgaggtggattagagccccacttgccgaaaggaaagaaggccaagggaaagaaggtggctccggccccagctgtcgtgaagaagcaggaggctaagaaagtggtgaatcccctgtttgagaaaaggcctaagaattttggcattggacaggacatccagcccaaaagagacctcacccgctttgtgaaatggccccgctatatcaggttgcagcggcagagagccatcctctataagcggctgaaagtgcctcctgcgattaaccagttcacccaggccctggaccgccaaacagctactcagctgcttaagctggcccacaagtacagaccagagacaaagcaagagaagaagcagagactgttggcccgggccgagaagaaggctgctggcaaaggggacgtcccaacraagagaccacctgtccttcgagcaggagttaacaccgtcaccaccttggtggagaacaagaaagctcagctggtggtgattgcacacgacgtggatcccatcgagctggttgtcttcttgcctgccctgtgtcgtaaaatgggggtcccttactgcattatcaagggaaaggcaagactgggacgtctagtccacaggaagacctgcaccactgtcgccttcacacaggtgaactcggaagacaaaggcgctttggctaagctggtggaagctatcaggaccaattacaatgacagatacgatgagatccgccgtcactggggtggcaatgtcctgggtcctaagtctgtggctcgtatcgccaagctcgaaaaggcaaaggctaaagaacttgccactaaactgggttaaatgtacactgttgagttttctgtacataaaaataattgaaataatacaaattttccttcagccagtgtctgttgagtatctcgggttgaatcttacttggggttagcaagtatctttttgagacacagcctcactctgtcgcccaggctggagtgcagtggtgtgatgtcaaagcaaccttmgcctcccaggtttaggatattctggtgcctcagcatcccaactggctggcccatatttgtgtttttggtagagatggggtttcaccatgttagccaggctggtctgagctcctgaccgcacccggcccttcccacccttaaatacattcttaaaccaggcattttgttccctagagatgtaacttgmrtatcaagttttgggaaagttctttggactgaaaccaagccaggattttatgatgaaccrgtcatgagctcat

SEQ ID NO: 3874 - DNA, 1570 bp, Homo sapiens
atggtgagtgagctgtagttccgtggcactatagccrggttccggctgtatccgctgccatcctcctccaggcgcggcctcggagggcctcctgctcctcctggcgctaggagagccccactcggtgtggcacggagacaccgaggtggattagagccccacttggtgtggcacggagacattgagatggactagagccccgggcggccgagagcggaatgcgttgttcccggtgtcgcagggctgggtgtcgcaggsctggagcaccgcagtgcggggctcggagccctagcgtctctygggcttgctgggggccgctccagaggccttccgaaaggaaagaaggccaagggaaagaaggtggctccggccccagctgtcgtgaagaagcaggaggctaagaaagtggtgaatcccctgtttgagaaaaggcctaagaattttggcattggacaggacatccagcccaaaagagacctcacccgctttgtgaaatggccccgctatatcaggttgcagcggcagagagccatcctctataagcggctgaaagtgcctcctgcgattaaccagttcacccaggccctggaccgccaaacagctactcagctgcttaagctggcccacaagtacagaccagagacaaagcaagagaagaagcagagactgttggcccgggccgagaagaaggctgctggcaaaggggacgtcccaacraagagaccacctgtccttcgagcaggagttaacaccgtcaccaccttggtggagaacaagaaagctcagctggtggtgattgcacacgacgtggatcccatcgagctggttgtcttcttgcctgccctgtgtcgtaaaatgggggtcccttactgcattatcaagggaaaggcaagactgggacgtctagtccacaggaagacctgcaccactgtcgccttcacacaggtgaactcggaagacaaaggcgctttggctaagctggtggaagctatcaggaccaattacaatgacagatacgatgagatccgccgtcactggggtggcaatgtcctgggtcctaagtctgtggctcgtatcgccaagctcgaaaaggcaaaggctaaagaacttgccactaaactgggttaaatgtacactgttgagttttctgtacataaaaataattgaaataatacaaattttccttcagccagtgtctgttgagtatctcgggttgaatcttacttggggttagcaagtatctttttgagacacagcctcactctgtcgcccaggctggagtgcagtggtgtgatgtcaaagcaaccttmgcctcccaggtttaggatattctggtgcctcagcatcccaactggctggcccatatttgtgtttttggtagagatggggtttcaccatgttagccaggctggtctgagctcctgaccgcacccggcccttcccacccttaaatacattcttaaaccaggcattttgttccctagagatgtaacttgmrtatcaagttttgggaaagttctttggactgaaaccaagccaggattttatgatgaaccrgtcatgagctcat

SEQ ID NO: 3875 - DNA, 1271 bp, Homo sapiens
ctttcctttctctctcctccygccgcccaaratgccgaaaggaaagaaggccaagggaaagaaggtggctccggccccagctgtcgtgaagaagcaggaggctaagaaagtggtgaatcccctgtttgagaaaaggcctaagaattttggcattggacaggacatccagcccaaaagagacctcacccgctttgtgaaatggccccgctatatcaggttgcagcggcagagagccatcctctataagcggctgaaagtgcctcctgcgattaaccagttcacccaggccctggaccgccaaacaggtgagctgcttaagctggcccacaagtacagaccagagacaaagcaagagaagaagcagagactgttggcccgggccgagaagaaggctgctggcaaaggggacgtcccaacraagagaccacctgtccttcgagcaggagttaacaccgtcaccaccttggtggagaacaagaaagctcagctggtggtgattgcacacgacgtggatcccatcgagctggttgtcttcttgcctgccctgtgtcgtaaaatgggggtcccttactgcattatcaagggaaaggcaagactgggacgtctagtccacaggaagacctgcaccactgtcgccttcacacaggtgaactcggaagacaaaggcgctttggctaagctggtggaagctatcaggaccaattacaatgacagatacgatgagatccgccgtcactggggtggcaatgtcctgggtcctaagtctgtggctcgtatcgccaagctcgaaaaggcaaaggctaaagaacttgccactaaactgggttaaatgtacactgttgagttttctgtacataaaaataattgaaataatacaaattttccttcagccagtgtctgttgagtatctcgggttgaatcttacttggggttagcaagtatctttttgagacacagcctcactctgtcgcccaggctggagtgcagtggtgtgatgtcaaagcaaccttmgcctcccaggtttaggatattctggtgcctcagcatcccaactggctggcccatatttgtgtttttggtagagatggggtttcaccatgttagccaggctggtctgagctcctgaccgcacccggcccttcccacccttaaatacattcttaaaccaggcattttgttccctagagatgtaacttgmrtatcaagttttgggaaagttctttggactgaaaccaagccaggattttatgatgaaccrgtcatgagctcat

SEQ ID NO: 3876 - DNA, 1274 bp, Homo sapiens
ctttcctttctctctcctccygccgcccaaratgccgaaaggaaagaaggccaagggaaagaaggtggctccggccccagctgtcgtgaagaagcaggaggctaagaaagtggtgaatcccctgtttgagaaaaggcctaagaattttggcattggacaggacatccagcccaaaagagacctcacccgctttgtgaaatggccccgctatatcaggttgcagcggcagagagccatcctctataagcggctgaaagtgcctcctgcgattaaccagttcacccaggccctggaccgccaaacagctactcagctgcttaagctggcccacaagtacagaccagagacaaagcaagagaagaagcagagactgttggcccgggccgagaagaaggctgctggcaaaggggacgtcccaacraagagaccacctgtccttcgagcaggagttaacaccgtcaccaccttggtggagaacaagaaagctcagctggtggtgattgcacacgacgtggatcccatcgagctggttgtcttcttgcctgccctgtgtcgtaaaatgggggtcccttactgcattatcaagggaaaggcaagactgggacgtctagtccacaggaagacctgcaccactgtcgccttcacacaggtgaactcggaagacaaaggcgctttggctaagctggtggaagctatcaggaccaattacaatgacagatacgatgagatccgccgtcactggggtggcaatgtcctgggtcctaagtctgtggctcgtatcgccaagctcgaaaaggcaaaggctaaagaacttgccactaaactgggttaaatgtacactgttgagttttctgtacataaaaataattgaaataatacaaattttccttcagccagtgtctgttgagtatctcgggttgaatcttacttggggttagcaagtatctttttgagacacagcctcactctgtcgcccaggctggagtgcagtggtgtgatgtcaaagcaaccttmgcctcccaggtttaggatattctggtgcctcagcatcccaactggctggcccatatttgtgtttttggtagagatggggtttcaccatgttagccaggctggtctgagctcctgaccgcacccggcccttcccacccttaaatacattcttaaaccaggcattttgttccctagagatgtaacttgmrtatcaagttttgggaaagttctttggactgaaaccaagccaggattttatgatgaaccrgtcatgagctcat

SEQ ID NO: 3877 - DNA, 1380 bp, Homo sapiens
ctttcctttctctctcctccygccgcccaaratgccgaaaggaaagaaggccaagggaaagaaggtggctccggccccagctgtcgtgaagaagcaggaggctaagaaagtggtgaatcccctgtttgagaaaaggcctaagaattttggcattggacaggacatccagcccaaaagagacctcacccgctttgtgaaatggccccgctatatcaggttgcagcggcagagagccatcctctataagcggctgaaagtgcctcctgcgattaaccagttcacccaggccctggaccgccaaacagctactcagctgcttaagctggcccacaagtacagaccagagacaaagcaagagaagaagcagagactgttggcccgggccgagaagaaggctgctggcaaaggggacgtcccaacraagagaccacctgtccttcgagcaggagttaacaccgtcaccaccttggtggagaacaagaaagctcagctggtggtgattgcacacgacgtggatcccatcgagctggttgtcttcttgcctgccctgtgtcgtaaaatgggggtgaactcggaagacaaaggcgctttggctaagctggtggaagctatcaggaccaattacaatgacagatacgatgaggtaagaggcagctttacaccaaaatactgtcrttcacaaatctttctcccaaataactggctggcttaacctatgagaagttctatctgacgatcagcttggaacagccaaacagaattaacgcaactaataaccttgaaaatctcagaaaacartaagccaagctaactgcctctttttgtcttttcagatccgccgtcactggggtggcaatgtcctgggtcctaagtctgtggctcgtatcgccaagctcgaaaaggcaaaggctaaagaacttgccactaaactgggttaaatgtacactgttgagttttctgtacataaaaataattgaaataatacaaattttccttcagccagtgtctgttgagtatctcgggttgaatcttacttggggttagcaagtatctttttgagacacagcctcactctgtcgcccaggctggagtgcagtggtgtgatgtcaaagcaaccttmgcctcccaggtttaggatattctggtgcctcagcatcccaactggctggcccatatttgtgtttttggtagagatggggtttcaccatgttagccaggctggtctgagctcctgaccgcacccggcccttcccacccttaaatacattcttaaaccaggcattttgttccctagagatgtaacttgmrtatcaagttttgggaaagttctttggactgaaaccaagccaggattttatgatgaaccrgtcatgagctcat

SEQ ID NO: 3878 - DNA, 2333 bp, Homo sapiens
ggaaaccaacagcggcctaggggtgaaaggacagccagggttagatgttctgaggaggcgggagcaaccgagagagcacgtgagcatctgtcctttctacccgttcctctttatctttagtgttcagtagcagcggggatagcccggggcccggtgtatggccacrgagttacagtgtccggactccatgccctgtcacaaccagcaagtaaactctgcctcaaccccaagtcccgagcagctgcgacctggcgatctgatcctggaccacgcagggggaaacagagcctccagggccaaggtgattctcctcacggggtacgcccattctagcctgccggccgagctggactctggggcctgcggcggctccagcctcaactcagagggcaacagtggtagtggtgacagtagcagctatgacgcaccagctggcaactccttcctagaggactgcgaactctcccggcagatcggggcgcagcttaagctgctgcctatgaatgatcagatacgggagctacagaccatcatccgkgacaagacagccagtagaggtgacttcatgttttctgcggatcgtttgatcagacttgttgtggaagagggattgaatcagctgccatataaagaatgcatggtgaccactccaacagggtacaagtatgaaggagtgaaatttgagaagggaaattgtggggtcagcataatgagaagcggtgaggcaatggaacaaggtttacgagactgctgtcgatccatacgaattggaaagatcctgattcagagtgatgaggagacacaaagagccaaagtatattatgccaaattccccccagacatttaccggagaaaagtccttctgatgtatccaattctcagcactggaaatactgtaattgaagctgtaaaggttcttatagaacatggagttcaacccagtgttatcatcctactcagtctgttctccactcctcatggtgccaaatcaatcattcaggagtttccagagatcacaattttaactactgaagttcatcctgttgcacctacacattttggacagaaatactttggaacagactaagttatttaagtaaaataattrtcttatgtaatattacaatcatgttttgattttctatttgttttactgattcacttgagggtggcagagaaaaatgtgttaaaatgctttttagttttggaagtgggtatatttgaggttatatctcatttrgttatttgtttactgttggcaccgaattcaacaatgaagtatatgcaactcttacaaaacataaattttaataatattctaatgcaaattactgaaccctcagtgcattaaaattatttcctaatttatgagcctcttagtttggaggttgcttgaagccacaaataaaactcaaatgagagtcagttctttgtcccactgtagtttgcattttgtttagtttggttttagctctactaaggtttcacatatgtggctattgccacattcctctactgttttctttctgatactggacatgctagtaacttggagaggagaataaaagaatgtctcctggaattttacattcccattaatgtcctcattcagttggcagacctaggatgtatggttaactctcaggccattatgtttttcatggctcatttcccaaactgcattgttggtaggtgccttgctaagctgtaatgcagtgaagaagatggtggggcatttttagtaattggaactgtaacattaatttacaagattgaaccggggatgtctggatgctgacaagggagagccaagtactgttaatgccatcaatcctctaggaaggaattggtggtttttctgaagtgtgggggaaagggtggtttcttgctggatttcatggccagtaagtaaatttaaatgcttcatttttaatttggatgtttctgctagagacctttgatttggaaattagttattttgcatgtttgtcaactgtatatgtatgaaaatagaaaaaaaccatgctttttgtaaaaacccctaagatttgtatatgttcatctttaggcttctgaaagggagagaaatcatattggaaatcagtgttggtgttctgaaatctgcttgtaaaactctcatctcattttacattgatattaaaacattttaacagtgttggctagctgattacttgattaattatactcccatggccccataggaagctgttgtgggcctctgttcaaaagcacagaaaagagcagaaggaaatgtcttagaaagaatcaaagctgatgaaatcagcaaagattgggggaaaggaaggaagcct

SEQ ID NO: 3879 - DNA, 1073 bp, Homo sapiens
ggaaaccaacagcggcctaggggtgaaaggacagccagggttagatgttctgaggaggcgggagcaaccgagagagcacgtgagcatctgtcctttctacccgttcctctttatctttagtgttcagtagcagcggggatagcccggggcccggtgtatggccacrgagttacagtgtccggactccatgccctgtcacaaccagcaagtaaactctgcctcaaccccaagtcccgagcagctgcgacctggcgatctgatcctggaccacgcagggggaaacagagcctccagggccaaggtgattctcctcacggggtacgcccattctagcctgccggccgagctggactctggggcctgcggcggctccagcctcaactcagagggcaacagtggtagtggtgacagtagcagctatgacgcaccagctggcaactccttcctagaggactgcgaactctcccggcagatcggggcgcagcttaagctgctgcctatgaatgatcagatacgggagctacagaccatcatccgkgacaagacagccagtagaggtgacttcatgttttctgcggatcgtttgatcagacttgttgtggaagagggattgaatcagctgccatataaagaatgcatggtgaccactccaacagggtacaagtatgaaggagtgaaatttgagaagggaaattgtggggtcagcataatgagaagcggtgaggcaatggaacaaggtttacgagactgctgtcgatccatacgaattggaaagatcctgattcagagtgatgaggagacacaaagagccaaagtatattatgccaaattccccccagacatttaccggagaaaagtccttctgatgtatccaattctcagcactggaaatactgtaattgaagctgtaaaggttcttatagaacatggagttcaacccagtgttatcatcctactcagtctgttctccactcctcatggtgagttcagcatgaggcagtaactagggctccatatagtcctgaggtgggtgccaaatcaatcattcaggagtttccagagatcacaatttt

SEQ ID NO: 3880 - DNA, 2077 bp, Homo sapiens
gtcttttgtccctcggcggacaccgtttgccagccaaagctatgtctgcgcgctcaccgacttcatagggtgccgaattcttttttccccaggcttgccatggctagtcgaggggctcggcagcgcctgaagggcagcggggccagcagtggggatacggccccggctgcggacaagctgcgggagctgctgggcagccgagaggcgggcggcgcggagcaccggaccgagttatctgggaacaaagcaggacaagtctgggcacctgaaggatctactgctttcaagtgtctgctttcagcaaggttatgtgctgctctcctgagcaacatctctgactgtgatgaaacattcaactactgggagccaacacactacctcatctatggggaagggtttcagacttgggaatattccccagcatatgccattcgctcctatgcttacctgttgcttcatgcctggccagctgcatttcatgcaagaattctacaaactaataagattcttgtgttttactttttgcgatgtcttctggcttttgtgagctgtatttgtgaactttacttttacaaggctgtgtgcaagaagtttgggttgcacgtgagtcgaatgatgctagccttcttggttctcagcactggcatgttttgctcatcatcagcattccttcctagtagcttctgtatgtacactacgttgatagccatgactggatggtatatggacaagacttccattgctgtgctgggagtagcagctggggctatcttaggctggccattcagtgcasctcttggtttacccattgcctttgatttgctggtcatgaaacacaggtggaagagtttctttcattggtygctgatggccctcatactatttctggtgcctgtggtggtcattgacagctactattatgggaagttggtgattgcaccactcaacattgttttgtataatrtctttactcctcatggacctgatctttatggtacagaaccctggtatttctatttaattaatggatttctgaatttcaatgtagcctttgctttggctctcctagtcctaccactgacttctcttatggaatacctgctgcagagatttcatgttcagaatttaggccacccgtattggcttaccttggctccaatgtatatttggtttataattttcttcatccagcctcacaaagaggagagatttcttttccctgtgtatccacttatatgtctctgtggcgctgtggctctctctgcacttcagcacagttttctgtacttccagaaatgttaccactttgtgtttcaacgatatcgcctggagcactatactgtgacatcgaattggctggcattaggaactgtcttcctgtttgggctcttgtcattttctcgctctgtggcactgttcagaggatatcacgggccccttgatttgtatccagaattttaccgaattgctacagacccaaccatccacactgtcccagaaggcagacctgtgaatgtctgtgtgggaaaagagtggtatcgatttcccagcagcttccttcttcctgacaattggcagcttcagttcattccatcagagttcagaggtcagttaccaaaaccttttgcagaaggacctctggccacccggattgttcctactgacatgaatgaccagaatctagaagagccatccagatatattgatatcagtaaatgccattatttagtggatttggacaccatgagagaaacaccycgggagccaaaatattcatccaataaagaagaatggatcagcttggcctatagaccattccttgatgcttctagatcttcaaagctgctgcgggcattctatgtccccttcctgtcagatcagtatacagtgtacgtaaactacaccatcctcaaaccccggaaagcaaagcaaatcaggaaraaaagtggargttagcaacacacctgtggccccaaaggacaaccatcttgttaactattgattccagtgacctgactccctgcaagtcatcgcctgtaacatktgtaataaaggtcttctgacatgaatactggaa

SEQ ID NO: 3881 - DNA, 3275 bp, Homo sapiens
cgtaaaacgagcgccacagagaacgcgagccgggagtccgtggaggccatggcccctcggcgcctcctgttggttggggaggggaatttctccttcgccgccgctctgagcgaaaccctggatcagagcrctcaacttaccgccacctgcctccagcgcccggccgagttggctcgggatccactggcctgggagaatctgcagtgcctgcgcgagcgaggtatcgatgtacgtttcggtgtggactgcacccagctggcagatgtctttgaactgcacgagagagaatttgatcaaatttatttcawcttcccgcattgtggacgcaaagctggcgtagctaagaacagggaactgcttgccaaatttttccaaagctgtgcagacgttcttgcagaggaaggagaagtccacgtggcattatgtagaggacaaggtggaactcctgcggataagccccagagagaatggcacaacagttggcaagtggttgccatggcagccctgggggggctcattttaagcgacgtgtatccattcagctgtaaggctgtggcagggtacaagtgcactggatataggagtcaagataagtcctttcatgtagaaggtgctttgaaccatatcttcaccaggagcttacctttygaaggttctcaacccagaatcttcaggatcaaactgggtaaccagtggttttcctttccagaaccagaagcacttgtaggaaagttgaacaggggtttcctggaagcaccttcatgtcatcctatcaaaaccataaatgagaaactcattgctgaattaggcaaagttttcccgctaaaaaggctgaagtgttcctaccctttgctgccacaggaaggtaccagtgttcttcctttctggaattgtgactttctgtcagctgctttttggattagtctccatgaagataactcaaattctgagtccctgactggtgggacatcacaagatgtggaagactttctagtgtcattttcagaacttagccttctcaagaatcctggaagagatggtaaagaagaagcttgtgaaggaacctgtggccaggccaagatctgccttagaccttctctcctagtgcatgttcaggatgtcatcgaagtaccagacttcctctcaggcttgccatggctagtcgaggggctcggcagcgcctgaagggcagcggggccagcagtggggatacggccccggctgcggacaagctgcgggagctgctgggcagccgagaggcgggcggcgcggagcaccggaccgagttatctgggaacaaagcaggacaagtctgggcacctgaaggatctactgctttcaagtgtctgctttcagcaaggttatgtgctgctctcctgagcaacatctctgactgtgatgaaacattcaactactgggagccaacacactacctcatctatggggaagggtttcagacttgggaatattccccagcatatgccattcgctcctatgcttacctgttgcttcatgcctggccagctgcatttcatgcaagaattctacaaactaataagattcttgtgttttactttttgcgatgtcttctggcttttgtgagctgtatttgtgaactttacttttacaaggctgtgtgcaagaagtttgggttgcacgtgagtcgaatgatgctagccttcttggttctcagcactggcatgttttgctcatcatcagcattccttcctagtagcttctgtatgtacactacgttgatagccatgactggatggtatatggacaagacttccattgctgtgctgggagtagcagctggggctatcttaggctggccattcagtgcasctcttggtttacccattgcctttgatttgctggtcatgaaacacaggtggaagagtttctttcattggtygctgatggccctcatactatttctggtgcctgtggtggtcattgacagctactattatgggaagttggtgattgcaccactcaacattgttttgtataatrtctttactcctcatggacctgatctttatggtacagaaccctggtatttctatttaattaatggatttctgaatttcaatgtagcctttgctttggctctcctagtcctaccactgacttctcttatggaatacctgctgcagagatttcatgttcagaatttaggccacccgtattggcttaccttggctccaatgtatatttggtttataattttcttcatccagcctcacaaagaggagagatttcttttccctgtgtatccacttatatgtctctgtggcgctgtggctctctctgcacttcagaaatgttaccactttgtgtttcaacgatatcgcctggagcactatactgtgacatcgaattggctggcattaggaactgtcttcctgtttgggctcttgtcattttctcgctctgtggcactgttcagaggatatcacgggccccttgatttgtatccagaattttaccgaattgctacagacccaaccatccacactgtcccagaaggcagacctgtgaatgtctgtgtgggaaaagagtggtatcgatttcccagcagcttccttcttcctgacaattggcagcttcagttcattccatcagagttcagaggtcagttaccaaaaccttttgcagaaggacctctggccacccggattgttcctactgacatgaatgaccagaatctagaagagccatccagatatattgatatcagtaaatgccattatttagtggatttggacaccatgagagaaacaccycgggagccaaaatattcatccaataaagaagaatggatcagcttggcctatagaccattccttgatgcttctagatcttcaaagctgctgcgggcattctatgtccccttcctgtcagatcagtatacagtgtacgtaaactacaccatcctcaaaccccggaaagcaaagcaaatcaggaaraaaagtggaraccggagaagagcagaaccaacttacaggaagaattgaaaatcctggtactggatggctgtgataagctgttctccacactctggcctggcatctgagaactagcaagcctctcttaggccatatgggcttctccaccaaagctgtttggcagctcctagcagaccttcttattgaaatcctcatgctgaaaatgaacacagcctagttgccaacccacatgtccttttcacctccagcaagactaagcttctttaaagcacttcacaggactaggaccctgtcctggag

SEQ ID NO: 3882 - DNA, 3296 bp, Homo sapiens
cgtaaaacgagcgccacagagaacgcgagccgggagtccgtggaggccatggcccctcggcgcctcctgttggttggggaggggaatttctccttcgccgccgctctgagcgaaaccctggatcagagcrctcaacttaccgccacctgcctccagcgcccggccgagttggctcgggatccactggcctgggagaatctgcagtgcctgcgcgagcgaggtatcgatgtacgtttcggtgtggactgcacccagctggcagatgtctttgaactgcacgagagagaatttgatcaaatttatttcawcttcccgcattgtggacgcaaagctggcgtagctaagaacagggaactgcttgccaaatttttccaaagctgtgcagacgttcttgcagaggaaggagaagtccacgtggcattatgtagaggacaaggtggaactcctgcggataagccccagagagaatggcacaacagttggcaagtggttgccatggcagccctgggggggctcattttaagcgacgtgtatccattcagctgtaaggctgtggcagggtacaagtgcactggatataggagtcaagataagtcctttcatgtagaaggtgctttgaaccatatcttcaccaggagcttacctttygaaggttctcaacccagaatcttcaggatcaaactgggtaaccagtggttttcctttccagaaccagaagcacttgtaggaaagttgaacaggggtttcctggaagcaccttcatgtcatcctatcaaaaccataaatgagaaactcattgctgaattaggcaaagttttcccgctaaaaaggctgaagtgttcctaccctttgctgccacaggaaggtaccagtgttcttcctttctggaattgtgactttctgtcagctgctttttggattagtctccatgaagataactcaaattctgagtccctgactggtgggacatcacaagatgtggaagactttctagtgtcattttcagaacttagccttctcaagaatcctggaagagatggtaaagaagaagcttgtgaaggaacctgtggccaggccaagatctgccttagaccttctctcctagtgcatgttcaggatgtcatcgaagtaccagacttcctctcaggcttgccatggctagtcgaggggctcggcagcgcctgaagggcagcggggccagcagtggggatacggccccggctgcggacaagctgcgggagctgctgggcagccgagaggcgggcggcgcggagcaccggaccgagttatctgggaacaaagcaggacaagtctgggcacctgaaggatctactgctttcaagtgtctgctttcagcaaggttatgtgctgctctcctgagcaacatctctgactgtgatgaaacattcaactactgggagccaacacactacctcatctatggggaagggtttcagacttgggaatattccccagcatatgccattcgctcctatgcttacctgttgcttcatgcctggccagctgcatttcatgcaagaattctacaaactaataagattcttgtgttttactttttgcgatgtcttctggcttttgtgagctgtatttgtgaactttacttttacaaggctgtgtgcaagaagtttgggttgcacgtgagtcgaatgatgctagccttcttggttctcagcactggcatgttttgctcatcatcagcattccttcctagtagcttctgtatgtacactacgttgatagccatgactggatggtatatggacaagacttccattgctgtgctgggagtagcagctggggctatcttaggctggccattcagtgcasctcttggtttacccattgcctttgatttgctggtcatgaaacacaggtggaagagtttctttcattggtygctgatggccctcatactatttctggtgcctgtggtggtcattgacagctactattatgggaagttggtgattgcaccactcaacattgttttgtataatrtctttactcctcatggacctgatctttatggtacagaaccctggtatttctatttaattaatggatttctgaatttcaatgtagcctttgctttggctctcctagtcctaccactgacttctcttatggaatacctgctgcagagatttcatgttcagaatttaggccacccgtattggcttaccttggctccaatgtatatttggtttataattttcttcatccagcctcacaaagaggagagatttcttttccctgtgtatccacttatatgtctctgtggcgctgtggctctctctgcacttcagcacagttttctgtacttccagaaatgttaccactttgtgtttcaacgatatcgcctggagcactatactgtgacatcgaattggctggcattaggaactgtcttcctgtttgggctcttgtcattttctcgctctgtggcactgttcagaggatatcacgggccccttgatttgtatccagaattttaccgaattgctacagacccaaccatccacactgtcccagaaggcagacctgtgaatgtctgtgtgggaaaagagtggtatcgatttcccagcagcttccttcttcctgacaattggcagcttcagttcattccatcagagttcagaggtcagttaccaaaaccttttgcagaaggacctctggccacccggattgttcctactgacatgaatgaccagaatctagaagagccatccagatatattgatatcagtaaatgccattatttagtggatttggacaccatgagagaaacaccycgggagccaaaatattcatccaataaagaagaatggatcagcttggcctatagaccattccttgatgcttctagatcttcaaagctgctgcgggcattctatgtccccttcctgtcagatcagtatacagtgtacgtaaactacaccatcctcaaaccccggaaagcaaagcaaatcaggaaraaaagtggaraccggagaagagcagaaccaacttacaggaagaattgaaaatcctggtactggatggctgtgataagctgttctccacactctggcctggcatctgagaactagcaagcctctcttaggccatatgggcttctccaccaaagctgtttggcagctcctagcagaccttcttattgaaatcctcatgctgaaaatgaacacagcctagttgccaacccacatgtccttttcacctccagcaagactaagcttctttaaagcacttcacaggactaggaccctgtcctggag

SEQ ID NO: 3883 - DNA, 3171 bp, Homo sapiens
cgtaaaacgagcgccacagagaacgcgagccgggagtccgtggaggccatggcccctcggcgcctcctgttggttggggaggggaatttctccttcgccgccgctctgagcgaaaccctggatcagagcrctcaacttaccgccacctgcctccagcgcccggccgagttggctcgggatccactggcctgggagaatctgcagtgcctgcgcgagcgaggtatcgatgtacgtttcggtgtggactgcacccagctggcagatgtctttgaactgcacgagagagaatttgatcaaatttatttcawcttcccgcattgtggacgcaaagctggcgtagctaagaacagggaactgcttgccaaatttttccaaagctgtgcagacgttcttgcagaggaaggagaagtccacgtggcattatgtagaggacaaggtggaactcctgcggataagccccagagagaatggcacaacagttggcaagtggttgccatggcagccctgggggggctcattttaagcgacgtgtatccattcagctgtaaggctgtggcagggtacaagtgcactggatataggagtcaagataagtcctttcatgtagaaggtgctttgaaccatatcttcaccaggagcttacctttygaaggttctcaacccagaatcttcaggatcaaactgggtaaccagtggttttcctttccagaaccagaagcacttgtaggaaagttgaacaggggtttcctggaagcaccttcatgtcatcctatcaaaaccataaatgagaaactcattgctgaattaggcaaagttttcccgctaaaaaggctgaagtgttcctaccctttgctgccacaggaaggtaccagtgttcttcctttctggaattgtgactttctgtcagctgctttttggattagtctccatgaagataactcaaattctgagtccctgactggtgggacatcacaagatgtggaagactttctagtgtcattttcagaacttagccttctcaagaatcctggaagagatggtaaagaagaagcttgtgaaggaacctgtggccaggccaagatctgccttagaccttctctcctagtgcatgttcaggatgtcatcgaagtaccagacttcctctcaggcttgccatggctagtcgaggggctcggcagcgcctgaagggcagcggggccagcagtggggatacggccccggctgcggacaagctgcgggagctgctgggcagccgagaggcgggcggcgcggagcaccggaccgagttatctgggaacaaagcaggacaagtctgggcacctgaaggatctactgctttcaagtgtctgctttcagcaaggttatgtgctgctctcctgagcaacatctctgactgtgatgaaacattcaactactgggagccaacacactacctcatctatggggaagggtttcagacttgggaatattccccagcatatgccattcgctcctatgcttacctgttgcttcatgcctggccagctgcatttcatgcaagaattctacaaactaataagattcttgtgttttactttttgcgatgtcttctggcttttgtgagctgtatttgtgaactttacttttacaaggctgtgtgcaagaagtttgggttgcacgtgagtcgaatgatgctagccttcttggttctcagcactggcatgttttgctcatcatcagtttacccattgcctttgatttgctggtcatgaaacacaggtggaagagtttctttcattggtygctgatggccctcatactatttctggtgcctgtggtggtcattgacagctactattatgggaagttggtgattgcaccactcaacattgttttgtataatrtctttactcctcatggacctgatctttatggtacagaaccctggtatttctatttaattaatggatttctgaatttcaatgtagcctttgctttggctctcctagtcctaccactgacttctcttatggaatacctgctgcagagatttcatgttcagaatttaggccacccgtattggcttaccttggctccaatgtatatttggtttataattttcttcatccagcctcacaaagaggagagatttcttttccctgtgtatccacttatatgtctctgtggcgctgtggctctctctgcacttcagcacagttttctgtacttccagaaatgttaccactttgtgtttcaacgatatcgcctggagcactatactgtgacatcgaattggctggcattaggaactgtcttcctgtttgggctcttgtcattttctcgctctgtggcactgttcagaggatatcacgggccccttgatttgtatccagaattttaccgaattgctacagacccaaccatccacactgtcccagaaggcagacctgtgaatgtctgtgtgggaaaagagtggtatcgatttcccagcagcttccttcttcctgacaattggcagcttcagttcattccatcagagttcagaggtcagttaccaaaaccttttgcagaaggacctctggccacccggattgttcctactgacatgaatgaccagaatctagaagagccatccagatatgtacatttcagattgatatcagtaaatgccattatttagtggatttggacaccatgagagaaacaccycgggagccaaaatattcatccaataaagaagaatggatcagcttggcctatagaccattccttgatgcttctagatcttcaaagctgctgcgggcattctatgtccccttcctgtcagatcagtatacagtgtacgtaaactacaccatcctcaaaccccggaaagcaaagcaaatcaggaaraaaagtggaraccggagaagagcagaaccaacttacaggaagaattgaaaatcctggtactggatggctgtgataagctgttctccacactctggcctggcatctgagaactagcaagcctctcttaggccatatgggcttctccaccaaagctgtttggcagctcctagcagaccttcttattgaaatcctcatgctgaaaatgaacacagcctagttgccaacccacatgtccttttcacctccagcaagactaagcttctttaaagcacttcacaggactaggaccctgtcctggag

SEQ ID NO: 3884 - DNA, 2238 bp, Homo sapiens
cgtaaaacgagcgccacagagaacgcgagccgggagtccgtggaggccatggcccctcggcgcctcctgttggttggggaggggaatttctccttcgccgccgctctgagcgaaaccctggatcagagcrctcaacttaccgccacctgcctccagcgcccggccgagttggctcgggatccactggcctgggagaatctgcagtgcctgcgcgagcgaggtatcgatgtacgtttcggtgtggactgcacccagctggcagatgtctttgaactgcacgagagagaatttgatcaaatttatttcawcttcccgcattgtggacgcaaagctggcgtagctaagaacagggaactgcttgccaaatttttccaaagctgtgcagacgttcttgcagaggaaggagaagtccacgtggcattatgtagaggacaaggtggaactcctgcggataagccccagagagaatggcacaacagttggcaagtggttgccatggcagccctgggggggctcattttaagcgacgtgtatccattcagctgtaaggctgtggcagggtacaagtgcactggatataggagtcaagataagtcctttcatgtagaaggtgctttgaaccatatcttcaccaggagcttacctttygaaggttctcaacccagaatcttcaggatcaaactgggtaaccagtggttttcctttccagaaccagaagcacttgtaggaaagttgaacaggggtttcctggaagcaccttcatgtcatcctatcaaaaccataaatgagaaactcattgctgaattaggcaaagttttcccgctaaaaaggctgaagtgttcctaccctttgctgccacaggaaggtaccagtgttcttcctttctggaattgtgactttctgtcagctgctttttggattagtctccatgaagataactcaaattctgagtccctgactggtgggacatcacaagatgtggaagactttctagtgtcattttcagaacttagccttctcaagaatcctggaagagatggtaaagaagaagcttgtgaaggaacctgtggccaggccaagatctgccttagaccttctctcctagtgcatgttcaggatgtcatcgaagtaccagacttcctctcaggttctctgcacatcctcagtggacctgtctttcagaagtgccacattttgcctttmacaatgccagcatttcatgaaactttatttatccttggggttaatcaaaatctgaaggatggctgtcttcaatcactgctggatcatctgaagggcattctagatagcctgctgacccagacattgccggagagctctaagctgagcagtttagtcaaatttgtccttcagtcaaatggaaaggattatatgattcgtgtgaagactcataattttagcccagattgtactgaggatctaattattgggtctgttatcacatctgccmctagtgttatacataaagaccagtgttttgtgtttgtgtctatgaacttggacttattagccatgcttgtctggtgtatctctgactggagaatgttgtggacgtttgataaccgtttcctgaaaaattttgtccctggcaaaatagaaccctttaaaagtcattctctgtatcctccatgttatgtgcatgatgttagtttttggatagatcagaagaaaggatttgatgaactagagtttcacactgtggcccgagcagtgtctcaggacactattatatccatacagtttcttagccgtttccagcatccaaagactcaacaggtcagtctctgctatagattgacctaccagacctgtgacaaggccctcacccagcagcaagtagcatcaatgcagtcccagtttaggaaggagattcaacaacacctatatgttatacctcggtagtttggtaaatccttttctgcagtgtgatccttcattgcgggggatgtggaggaaaattaccaacttgcaaccagtagtcctttctggatttttgtttttgtaaaatcttttactttgtgaccatagctactgttcgttgatctttttttttttttttttttgagacggagtcttgctctgccgcccaggcgggagtgcagtggcagtggcatgatatcagctcactataagctccacctcccaggttcatgccattctcctgcctcagcctcccgagtagctgggactacaggcacctgccaccacgcctggcta

SEQ ID NO: 3885 - DNA, 6391 bp, Homo sapiens
gacgtaacttccggttgctgtgctgagtcgraagtgggaacccttcggccgctgagattctgtygtgtcgtcgctgctggcacttcaggctctgcctctcccactaggtctggatggaggataccttaaagtgaaatgacagaccaggagaataacaacaacatctcaagtaacccctttgctgctctttttgsctccctggctgatgccaaacagtttgcggcaatccaaaaagagcagctgaagcaacaatctgatgaactcccagctagcccagatgactcggataatagcgtgtcagagagcctggatgaattcgattactctgtggctgagattagccgctcattccgatcacagcaggaaatatgtgagcaactcaacatcaatcacatgatccaaaggatcttccttattactctggacaacagtgatcccagcttgaaaagcgggaatggcatccctagccgttgtgtgtatttggaagaaatggcagtagagctagaagatcaagactggcttgatatgagcaatgttgagcaggccctcttcgctcgcttattacttcaagatccaggcaaccacttaattaacatgacttcttctacaacgctaaatctctctgctgatcgagatgcaggagagaggcacattttttgttacctttactcctgcttccagagagccaaggaagagattaccaaagttccagagaacctgctaccctttgcagtgcagtgcagaaacctcactgtgtccaatacccgaacagttcttctcaccccagagatctatgttgaccaaaacatccatgagcaactggtagatttgatgttagaagccatccagggagcccgtgagtacatgaacaagatctattttgaagatgtaactgagtttctggaagaggtcattgaagccttgatattggatgaggaagttagaacatttccasaagtcatgattccagtgtttgatattttattgggccgaataaaagatctagagctctgtcagatccttttgtatgcatatctggatattcttctctatttcactaggcaaaaagatatggcaaaggtttttgtagaatacattcagcccaaggaccctaccaatgggcaaatgtaccagaagaccttgctgggagtaattctgagtatctcctgcttattaaagactccgggtgttgtagaaaatcatggctactttttgaatccatctcgttccagcccccaggagatcaaagtacaggaggccaacatccatcagttcatggctcagttccacgaaaagatctaccagatgctgaagaacttactccagctctctccagaaaccaaacactgtatcttgtcctggcttggaaactgtttgcatgcaaatgcaggccgcaccaagatttgggccaatcagatgccagaaatctttttccaaatgtatgcctcagatgctttctttctgaatctgggtgctgctctcctgaagctatgccagccattttgcaaacccagatcctctcggctcctcacctttaatcccacatactgtgccctcaaggagttgaatgatgaagaacgaaaaattaaaaatgtacacatgagaggtttggacaaagaaacctgtttgatcccagctgtgcaggagccgaagtttccacagaactacaaccttgtaacagagaaccttgctctgacagagtacaccttgtacttgggatttcacaggttgcatgatcagatggtaaaaatcaaccaaaatctgcatcggctgcaggttgcctggcgggatgctcagcaaagttctagccctgctgctgacaatcttcgtgagcagtttgaacgactgatgaccatctatctttctaccaagactgccatgacagagccacaaatgctacaaaactgcctaaacttgcaggtgtccatggctgttctactggttcaactggccataggcaatgagggctcacagccaatagagctaacctttcctttgccagatggctacagctctttggcttatgtgccagaattttttgcagataacctgggtgattttctcatttttctccgccgctttgccgatgacattttggagacatcagcagattccctggagcatgtccttcactttatcaccattttcactggaagcatagaaagaatgaagaatccccacctgagggccaaactagcagaggtgttggaagcagtgatgccccacctggatcagaccccaaatcccttggtatccagtgtgttccaccggaaacgtgtgttctgcaactttcagtatgcaccccaacttgcagaggctctaatcaaggtttttgtggacatcgaatttacaggagacccccatcaatttgaacagaagtttaattaccgccgtcccatgtatcctatcctaagatacatgtgggggacagatacctatcgggagagcattaaggatttggctgactatgcctctaagaatttagaagccatgaatcccccacttttcctccgctttcttaacctgctaatgaatgatgccatcttccttttggatgaagccatacagtatttgagcaagataaagattcagcaaattgagaaggatcgaggtgaatgggatagtctgactccagaagcccgccgagaaaaggaggctggcctacagatgtttggacagctggcacgtttccataacatcatgtccaatgaaacaatyggtacccttgcctttctcacatcagagatcaagtcactctttgtgcatcccttcctggctgagcgcatcatctccatgttgaactacttcctgcaacacctggttggccccaagatgggtgccttaaaagtcaaggacttcagcgaatttgacttcaaaccccagcagcttgtatcagatatctgcactatctacttaaatcttggggatgaggagaatttctgtgccactgtgcccaaggatggacgttcctattccccaactctctttgcacagacagttcgagtcttgaagaaaataaataagcctgggaatatgattatggctttcagcaacttggcagagagaatcaagtctcttgcagacctccaacaacaggaagaggaaacctatgcagatgcctgtgatgagttcctggatcccattatgagcacactgatgtgtgaccctgtggtgctgccatcttccagagtcactgtggatagatccaccattgcaagacatttgctcagwgaccaaacagatccctttaaccgtagtcccctcaccatggaccagatccggccaaacacagaactaaaagaaaaaatccaacggtggcttgcagagaggaaacaacaaaaggagcaacttgaatagatactgtgaactaaccaaaccaaaaccaaccccrgagtgcagataaacaattgtttgtggtttctctctttctggttctgttccttttytttcttcttttytttttyttttttttttttttttttactaaattagagaactgctcttgctgaaattatgatagttaagattcctaagaacttgacaatgctcccctggcttgcaggaaattatacttattatagcatcaccaagtttagaaatcatcactaattttcaccctctgttgtctcttcatattcttcttccttttcctaaatgaaattatattatttcaactactaaaacttcccgccaccctgctatttctcttccaattactgttcaaacatttttggtgagtgctgcttttataaatatgtgatgtcacatatttcagtgacagctgatgttatcagaaaaatcctgttatcctgtgtatttactagtcctcatgatctagacttaaccccttttctgtgttacagagtaacttcacataaaagcagatacctttaagtttgtgtagacttctgaataagatgatagacgagaattttttttaaaaaaggaatttaaaggaatcttgtgcaacttctgttgatagctcttaattttgttatacagtctttttaatgaggattggtagggcaatcctaccaattgatgggggtgaggagactgttgggcccttattctcttatgaaaatctgtttctacaaggactaggcctaagtagatttaggcaacgggtatcatatccatgaaaaatgtcattttaagacactaatatcaacagtatatctcagtgtgtgagatatataaatacacatacaccccatgtgcttttttgttggtttagtgtaaactgagtaccactttatattttctcttccatagtgagatgtatgcagtatgtggccatgtttactaacatactcattcttcacaaaattctgagattataaaatgtatatagttaatatttgtttgagcttgtgacctgacttctaagagctacttctaacacagccttaggtcttcaattaacaaagtaggaagttgagcacaaccttgtccacagccattttaaatatccacttagccctgtgtagttggtaggtggacaccactttcataagtgaacttgagctcactactcaattgtgcagcttaatatgctgactagggacattcccctatggattatctttatatcactgtctttctaagcccagagatgtcataagtgacaagaaaagtgataggatcaagaaatgggtgtcactgcttcatttggaacatgttattaactatggtctctttcaaataaatagtagttttatatttcaacacaagttgctataagcagtccttgatgggtttttgattgcatcagctggaaagcctcaaatctaagagggcttcccatcctasatataaaataggtgttgcctattgctgtgcttataaaatgaaaaaggaaattgaggacacttttgcaaatgccagaatgtaagattcattcagtgtgctccctgggcctttatggcatgggttgacaggatttgtttattttctaaaattagcttcattcaatatttatcatcctcctttccctctctgagaatgaactatgtataaaataagcttctgcctatttgcatttatcttccaaacccaatctagtaggatgttctcattttaaaaacgaggggaaaagaccagagtttttcaggagaaaactggaggaaaatgggcacaaaaactcagaaggcagctattcccagcagcttcctagttaacaacccccatgctgcctccagtctttgtctgtattcttctgtatttaaccttcagattgtaagccttttctggcaagcttttcttctttttttaaactcttttcctgaaactttttatgaatggctatggcaccattaatgctgctgaatatctttaaactctgcacaagcaagtgtgtagcttaaggccactactggtaaggaaaccaagtgtcctctgtgccttttttctttctgtgaagtaatttaagaatatccaaaaaaattagactttaaaaagttatcttggtacaacaccgtgtgtatatacacttggaagcttaaaaaggtgttttgtctggaacttagaagcagctctaaatctagtagagcagactttctaacatacctagttttgtgtattggctttgctggagtatgatagcaaaatgaagactcttttactcagctctggtattgctcataacttaccaagaggctaatactaaacttggaaaattgtttaagtatgttttatcaagcagtctgggttttgttttttaatatactttttaatggatatgtgaaaactgaaggaaatgttaaaggttttttaatggtgcaagtgaaggtgccagttgctatttgatatcacactctacaaaagcttcattactttatttgatggtggttgctaagcagccattgcacagagcataagtctactgggtgcctttacatgccagaggctgatgctgcactgttgatgtcatgtgaggaaataatgcacatgctctaactgctcaacaggaaatgaacctagaaacagaaaatgaaaaggttgattgaaataaaacttgatcaacgcgactgtattttgaaacattccaggaaggttacttcttgtcaaacttgcctggcagtgtttgttcaaaacttgtatttaataaatgaacatctgacttacaacctttgttatcactttattccagtattaaaagctagtggcagtttcagaaatccccctgaaaacttagaggattctgacgtttcactttttttttaggtaagtaacatcaaatatgtgtgacctggctgacccagcctgccttaccaggcctctggaggggaccctggggttaccctcaggagatgaatctcacagtatggttttcctaaccagctctcttttggcttcactgtttttctttatctggcctgaaccccaggtc

SEQ ID NO: 3886 - DNA, 1124 bp, Homo sapiens
tccttccggcgggtgacattcagccggcggttcggggcgacggactctccattccagaaccatggcccaatttgtccgtaaccttgtggagaagaccccggcgctggtgaacgctgctgtgacttactcgaagcctcgattggccacattttggtactacgccaaggttgagctggttcctcccacccctgctgagatccctagagctattcagagcctgaaaaaaatagtcaatagtgctcaractggtagcttcaaacagctcacagttaaggaagctgtgctgaatggtttggtggccactgaggtgttgatgtggttttatgtcggagagattataggcaagcggggcatcattggctatgatgtttgaagaccaatctttaacatctgattatatttgatttattatytgagtgttgttggaccatgtgtgatcagactgctatctgaataaaataagatttgtcaaaactcagtgttttctccatcagayactccatgaaaggtcacaatttctcttgatattaagctgggttgtctttaaacaaccctaaatacacgtctgtttagcccgcaattggaaaggatatatgtggcaatattaacctggtacatgaatatatggggataacattttaatttgaaggtttggaatatatatatttaagctttatttccagaacagtgagggttaggtcttgggaaaactataacttgccaaagtagaagaaatagtagtaccatatgccaaagtgatagagatgaatcatgtcagtagttagaataacatttcaactgttttctttgctaaaatcacagaaagaccctattgacaacatctatgtctgtaaaaatgttagagtacttgtcatcttgaatatagcctccccaagagagaacagggtggtattctaagtatgtttytttgtaacatctttagcagtaggacagagccatacatgtgaaatctgatttttatgtgtgttattcgtttgtctggttttactacctttgcaaaaacaaaataccccaaagatatttaaacaaggttataatttagcatcttccctggatctaaatagtatattatatcctgaaataaatgaaatgattgctatagt

SEQ ID NO: 3887 - DNA, 7445 bp, Homo sapiens
gacgtaacttccggttgctgtgctgagtcgraagtgggaacccttcggccgctgagattctgtygtgtcgtcgctgctggcacttcaggctctgcctctcccactaggtctggatggaggataccttaaagtgaaatgacagaccaggagaataacaacaacatctcaagtaacccctttgctgctctttttgsctccctggctgatgccaaacagtttgcggcaatccaaaaagagcagctgaagcaacaatctgatgaactcccagctagcccagatgactcggataatagcgtgtcagagagcctggatgaattcgattactctgtggctgagattagccgctcattccgatcacagcaggaaatatgtgagcaactcaacatcaatcacatgatccaaaggatcttccttattactctggacaacagtgatcccagcttgaaaagcgggaatggcatccctagccgttgtgtgtatttggaagaaatggcagtagagctagaagatcaagactggcttgatatgagcaatgttgagcaggccctcttcgctcgcttattacttcaagatccaggcaaccacttaattaacatgacttcttctacaacgctaaatctctctgctgatcgagatgcaggagagaggcacattttttgttacctttactcctgcttccagagagccaaggaagagattaccaaagttccagagaacctgctaccctttgcagtgcagtgcagaaacctcactgtgtccaatacccgaacagttcttctcaccccagagatctatgttgaccaaaacatccatgagcaactggtagatttgatgttagaagccatccagggagcccattttgaagatgtaactgagtttctggaagaggtcattgaagccttgatattggatgaggaagttagaacatttccasaagtcatgattccagtgtttgatattttattgggccgaataaaagatctagagctctgtcagatccttttgtatgcatatctggatattcttctctatttcactaggcaaaaagatatggcaaaggtttttgtagaatacattcagcccaaggaccctaccaatgggcaaatgtaccagaagaccttgctgggagtaattctgagtatctcctgcttattaaagactccgggtgttgtagaaaatcatggctactttttgaatccatctcgttccagcccccaggagatcaaagtacaggaggccaacatccatcagttcatggctcagttccacgaaaagatctaccagatgctgaagaacttactccagctctctccagaaaccaaacactgtatcttgtcctggcttggaaactgtttgcatgcaaatgcaggccgcaccaagatttgggccaatcagatgccagaaatctttttccaaatgtatgcctcagatgctttctttctgaatctgggtgctgctctcctgaagctatgccagccattttgcaaacccagatcctctcggctcctcacctttaatcccacatactgtgccctcaaggagttgaatgatgaagaacgaaaaattaaaaatgtacacatgagaggtttggacaaagaaacctgtttgatcccagctgtgcaggagccgaagtttccacagaactacaaccttgtaacagagaaccttgctctgacagagtacaccttgtacttgggatttcacaggttgcatgatcagatggtaaaaatcaaccaaaatctgcatcggctgcaggttgcctggcgggatgctcagcaaagttctagccctgctgctgacaatcttcgtgagcagtttgaacgactgatgaccatctatctttctaccaagactgccatgacagagccacaaatgctacaaaactgcctaaacttgcaggtgtccatggctgttctactggttcaactggccataggcaatgagggctcacagccaatagagctaacctttcctttgccagatggctacagctctttggcttatgtgccagaattttttgcagataacctgggtgattttctcatttttctccgccgctttgccgatgacattttggagacatcagcagattccctggagcatgtccttcactttatcaccattttcactggaagcatagaaagaatgaagaatccccacctgagggccaaactagcagaggtgttggaagcagtgatgccccacctggatcagaccccaaatcccttggtatccagtgtgttccaccggaaacgtgtgttctgcaactttcagtatgcaccccaacttgcagaggctctaatcaaggtttttgtggacatcgaatttacaggagacccccatcaatttgaacagaagtttaattaccgccgtcccatgtatcctatcctaagatacatgtgggggacagatacctatcgggagagcattaaggatttggctgactatgcctctaagaatttagaagccatgaatcccccacttttcctccgctttcttaacctgctaatgaatgatgccatcttccttttggatgaagccatacagtatttgagcaagataaagattcagcaaattgagaaggatcgaggtgaatgggatagtctgactccagaagcccgccgagaaaaggaggctggcctacagatgtttggacagctggcacgtttccataacatcatgtccaatgaaacaatyggtacccttgcctttctcacatcagagatcaagtcactctttgtgcatcccttcctggctgagcgcatcatctccatgttgaactacttcctgcaacacctggttggccccaagatgggtgccttaaaagtcaaggacttcagcgaatttgacttcaaaccccagcagcttgtatcagatatctgcactatctacttaaatcttggggatgaggagaatttctgtgccactgtgcccaaggatggacgttcctattccccaactctctttgcacagacagttcgagtcttgaagaaaataaataagcctgggaatatgattatggctttcagcaacttggcagagagaatcaagtctcttgcagacctccaacaacaggaagaggaaacctatgcagatgcctgtgatgagttcctggatcccattatgagcacactgatgtgtgaccctgtggtgctgccatcttccagagtcactgtggatagatccaccattgcaagacatttgctcagwgaccaaacagatccctttaaccgtagtcccctcaccatggaccagatccggccaaacacagaactaaaagaaaaaatccaacggtggcttgcagagaggaaacaacaaaaggagcaacttgaatagatactgtgaactaaccaaaccaaaaccaaccccrgagtgcagataaacaattgtttgtggtttctctctttctggttctgttccttttytttcttcttttytttttyttttttttttttttttttactaaattagagaactgctcttgctgaaattatgatagttaagattcctaagaacttgacaatgctcccctggcttgcaggaaattatacttattatagcatcaccaagtttagaaatcatcactaattttcaccctctgttgtctcttcatattcttcttccttttcctaaatgaaattatattatttcaactactaaaacttcccgccaccctgctatttctcttccaattactgttcaaacatttttggtgagtgctgcttttataaatatgtgatgtcacatatttcagtgacagctgatgttatcagaaaaatcctgttatcctgtgtatttactagtcctcatgatctagacttaaccccttttctgtgttacagagtaacttcacataaaagcagatacctttaagtttgtgtagacttctgaataagatgatagacgagaattttttttaaaaaaggaatttaaaggaatcttgtgcaacttctgttgatagctcttaattttgttatacagtctttttaatgaggattggtagggcaatcctaccaattgatgggggtgaggagactgttgggcccttattctcttatgaaaatctgtttctacaaggactaggcctaagtagatttaggcaacgggtatcatatccatgaaaaatgtcattttaagacactaatatcaacagtatatctcagtgtgtgagatatataaatacacatacaccccatgtgcttttttgttggtttagtgtaaactgagtaccactttatattttctcttccatagtgagatgtatgcagtatgtggccatgtttactaacatactcattcttcacaaaattctgagattataaaatgtatatagttaatatttgtttgagcttgtgacctgacttctaagagctacttctaacacagccttaggtcttcaattaacaaagtaggaagttgagcacaaccttgtccacagccattttaaatatccacttagccctgtgtagttggtaggtggacaccactttcataagtgaacttgagctcactactcaattgtgcagcttaatatgctgactagggacattcccctatggattatctttatatcactgtctttctaagcccagagatgtcataagtgacaagaaaagtgataggatcaagaaatgggtgtcactgcttcatttggaacatgttattaactatggtctctttcaaataaatagtagttttatatttcaacacaagttgctataagcagtccttgatgggtttttgattgcatcagctggaaaagtgtgctccctgggcctttatggcatgggttgacaggatttgtttattttctaaaattagcttcattcaatatttatcatcctcctttccctctctgagaatgaactatgtataaaataagcttctgcctatttgcatttatcttccaaacccaatctagtaggatgttctcattttaaaaacgaggggaaaagaccagagtttttcaggagaaaactggaggaaaatgggcacaaaaactcagaaggcagctattcccagcagcttcctagttaacaacccccatgctgcctccagtctttgtctgtattcttctgtatttaaccttcagattgtaagccttttctggcaagcttttcttctttttttaaactcttttcctgaaactttttatgaatggctatggcaccattaatgctgctgaatatctttaaactctgcacaagcaagtgtgtagcttaaggccactactggtaaggaaaccaagtgtcctctgtgccttttttctttctgtgaagtaatttaagaatatccaaaaaaattagactttaaaaagttatcttggtacaacaccgtgtgtatatacacttggaagcttaaaaaggtgttttgtctggaacttagaagcagctctaaatctagtagagcagactttctaacatacctagttttgtgtattggctttgctggagtatgatagcaaaatgaagactcttttactcagctctggtattgctcataacttaccaagaggctaatactaaacttggaaaattgtttaagtatgttttatcaagcagtctgggttttgttttttaatatactttttaatggatatgtgaaaactgaaggaaatgttaaaggttttttaatggtgcaagtgaaggtgccagttgctatttgatatcacactctacaaaagcttcattactttatttgatggtggttgctaagcagccattgcacagagcataagtctactgggtgcctttacatgccagaggctgatgctgcactgttgatgtcatgtgaggaaataatgcacatgctctaactgctcaacaggaaatgaaccttggaagtgggacggggtcctgcagcgggtccttccggcgggtgacattcagccggcggttcggggcgacggactctccattccagaaccatggcccaatttgtccgtaaccttgtggagaagaccccggcgctggtgaacggtgagcgcgatgtgagaccgcsgaggcgggcacacgggcggcagggaggcctgcgatggcctgagaggaagaagcgggctgcgaasacccgaggggcctgcgggtgccggggcgggatggcctgcaggtggagggagcaggaagcaggttggcgactcttttctagccttccactcgtctgacctgcagattgggttctctacacaacctagaagttcctgaattctaaccacgactgggaagagaggtagtgtgaaggaagcccggcgttgcccggcagctgcaaccattacgccccctgagatcgctaagagcagggatctagaggggatggttctgttaggagagctaagaaaaggaagggcagaaacgtgaaagtaaatcaattcggcctcattacatgtgktgttgttctcagtggagtatttggaagtcaacagaaatgtttaaggatggctgctgtgacttactcgaagcctcgattggccacattttggtactacgccaaggttgagctggttcctcccacccctgctgagatccctagagctattcagagcctgaaaaaaatagtcaatagtgctcaractggtagcttcaaacagctcacagttaaggaagctgtgctgaatggtttggtggccactgaggtgttgatgtggttttatgtcggagagattataggcaagcggggcatcattggctatgatgtttgaagaccaatctttaacatctgattatatttgatttattatytgagtgttgttggaccatgtgtgatcagactgctatctgaataaaataagatttgtcaaaactcagtgttttctccatcagayactccatgaaaggtcacaatttctcttgatattaagctgggttgtctttaaacaaccctaaatacacgtctgtttagcccgcaattggaaaggatatatgtggcaatattaacctggtacatgaatatatggggataacattttaatttgaaggtttggaatatatatatttaagctttatttccagaacagtgagggttaggtcttgggaaaactataacttgccaaagtagaagaaatagtagtaccatatgccaaagtgatagagatgaatcatgtcagtagttagaataacatttcaactgttttctttgctaaaatcacagaaagaccctattgacaacatctatgtctgtaaaaatgttagagtacttgtcatcttgaatatagcctccccaagagagaacagggtggtattctaagtatgtttytttgtaacatctttagcagtaggacagagccatacatgtgaaatctgatttttatgtgtgttattcgtttgtctggttttactacctttgcaaaaacaaaataccccaaagatatttaaacaaggttataatttagcatcttccctggatctaaatagtatattatatcctgaaataaatgaaatgattgctatagt

SEQ ID NO: 3888 - DNA, 458 bp, Homo sapiens
tccttccggcgggtgacattcagccggcggttcggggcgacggactctccattccagaaccatggcccaatttgtccgtaaccttgtggagaagaccccggcgctggtgaacgctgctgtgacttactcgaagcctcgattggccacattttggtactacgccaaggttgagctggttcctcccacccctgctgagatccctagagctattcagagcctgaaaaaaatagtcaatagtgctcaractggtagcttcaaacagctcacagttaaggaagctgtgctgaatggtttggtggccactgaggtgttgatgtggttttatgtcggagagattataggcaagcggggcatcattggctatgatgtttgaagaccaatctttaacatctgattatatttgattttggaccatgtgtgatcagactgctatctgaataaaataagatttgtcaaaa

SEQ ID NO: 3889 - DNA, 6370 bp, Homo sapiens
gacgtaacttccggttgctgtgctgagtcgraagtgggaacccttcggccgctgagattctgtygtgtcgtcgctgctggcacttcaggctctgcctctcccactaggtctggatggaggataccttaaagtgaaatgacagaccaggagaataacaacaacatctcaagtaacccctttgctgctctttttgsctccctggctgatgccaaacagtttgcggcaatccaaaaagagcagctgaagcaacaatctgatgaactcccagctagcccagatgactcggataatagcgtgtcagagagcctggatgaattcgattactctgtggctgagattagccgctcattccgatcacagcaggaaatatgtgagcaactcaacatcaatcacatgatccaaaggatcttccttattactctggacaacagtgatcccagcttgaaaagcgggaatggcatccctagccgttgtgtgtatttggaagaaatggcagtagagctagaagatcaagactggcttgatatgagcaatgttgagcaggccctcttcgctcgcttattacttcaagatccaggcaaccacttaattaacatgacttcttctacaacgctaaatctctctgctgatcgagatgcaggagagaggcacattttttgttacctttactcctgcttccagagagccaaggaagagattaccaaagttccagagaacctgctaccctttgcagtgcagtgcagaaacctcactgtgtccaatacccgaacagttcttctcaccccagagatctatgttgaccaaaacatccatgagcaactggtagatttgatgttagaagccatccagggagcccattttgaagatgtaactgagtttctggaagaggtcattgaagccttgatattggatgaggaagttagaacatttccasaagtcatgattccagtgtttgatattttattgggccgaataaaagatctagagctctgtcagatccttttgtatgcatatctggatattcttctctatttcactaggcaaaaagatatggcaaaggtttttgtagaatacattcagcccaaggaccctaccaatgggcaaatgtaccagaagaccttgctgggagtaattctgagtatctcctgcttattaaagactccgggtgttgtagaaaatcatggctactttttgaatccatctcgttccagcccccaggagatcaaagtacaggaggccaacatccatcagttcatggctcagttccacgaaaagatctaccagatgctgaagaacttactccagctctctccagaaaccaaacactgtatcttgtcctggcttggaaactgtttgcatgcaaatgcaggccgcaccaagatttgggccaatcagatgccagaaatctttttccaaatgtatgcctcagatgctttctttctgaatctgggtgctgctctcctgaagctatgccagccattttgcaaacccagatcctctcggctcctcacctttaatcccacatactgtgccctcaaggagttgaatgatgaagaacgaaaaattaaaaatgtacacatgagaggtttggacaaagaaacctgtttgatcccagctgtgcaggagccgaagtttccacagaactacaaccttgtaacagagaaccttgctctgacagagtacaccttgtacttgggatttcacaggttgcatgatcagatggtaaaaatcaaccaaaatctgcatcggctgcaggttgcctggcgggatgctcagcaaagttctagccctgctgctgacaatcttcgtgagcagtttgaacgactgatgaccatctatctttctaccaagactgccatgacagagccacaaatgctacaaaactgcctaaacttgcaggtgtccatggctgttctactggttcaactggccataggcaatgagggctcacagccaatagagctaacctttcctttgccagatggctacagctctttggcttatgtgccagaattttttgcagataacctgggtgattttctcatttttctccgccgctttgccgatgacattttggagacatcagcagattccctggagcatgtccttcactttatcaccattttcactggaagcatagaaagaatgaagaatccccacctgagggccaaactagcagaggtgttggaagcagtgatgccccacctggatcagaccccaaatcccttggtatccagtgtgttccaccggaaacgtgtgttctgcaactttcagtatgcaccccaacttgcagaggctctaatcaaggtttttgtggacatcgaatttacaggagacccccatcaatttgaacagaagtttaattaccgccgtcccatgtatcctatcctaagatacatgtgggggacagatacctatcgggagagcattaaggatttggctgactatgcctctaagaatttagaagccatgaatcccccacttttcctccgctttcttaacctgctaatgaatgatgccatcttccttttggatgaagccatacagtatttgagcaagataaagattcagcaaattgagaaggatcgaggtgaatgggatagtctgactccagaagcccgccgagaaaaggaggctggcctacagatgtttggacagctggcacgtttccataacatcatgtccaatgaaacaatyggtacccttgcctttctcacatcagagatcaagtcactctttgtgcatcccttcctggctgagcgcatcatctccatgttgaactacttcctgcaacacctggttggccccaagatgggtgccttaaaagtcaaggacttcagcgaatttgacttcaaaccccagcagcttgtatcagatatctgcactatctacttaaatcttggggatgaggagaatttctgtgccactgtgcccaaggatggacgttcctattccccaactctctttgcacagacagttcgagtcttgaagaaaataaataagcctgggaatatgattatggctttcagcaacttggcagagagaatcaagtctcttgcagacctccaacaacaggaagaggaaacctatgcagatgcctgtgatgagttcctggatcccattatgagcacactgatgtgtgaccctgtggtgctgccatcttccagagtcactgtggatagatccaccattgcaagacatttgctcagwgaccaaacagatccctttaaccgtagtcccctcaccatggaccagatccggccaaacacagaactaaaagaaaaaatccaacggtggcttgcagagaggaaacaacaaaaggagcaacttgaatagatactgtgaactaaccaaaccaaaaccaaccccrgagtgcagataaacaattgtttgtggtttctctctttctggttctgttccttttytttcttcttttytttttyttttttttttttttttttactaaattagagaactgctcttgctgaaattatgatagttaagattcctaagaacttgacaatgctcccctggcttgcaggaaattatacttattatagcatcaccaagtttagaaatcatcactaattttcaccctctgttgtctcttcatattcttcttccttttcctaaatgaaattatattatttcaactactaaaacttcccgccaccctgctatttctcttccaattactgttcaaacatttttggtgagtgctgcttttataaatatgtgatgtcacatatttcagtgacagctgatgttatcagaaaaatcctgttatcctgtgtatttactagtcctcatgatctagacttaaccccttttctgtgttacagagtaacttcacataaaagcagatacctttaagtttgtgtagacttctgaataagatgatagacgagaattttttttaaaaaaggaatttaaaggaatcttgtgcaacttctgttgatagctcttaattttgttatacagtctttttaatgaggattggtagggcaatcctaccaattgatgggggtgaggagactgttgggcccttattctcttatgaaaatctgtttctacaaggactaggcctaagtagatttaggcaacgggtatcatatccatgaaaaatgtcattttaagacactaatatcaacagtatatctcagtgtgtgagatatataaatacacatacaccccatgtgcttttttgttggtttagtgtaaactgagtaccactttatattttctcttccatagtgagatgtatgcagtatgtggccatgtttactaacatactcattcttcacaaaattctgagattataaaatgtatatagttaatatttgtttgagcttgtgacctgacttctaagagctacttctaacacagccttaggtcttcaattaacaaagtaggaagttgagcacaaccttgtccacagccattttaaatatccacttagccctgtgtagttggtaggtggacaccactttcataagtgaacttgagctcactactcaattgtgcagcttaatatgctgactagggacattcccctatggattatctttatatcactgtctttctaagcccagagatgtcataagtgacaagaaaagtgataggatcaagaaatgggtgtcactgcttcatttggaacatgttattaactatggtctctttcaaataaatagtagttttatatttcaacacaagttgctataagcagtccttgatgggtttttgattgcatcagctggaaagcctcaaatctaagagggcttcccatcctasatataaaataggtgttgcctattgctgtgcttataaaatgaaaaaggaaattgaggacacttttgcaaatgccagaatgtaagattcattcagtgtgctccctgggcctttatggcatgggttgacaggatttgtttattttctaaaattagcttcattcaatatttatcatcctcctttccctctctgagaatgaactatgtataaaataagcttctgcctatttgcatttatcttccaaacccaatctagtaggatgttctcattttaaaaacgaggggaaaagaccagagtttttcaggagaaaactggaggaaaatgggcacaaaaactcagaaggcagctattcccagcagcttcctagttaacaacccccatgctgcctccagtctttgtctgtattcttctgtatttaaccttcagattgtaagccttttctggcaagcttttcttctttttttaaactcttttcctgaaactttttatgaatggctatggcaccattaatgctgctgaatatctttaaactctgcacaagcaagtgtgtagcttaaggccactactggtaaggaaaccaagtgtcctctgtgccttttttctttctgtgaagtaatttaagaatatccaaaaaaattagactttaaaaagttatcttggtacaacaccgtgtgtatatacacttggaagcttaaaaaggtgttttgtctggaacttagaagcagctctaaatctagtagagcagactttctaacatacctagttttgtgtattggctttgctggagtatgatagcaaaatgaagactcttttactcagctctggtattgctcataacttaccaagaggctaatactaaacttggaaaattgtttaagtatgttttatcaagcagtctgggttttgttttttaatatactttttaatggatatgtgaaaactgaaggaaatgttaaaggttttttaatggtgcaagtgaaggtgccagttgctatttgatatcacactctacaaaagcttcattactttatttgatggtggttgctaagcagccattgcacagagcataagtctactgggtgcctttacatgccagaggctgatgctgcactgttgatgtcatgtgaggaaataatgcacatgctctaactgctcaacaggaaatgaacctagaaacagaaaatgaaaaggttgattgaaataaaacttgatcaacgcgactgtattttgaaacattccaggaaggttacttcttgtcaaacttgcctggcagtgtttgttcaaaacttgtatttaataaatgaacatctgacttacaacctttgttatcactttattccagtattaaaagctagtggcagtttcagaaatccccctgaaaacttagaggattctgacgtttcactttttttttaggtaagtaacatcaaatatgtgtgacctggctgacccagcctgccttaccaggcctctggaggggaccctggggttaccctcaggagatgaatctcacagtatggttttcctaaccagctctcttttggcttcactgtttttctttatctggcctgaaccccaggtc

SEQ ID NO: 3890 - DNA, 2764 bp, Homo sapiens
gacgtaacttccggttgctgtgctgagtcgraagtgggaacccttcggccgctgagattctgtygtgtcgtcgctgctggcacttcaggctctgcctctcccactaggtctggatggaggataccttaaagtgaaatgacagaccaggagaataacaacaacatctcaagtaacccctttgctgctctttttgsctccctggctgatgccaaacagtttgcggcaatccaaaaagagcagctgaagcaacaatctgatgaactcccagctagcccagatgactcggataatagcgtgtcagagagcctggatgaattcgattactctgtggctgagattagccgctcattccgatcacagcaggaaatatgtgagcaactcaacatcaatcacatgatccaaaggatcttccttattactctggacaacagtgatcccagcttgaaaagcgggaatggcatccctagccgttgtgtgtatttggaagaaatggcagtagagctagaagatcaagactggcttgatatgagcaatgttgagcaggccctcttcgctcgcttattacttcaagatccaggcaaccacttaattaacatgacttcttctacaacgctaaatctctctgctgatcgagatgcaggagagaggcacattttttgttacctttactcctgcttccagagagccaaggaagagattaccaaagttccagagaacctgctaccctttgcagtgcagtgcagaaacctcactgtgtccaatacccgaacagttcttctcaccccagagatctatgttgaccaaaacatccatgacacaaccttgtccacagccattttaaatatccacttagccctgtgtagttggtaggtggacaccactttcataagtgaacttgagctcactactcaattgtgcagcttaatatgctgactagggacattcccctatggattatctttatatcactgtctttctaagcccagagatgtcataagtgacaagaaaagtgataggatcaagaaatgggtgtcactgcttcatttggaacatgttattaactatggtctctttcaaataaatagtagttttatatttcaacacaagttgctataagcagtccttgatgggtttttgattgcatcagctggaaagcctcaaatctaagagggcttcccatcctasatataaaataggtgttgcctattgctgtgcttataaaatgaaaaaggaaattgaggacacttttgcaaatgccagaatgtaagattcattcagtgtgctccctgggcctttatggcatgggttgacaggatttgtttattttctaaaattagcttcattcaatatttatcatcctcctttccctctctgagaatgaactatgtataaaataagcttctgcctatttgcatttatcttccaaacccaatctagtaggatgttctcattttaaaaacgaggggaaaagaccagagtttttcaggagaaaactggaggaaaatgggcacaaaaactcagaaggcagctattcccagcagcttcctagttaacaacccccatgctgcctccagtctttgtctgtattcttctgtatttaaccttcagattgtaagccttttctggcaagcttttcttctttttttaaactcttttcctgaaactttttatgaatggctatggcaccattaatgctgctgaatatctttaaactctgcacaagcaagtgtgtagcttaaggccactactggtaaggaaaccaagtgtcctctgtgccttttttctttctgtgaagtaatttaagaatatccaaaaaaattagactttaaaaagttatcttggtacaacaccgtgtgtatatacacttggaagcttaaaaaggtgttttgtctggaacttagaagcagctctaaatctagtagagcagactttctaacatacctagttttgtgtattggctttgctggagtatgatagcaaaatgaagactcttttactcagctctggtattgctcataacttaccaagaggctaatactaaacttggaaaattgtttaagtatgttttatcaagcagtctgggttttgttttttaatatactttttaatggatatgtgaaaactgaaggaaatgttaaaggttttttaatggtgcaagtgaaggtgccagttgctatttgatatcacactctacaaaagcttcattactttatttgatggtggttgctaagcagccattgcacagagcataagtctactgggtgcctttacatgccagaggctgatgctgcactgttgatgtcatgtgaggaaataatgcacatgctctaactgctcaacaggaaatgaacctagaaacagaaaatgaaaaggttgattgaaataaaacttgatcaacgcgactgtattttgaaacattccaggaaggttacttcttgtcaaacttgcctggcagtgtttgttcaaaacttgtatttaataaatgaacatctgacttacaacctttgttatcactttattccagtattaaaagctagtggcagtttcagaaatccccctgaaaacttagaggattctgacgtttcactttttttttaggtaagtaacatcaaatatgtgtgacctggctgacccagcctgccttaccaggcctctggaggggaccctggggttaccctcaggagatgaatctcacagtatggttttcctaaccagctctcttttggcttcactgtttttctttatctggcctgaaccccaggtc

SEQ ID NO: 3891 - DNA, 1460 bp, Homo sapiens
gacgtaacttccggttgctgtgctgagtcgraagtgggaacccttcggccgctgagattctgtygtgtcgtcgctgctggcacttcaggctctgcctctcccactaggtctggatggaggataccttaaagtgaaatgacagaccaggagaataacaacaacatctcaagtaacccctttgctgctctttttgsctccctggctgatgccaaacagtttgcggcaatccaaaaagagcagctgaagcaacaatctgatgaactcccagctagcccagatgactcggataatagcgtgtcagagagcctggatgaattcgattactctgtggctgagattagccgctcattccgatcacagcaggaaatatgtgagcaactcaacatcaatcacatgatccaaaggatcttccttattactctggacaacagtgatcccagcttgaaaagcgggaatggcatccctagccgttgtgtgtatttggaagaaatggcagtagagctagaagatcaagactggcttgatatgagcaatgttgagcaggccctcttcgctcgcttattacttcaagatccaggcaaccacttaattaacatgacttcttctacaacgctaaatctctctgctgatcgagatgcaggagagaggcacattttttgttacctttactcctgcttccagagagccaaggaagagattaccaaagttccagagaacctgctaccctttgcagtgcagtgcagaaacctcactgtgtccaatacccgaacagttcttctcaccccagagatctatgttgaccaaaacatccatgagcaactggtagatttgatgttagaagccatccagggagcccattttgaagatgtaactgagtttctggaagaggtcattgaagccttgatattggatgaggaagttagaacatttccasaagtcatgattccagtgtttgatattttattgggccgaataaaagatctagagctctgtcagatccttttgtatgcatatctggatattcttctctatttcactaggcaaaaagatatggcaaaggtttttgtagaatacattcagcccaaggaccctaccaatgggcaaatgtaccagaagaccttgctgggagtaattctgagtatctcctgcttattaaagactccgggtgttgtagaaaatcatggctactttttgaatccatctcgttccagcccccaggagatcaaagtacaggaggccaacatccatcaggtggaactgtttaccagggtatcccagccccctgatcttaaaagagttttctcagaaagcagatacagataaggctgctcaagcctctctgggaaagcaaattgatctagttggcttttacatcacataaataaattaaaactgggcatggtagctcaagcctgtaatcccggcactttgggaggccaaggtgggaggatcgcttgagc

SEQ ID NO: 3892 - DNA, 1074 bp, Homo sapiens
gactacttaccttacaaaattgaaagttcaagggttctcagcagttgaagagaagtaatgttagtaattctcaactttgactaaaactgccttctagtttgaatagcatcttttatgttctttgtctccttaattctggaaaagaatagtttcaaatatatatatatatatataattatatatatatataaaaggtaccttaaaatgtatgcttcttttttcaggaagctgtgctgaatggtttggtggccactgaggtgttgatgtggttttatgtcggagagattataggcaagcggggcatcattggctatgatgtttgaagaccaatctttaacatctgattatatttgatttattatytgagtgttgttggaccatgtgtgatcagactgctatctgaataaaataagatttgtcaaaactcagtgttttctccatcagayactccatgaaaggtcacaatttctcttgatattaagctgggttgtctttaaacaaccctaaatacacgtctgtttagcccgcaattggaaaggatatatgtggcaatattaacctggtacatgaatatatggggataacattttaatttgaaggtttggaatatatatatttaagctttatttccagaacagtgagggttaggtcttgggaaaactataacttgccaaagtagaagaaatagtagtaccatatgccaaagtgatagagatgaatcatgtcagtagttagaataacatttcaactgttttctttgctaaaatcacagaaagaccctattgacaacatctatgtctgtaaaaatgttagagtacttgtcatcttgaatatagcctccccaagagagaacagggtggtattctaagtatgtttytttgtaacatctttagcagtaggacagagccatacatgtgaaatctgatttttatgtgtgttattcgtttgtctggttttactacctttgcaaaaacaaaataccccaaagatatttaaacaaggttataatttagcatcttccctggatctaaatagtatattatatcctgaaataaatgaaatgattgctatagt

SEQ ID NO: 3893 - DNA, 1668 bp, Homo sapiens
agagggacctgtgaggtgtgcgaactggtggcagtgagagacttcggcggacatggctcccagcgtgccagcggcagaacccragtgtcctaaaggctgtgctgctggggcctcccagggccggtaaaggcacccaggcacccakattggctgaaaacttctgtgtctgccatttagctactggggacatgctgagggccatggtggcttctggctcagagctaggaaaaaagctgaaggcaactatggatgctgggaaactggtgagtgatgaaatggtagtggagctcattgagaagaatttggagacccccttgtgcaaaaatggttttcttctggatggcttccctcggactktgaggcaggcagaaatgctcgatgacctcatggagaagaggaaagagaagcttgattctgtgattgaattcagcatcccagactctctgctgatccgaagaatcacaggaaggctgatcaccccaagagtggccgttcctaccacgaggagttcaaccctccaaaagagcccatgaaagatgacatcaccggggaacccttgatccgttgatcagatgataatgaaaaggccttgaaaatctgccggcaagcctaccacactcaaaccaccccactcatagagtactacaggaaacgggggatccactctgccatcaatgcatcccagacccctgatgtcgtgttcgcaagcatcctagcagccttctccaaagccacatcctagtatcagaaggccaggcgaaactgcaacactgctcatcacccggtggcgtgatccctgctcttaggtgctgggcagagggaaagggtggtcagggtgaggatggtgagggagggctggtgaggggctgagaggaatacttgaaacaacagcagtgttattgtaatgtggcagtttattttatacataggtgagagtttttaaagtgtaagggaaaaattaattttttaaaaaacaccatgcttggagggtgggggtagaaatagagagacacaatattatttctaaggaatcgggttttcatttactctggactggtgaaaatattttttaaagccagtgctctaagacctcagcttttatctcagaaccccatgggttccagaccaagagtacaggaaatcaaattgttgtcctgtctgtctatagcttggaacagggaggctttgattactgaccccggttccacacactgtaagatcaaaaaaccatytccacatctgaaagagatgtaaggtgtattcatagggatggtggctcaacaaatcaaacaaactggaatcaaggggagggagaagggaatgaaatggaaagggaggctgattcccttcccctgacttaccactaatttactaggctacstamtytcatgagtaacctctcacagctacccagcacatgccacaatcctatgctcttgccttcttttatctgcawtgtgtgaagggactcttttaaataaatgagcaagtgtcctaagctatgtcatccaaagattgtcctttccattctcaaatcctgtgactgggatcactcaacagcactgtgatgtattattttcaatgaggtgcctttcttaactgaccaaatgctgccttgtttggcccctaaatcaataaaatatgttaaaatttgaagaaraaaaaaaa

SEQ ID NO: 3894 - DNA, 589 bp, Homo sapiens
ccgtccggagctggtgaggacagcctgccagagtctgtytgggcacaygactcctcccagctctgtttcttgtcctcctggtattgggatttgaggtccaggggacccaacagccccagcaagatgagatgcctagcccgaccttcctcacccaggtgamggaatctctctccagttacygggagtcagcaaagacagccgcccagaacctgtacragaagacatacctgcccgctgtagatgagaaactcagwgacttgtacagcmaaagcacagcagccatgagcacttacacaggcatttttactgaccaagttctttctgtgctgaagggagaggagtaacagccagaccccccatcagtggacaaggggagagtcccctactcccctgatcccccaggttcagactgagctcccccttcccagtagctcttgcatcctcctcccaactctagcctgaattcttttcagactcaagkgccaagatggaggggctgactcagtccagccaacatttaatgagcacctactttatgtatggagctctaacccatgggtccatgggaataaagcagtgaatagtaaca

SEQ ID NO: 3895 - DNA, 660 bp, Homo sapiens
ccgtccggagctggtgaggacagcctgccagagtctgtytgggcacaygactcctcccagctctgtttcttgtcctcctggtattgggatttgaggtccaggggacccaacagccccagcaagatgagatgcctagcccgaccttcctcacccaggtgamggaatctctctccagttacygggagtcagcaaagacagccgcccagaacctgtacragaagacatacctgcccgctgtagatgagaaactcagwgacttgtacagcmaaagcacagcagccatgagcacttacacaggcatttttactgaccaagttctttctgtgctgaagggagaggagtaacagccagaccccccatcagtggacaaggggagagtcccctactcccctgatcccccaggttcagactgagctcccccttcccagtagctcttgcatcctcctcccaactctagcctgaattcttttcaataaaaaatacaattcaagttgcttctcatggatggcactgcttttctgaggactcaagkgccaagatggaggggctgactcagtccagccaacatttaatgagcacctactttatgtatggagctctaacccatgggtccatgggaataaagcagtgaatagtaacaataaataatygtaacagcaa

SEQ ID NO: 3896 - DNA, 729 bp, Homo sapiens
gggggttgtggctgtggagcggaagtgggtctcaaccactataaakcctctctgtgcccgtccggagctggtgaggacagcctgccagagtctggtctctggacaytatgggcacaygactcctcccagctctgtttcttgtcctcctggtattgggatttgaggtccaggggacccaacagccccagcaagatgagatgcctagcccgaccttcctcacccaggtgamggaatctctctccagttacygggagtcagcaaagacagccgcccagaacctgtacragaagacatacctgcccgctgtagatgagaaactcagwgacttgtacagcmaaagcacagcagccatgagcacttacacaggcatttttactgaccaagttctttctgtgctgaagggagaggagtaacagccagaccccccatcagtggacaaggggagagtcccctactcccctgatcccccaggttcagactgagctcccccttcccagtagctcttgcatcctcctcccaactctagcctgaattcttttcaataaaaaatacaattcaagttgcttctcatggatggcactgcttttctgaggactcaagkgccaagatggaggggctgactcagtccagccaacatttaatgagcacctactttatgtatggagctctaacccatgggtccatgggaataaagcagtgaatagtaacaataaataatygtaacagcaa

SEQ ID NO: 3897 - DNA, 1996 bp, Homo sapiens
mccggcggaaatgcccgagcgatgacggaaacccggagggaggggagagaaagagcgagagaaggggaaagacaagtcgggagaggccggtaggcgtgaggcgggcctgaagcggcagcgggcggccttcgtccggcgagagctaggccgaggacccgcgccgcgctccccggcacctcaccgcgtccttcaccgactcccgcggcgcgcggccgggcggggaagggmgggcgggggtctcctccaggctgcgcgctcggagccgcctgctgggcttgggcggggcgcggggcccgcggccgccctacccggctcagtcctccccctgtgggacctggcgacggcggcggagggagaggggagcggcgcccgggccggggccgggggcgggtggggaggggggagggcggcggccgggctggggctcgggatccgcatcgggatcgggccgccatggacgacaaggcgttcaccaaggagctggaccagtgggtcgagcagctgaacgagtgtaagcagctgaacgagaaccaagtgcggacgctgtgcgagaaggcaaaggaaattttaacaaaagaatcaaatgtgcaagaggttcgttgccctgttactgtctgtggagatgtgcatggtcaatttcatgatcttatggaactctttagaattggtggaaaatcaccggatacaaactacttattcatgggtgactatgtagacagaggatattattcagtggagactgtgactcttcttgtagcattaaaggtgcgttatccagaacgcattacaatattgagaggaaatcacgaaagccgacaaattacccaagtatatggcttttatgatgaatgtctgcgaaagtatgggaatgccaacgtttggaaatattttacagatctctttgattatcttccacttacagctttagtagatggacagatattctgcctccatggtggcctctctccatccatagacacactggatcatataagagccctggatcgtttacaggaagttccacatgagggcccaatgtgtgatctgttatggtcagatccagatgatcgtggtggatggggtatttcaccacgtggtgctggctacacatttggacaagacatttctgaaacctttaaccatgccaatggtctcacactggtttctcgtgcccaccagcttgtaatggagggatacaattggtgtcatgatcggaatgtggttaccattttcagtgcacccaattactgttatcgttgtgggaaccaggctgctatcatggaattagatgacactttaaaatattccttccttcaatttgacccagcgcctcgtcgtggtgagcctcatgttacacggcgcaccccagactacttcctataaatttctcctgggamacctgcctttgtatgtggaagtatacctggcttwttaaaatatatgtatttaaaaacaaaaagcaacagtaatctatgtgtttctgtaacaaattgggatctgtcttggcrttaaaccacatcatggaccaaatgtgccatactaatgaygagcatttagyacaatttgagactgaaatttagtacactatgttctaggtcagtctaacagtttgcctgctgtatttatagtaaccattttcctttggactgttcaagcaaaaaaggtaactaactgcttcatctccttttgcgcttatttggaaattttagttatagtgtttaactggcatggattaatagagttggagttttatttttaagaaaaattcacaagctaacttccactaatccattatcctttattttattgaaatgtataattaacttaactgaagaaaaggttcttcttgggagtatgttgtcataacatttaaagagatttcccttcatttaaactaaattactgttttatgttgatctgcatatttctgtatatttgtcatgacagtgcttgcatcctatttggtgtactcagcaaataaacttttcrttttaaa

SEQ ID NO: 3898 - DNA, 1462 bp, Homo sapiens
agagcgagagaaggggaaagacaagtcgggagaggccggtaggcgtgaggcgggcctgaagcggcagcgggcggccttcgtccggcgagagctaggccgaggacccgaagggmgggcgggggtctcctccaggctgcgcgctcggagccgcctgctgggcttgggcggggcgcggggcccgcggccgccctacccggctcagtcctctggggctcgggatccgcatcgggatcgggccgccatggacgacaaggcgttcaccaaggagctggaccagtgggtcgagcagctgaacgagtgtaagcagctgaacgagaaccaagtgcggacgctgtgcgagaaggcaaaggaaattttaacaaaagaatcaaatgtgcaagaggttcgttgccctgttactgtctgtggagatgtgcatggtcaatttcatgatcttatggaactctttagaattggtggaaaatcaccggatacaaactacttattcatgggtgactatgtagacagaggatattattcagtggagactgtgactcttcttgtagcattaaaggtgcgttatccagaacgcattacaatattgagaggaaatcacgaaagccgacaaattacccaagtatatggcttttatgatgaatgtctgcgaaagtatgggaatgccaacgtttggaaatattttacagatctctttgattatcttccacttacagctttagtagatggacagatattctgcctccatggtggcctctctccatccatagacacactggatcatataagagccctggatcgtttacaggaagttccacatgagggcccaatgtgtgatctgttatggtcagatccagatgatcgtggtggatggggtatttcaccacgtggtgctggctacacatttggacaagacatttctgaaacctttaaccatgccaatggtctcacactggtttctcgtgcccaccagcttgtaatggagggatacaattggtgtcatgatcggaatgtggttaccattttcagtgcacccaattactgttatcgttgtgggaaccaggctgctatcatggaattagatgacactttaaaatattccttccttcaatttgacccagcgcctcgtcgtggtgagcctcatgttacacggcgcaccccagactacttcctataaatttctcctgggamacctgcctttgctggagtgcaatggtgtgatctcggctcactgcaacctccacctcccaagttcaaccgattctcctgcctcagcctcccaaatagctgggattacagacgatgatgatgatgattgagacatgatctcactctgtcacccaggctggagcacagaggtgagatcatggctcactgcaacctcaacctgtggggctccagtgatcctcccacctcagtctccagagtagctgagactacaggtgcaggcaatcacgcctggctaatt

SEQ ID NO: 3899 - DNA, 1784 bp, Homo sapiens
agagcgagagaaggggaaagacaagtcgggagaggccggtaggcgtgaggcgggcctgaagcggcagcgggcggccttcgtccggcgagagctaggccgaggacccgaagggmgggcgggggtctcctccaggctgcgcgctcggagccgcctgctgggcttgggcggggcgcggggcccgcggccgccctacccggctcagtcctctggggctcgggatccgcatcgggatcgggccgccatggacgacaaggcgttcaccaaggagctggaccagtgggtcgagcagctgaacgagtgtaagcagctgaacgagaaccaagtgcggacgctgtgcgagaaggcaaaggaaattttaacaaaagaatcaaatgtgcaagaggttcgttgccctgttactgtctgtggagatgtgcatggtcaatttcatgatcttatggaactctttagaattggtggaaaatcaccggatacaaactacttattcatgggtgactatgtagacagaggatattattcagtggagactgtgactcttcttgtagcattaaaggtgcgttatccagaacgcattacaatattgagaggaaatcacgaaagccgacaaattacccaagtatatggcttttatgatgaatgtctgcgaaagtatgggaatgccaacgtttggaaatattttacagatctctttgattatcttccacttacagctttagtagatggacagatattctgcctccatggtggcctctctccatccatagacacactggatcatataagagccctggatcgtttacaggaagttccacatgagggcccaatgtgtgatctgttatggtcagatccagatgatcgtggtggatggggtatttcaccacgtggtgctggctacacatttggacaagacatttctgaaacctttaaccatgccaatggtctcacactggtttctcgtgcccaccagcttgtaatggagggatacaattggtgtcatgatcggaatgtggttaccattttcagtgcacccaattactgttatcgttgtgggaaccaggctgctatcatggaattagatgacactttaaaatattccttccttcaatttgacccagcgcctcgtcgtggtgagcctcatgttacacggcgcaccccagactacttcctataaatttctcctgggamacctgcctttgtatgtggaagtatacctggcttwttaaaatatatgtatttaaaaacaaaaagcaacagtaatctatgtgtttctgtaacaaattgggatctgtcttggcrttaaaccacatcatggaccaaatgtgccatactaatgaygagcatttagyacaatttgagactgaaatttagtacactatgttctaggtcagtctaacagtttgcctgctgtatttatagtaaccattttcctttggactgttcaagcaaaaaaggtaactaactgcttcatctccttttgcgcttatttggaaattttagttatagtgtttaactggcatggattaatagagttggagttttatttttaagaaaaattcacaagctaacttccactaatccattatcctttattttattgaaatgtataattaacttaactgaagaaaaggttcttcttgggagtatgttgtcataacatttaaagagatttcccttcatttaaactaaattactgttttatgttgatctgcatatttctgtatatttgtcatgacagtgcttgcatcctatttggtgtactcagcaaataaacttttcrttttaaa

SEQ ID NO: 3900 - DNA, 1779 bp, Homo sapiens
agagcgagagaaggggaaagacaagtcgggagaggccggtaggcgtgaggcgggcctgaagcggcagcgggcggccttcgtccggcgagagctaggccgaggacccgaagggmgggcgggggtctcctccaggctgcgcgctcggagccgcctgctgggcttgggcggggcgcggggcccgcggccgccctacccggctcagtcctctggggctcgggatccgcatcgggatcgggccgccatggacgacaaggcgttcaccaaggagctggaccagtgggtcgagcagctgaacgagtgtaagcagctgaacgagaaccaagtgcggacgctgtgcgagaaggcaaaggaaattttaacaaaagaatcaaatgtgcaagaggttcgttgccctgttactgtctgtggagatgtgcatggtcaatttcatgatcttatggaactctttagaattggtggaaaatcaccggatacaaactacttattcatgggtgactatgtagacagaggatattattcagtggagactgtgactcttcttgtagcattaaagttatccagaacgcattacaatattgagaggaaatcacgaaagccgacaaattacccaagtatatggcttttatgatgaatgtctgcgaaagtatgggaatgccaacgtttggaaatattttacagatctctttgattatcttccacttacagctttagtagatggacagatattctgcctccatggtggcctctctccatccatagacacactggatcatataagagccctggatcgtttacaggaagttccacatgagggcccaatgtgtgatctgttatggtcagatccagatgatcgtggtggatggggtatttcaccacgtggtgctggctacacatttggacaagacatttctgaaacctttaaccatgccaatggtctcacactggtttctcgtgcccaccagcttgtaatggagggatacaattggtgtcatgatcggaatgtggttaccattttcagtgcacccaattactgttatcgttgtgggaaccaggctgctatcatggaattagatgacactttaaaatattccttccttcaatttgacccagcgcctcgtcgtggtgagcctcatgttacacggcgcaccccagactacttcctataaatttctcctgggamacctgcctttgtatgtggaagtatacctggcttwttaaaatatatgtatttaaaaacaaaaagcaacagtaatctatgtgtttctgtaacaaattgggatctgtcttggcrttaaaccacatcatggaccaaatgtgccatactaatgaygagcatttagyacaatttgagactgaaatttagtacactatgttctaggtcagtctaacagtttgcctgctgtatttatagtaaccattttcctttggactgttcaagcaaaaaaggtaactaactgcttcatctccttttgcgcttatttggaaattttagttatagtgtttaactggcatggattaatagagttggagttttatttttaagaaaaattcacaagctaacttccactaatccattatcctttattttattgaaatgtataattaacttaactgaagaaaaggttcttcttgggagtatgttgtcataacatttaaagagatttcccttcatttaaactaaattactgttttatgttgatctgcatatttctgtatatttgtcatgacagtgcttgcatcctatttggtgtactcagcaaataaacttttcrttttaaa

SEQ ID NO: 3901 - DNA, 1577 bp, Homo sapiens
tggggctcgggatccgcatcgggatcgggccgccatggacgacaaggcgttcaccaaggagctggaccagtgggtcgagcagctgaacgagtgtaagcagctgaacgagaaccaagtgcggacgctgtgcgagaaggcaaaggaaattttaacaaaagaatcaaatgtgcaagaggttcgttgccctgttactgtctgtggagatgtgcatggtcaatttcatgatcttatggaactctttagaattggtggaaaatcaccggatacaaactacttattcatgggtgactatgtagacagaggatattattcagtggagactgtgactcttcttgtagcattaaaggtgcgttatccagaacgcattacaatattgagaggaaatcacgaaagccgacaaattacccaagtatatggcttttatgatgaatgtctgcgaaagtatgggaatgccaacgtttggaaatattttacagatctctttgattatcttccacttacagctttagtagatggacagatattctgcctccatggtggcctctctccatccatagacacactggatcatataagagccctggatcgtttacaggaagttccacatgagggcccaatgtgtgatctgttatggtcagatccagatgatcgtggtggatggggtatttcaccacgtggtgctggctacacatttggacaagacatttctgaaacctttaaccatgccaatggtctcacactggtttctcgtgcccaccagcttgtaatggagggatacaattggtgtcatgatcggaatgtggttaccattttcagtgcacccaattactgttatcgttgtgggaaccaggctgctatcatggaattagatgacactttaaaatattccttccttcaatttgacccagcgcctcgtcgtggtgagcctcatgttacacggcgcaccccagactacttcctataaatttctcctgggamacctgcctttgtatgtggaagtatacctggcttwttaaaatatatgtatttaaaaacaaaaagcaacagtaatctatgtgtttctgtaacaaattgggatctgtcttggcrttaaaccacatcatggaccaaatgtgccatactaatgaygagcatttagyacaatttgagactgaaatttagtacactatgttctaggtcagtctaacagtttgcctgctgtatttatagtaaccattttcctttggactgttcaagcaaaaaaggtaactaactgcttcatctccttttgcgcttatttggaaattttagttatagtgtttaactggcatggattaatagagttggagttttatttttaagaaaaattcacaagctaacttccactaatccattatcctttattttattgaaatgtataattaacttaactgaagaaaaggttcttcttgggagtatgttgtcataacatttaaagagatttcccttcatttaaactaaattactgttttatgttgatctgcatatttctgtatatttgtcatgacagtgcttgcatcctatttggtgtactcagcaaataaacttttcrttttaaa

SEQ ID NO: 3902 - DNA, 3415 bp, Homo sapiens
tgtcagggtcttagcactggtgaaaagccataagtgaaagtaatgaagactagggcactcttcargtcagcccaccgggtccacccactcttctgcccttcacytccatcagtgagatcaaacaaaacatacccaatcagtgaagaagccaggccagtcccaaaaagccattggggggccagaagaccctcatccatataccaccagataaccagaaaaacaaaaacactgcacagctgcrggatcaccacactggactcaaataccatagcccaatattggtatttccragcatggatgtttttccagagctcttccaggaaccgccggtccacaaagttatcaggaaagggctgttgctcatacaagaccctctgccactttacctccttggtgttwgttacaggttgggtacacataatcctttcattcaaactcaggctagtttaatcatccctctcacagaggtccatgtggttcttgttgatgacattttgaaatgagacctccctggaaattccatgccttggttgatattctgctgacctttccttgttttcaaaggcagcaatccaggccaggcctacaatagatgagtttgtctctgaggcaggatataatacagccaagttcctggggatgcgtgactgggagatggcagttgcctgcctttttccttgtaagggttttttttttttttgagatggagtcttgctctgtcgcccaggctggagtgcagtggcgcgatctcggctcactgcaacctctgcctcccaggttcacgccattctcctgcctcagcctcccaagtagctgggactacaggcgcctgccaccatgcctggctaatttttttgtatttttagtagagacggggtttcaccgtgttagccaggatggtctcgatctcctgacctcgtgatccacccgccttggcctcccaaagtgctgggattgtaggcgtgagccactgcgccctgccatgagggtacttttaaagaagataacatcttccatggtgtattcaatgaggtcgtgtctggaattgttcccttaaggtggaggctgctctgtggccactgtgcctggcggttgtatgatcctgggttcctgggcagagaagcctcagcctcagagtgtttggggccttttcctgccgctccaaggctgaaggagaggagcttaaccccaactgcacagcgctgatcaccacttcctgcagtcattcttcctaaatctcaaaaactcttcttttgtaagagtagattcttgcaagatatttttcccctcctgagttcttacattgccagagttccatttggaccgtttgaaatcttgatgcatgaataactggcttcacagactcttggccgcccactacctcggtgtccactggtggagttctgcaactggcaaaagtcaagaatgaaggaagcaaacttcagaaccacaatattcatattgaatcattttgttgttgctctatgaagataagctaattttcttcctggaatctcataggattattactaagggccagggagatccacttcgttcatttagtcactcaggaagcattgctaagcatccccctgtaccttcccctacagctctccttccaaaacgaaacatcctttggagtgtgttgtcctccagaatcgaatggattctatatgctgcattcagtaacaggttgtggagacaagtgtcttttcctgaaattgctaagtgtatttggcagtactttactacttgtggatagaactgagagtgaggtcagtatcaccaagcctcttggatttcttcagtagtctcatggataagtgaatgtttaaagtaactactactttgttggctcttggttgggyggatggattctcagtcctggtgtttttaaaaatctcattccagccgggcgcggtggctcacgcctgtaatcctagcactttgggaggctgaggcgggcagatcacctgaggtcaggarttcgaaaccagccttaccaacatggcaaaacccatctctattaaaaatacaaaaattagccgggtgtggtggcacgtgcctgtaatcccagctactcgggaggctgaggcaggagaatcacttgaaccctggaggtggtggttgcaatgagccgagattgcgccattgcactctagcctgggtgacagagcgagactccgtctcaaaaaaaaaaaaaatcgcattccgtctaaagcaagctacaaaatgtgattatttatgtcacgatatgacccagccataaatgtacttcaggtaagaaggacactgacatgatatcttactgatcaaatgyagtcagtagktatatatgaacttttttctctgtgaagaaaagctattaataagtttgacttaataggcctatagtatgcacatactggccaagattctaaatggattattcagcggttctgtttttgtggaggtgcttattctcatttctccaaagccttaagattcctgggaatagaggaaatgttgctgccaccagctttgctggtgaatttcaaagagaataggtgtttgctgtttgatttctagtgaccttttggcgagctctgatttataggtagaacatttgtgtttcttttcattttgaggccaggtggtagagtggaaagactgggagctgtcaggaaaccaaggcttggatctccactctgttatgtaccagctggggcaaatcagggcccattcccaactcctttaaaatgaaaggactagacttggtctttaagctcccttccgattctaacatttggtggtagcaggattgtgcacaaagctcctaatttagagaaagatctgggttttagtcttttctcctctatcgccgccttaccggttgtacaacattggaccagccattctccccaaggcctcggcattttcattgttaaatgggaacactcctaattcacactgttgctgtgaggattacatttggtaatgaatgatagaatgctttgtacatggaaaaggactatacctttcttttttaactacaaaggcgaacatgtaaccctctacctgtgggcgcacatttgctgtggtgttacgttccactggtagcgcccaacctcccttcattcaagcacattttacgggcctacagggaaggttttcttcctgtcctctcctaagacttgtttatgttcatcatctcttctatactagagctgcagtcttacatttgcttacttcctgacatccacccccaccccagtgatttctcccyatctccacctctatattatttgaactaaatgaattcatgaatgaacaaatgagtggatgaatgaatggtaatggataatgggctatgaagtcatatttaaaggcactatctcatttaaaaacaatctaaataaataactacaatgatatt

SEQ ID NO: 3903 - DNA, 4772 bp, Homo sapiens
cacagggaacgggtagggtcccacggtttggggagagacatggcagtcctcaagggctgggatcagggcgcagccagggtttctgatggctttgctgatggtcaggacccaggcatgccaggcaaggcctcagcccagcagttgccaagcgtgtagccactttgggcccgtggagagagtcgcgctgcggagcccccagggggacctgaggtcacaagagcctcgatgcacctgagcgcggagctgggggtccctggagcygctgtccccacctgcggcgctggagccctggaggtgtccaggggcttccttggaacgtggagacgtgctggttaaacgtggagccccgggccagccgggcactgggggctgcaggtggagggaggtggatgctctccctcgtgggggcgtgtcttttccacaggaaagggaaagggggagggacacgggtcagcagtggggggctgtgcagtctcgcagatcttcacccttggttcttgaactctggaccctgagccctgccgagggtcccgcaaaggtgggcaaggagctcccggctgcttggtctccgcagtgttggggctgccagcagggggacgctgggcccccggggacctgacccgtgctccctccccaccccgcagtctccatcgactccatccaggaggtgagtgaggggcggcagtcggaggtcttccagcgctaccctgacggcagcttcgaccccaactgctgcttcagcatctaccacggcagccaccgcgagtcgctggacctggtctccaccagcagcgaggtggcgcgcacctgggtcactggcctgcgctacctcatggccggcatcagcgacgaggacagcctggctcgccgccagcgcaccagggaccatggctgaagcagacgtttgacgaggccgacaagaacggggatggcagcctgagcattggcgaggtcctgcagctgctgcacaagctcaacgtgaacctgccccggcagagggtgaagcagatgttcagggaagcggacacggatgaccaccaagggacgctgggttttgaagagttctgtgccttctacaagatgatgtccacccgccgggacctctacctgctcatgctgacctacagcaaccacaaggaccacctggatgccgccagcctgcagcgcttcctgcaggtggagcagaagatggcgggtgtgaccctcgagagctgccaggacatcatcgagcagtttgagccatgcccagaaaacaagagtaaggggctgctgggcattgatggcttcaccaactayaccaggagccctgctggtgacatcttcaaccctgagcaccaccatgtgcaccaggacatgacgcagccgctgagccactacttcatcacctcgtcccacaacacctacctcgtgggtgaccagctcatgtcccagtcacgggtggacatgtatgcttgggtcctgcaggctggctgccgctgcgtggaggtggactgctgggatgggcccgacggggagcccattgtgcaccatggctacactctgacttccaagatcctcttcaaagacgtcattgaaaccatcaacaaatatgccttcatcaagaatgagtacccagtgatcctgtccatcgaaaaccactgcagtgtcatccagcagaagaaaatggcccagtatctgactgacatccttggggacaagctggacctgtcatcagtgagcagtgaagatgccaccacactcccctctccacagatgctcaagggcaagatcctcgtgaaggggaagaagctcccagccaacatcagcgaggatgcggaggaaggcgaggtgtctgatgaggacagtgctgatgagattgacgatgactgcaagctcctcaatggggatgcatccaccaatcgaaagcgtgtagaaaacactgctaagaggaaactggattccctcatcaaagagtcgaagattcgggactgtgaggaccccaacaacttctccgtctccacactgtccccatctggaaagctcggacgcaakagcaaggctgaagaggacgtggagtctggggaggatgccggggccagcagacgcaatggccgcctcgtcgtgggaagcttctccaggcgcaagaagaagggcagcaagctgaagaaggcggccagcgtggaggagggagatgagggtcaggactccccgggaggccagagccgaggggcgacccggcagaagaagaccatgaagctgtcccgggccctctctgacctggtgaagtacaccaagtccgtggccacccacgacatakagatggaggacgccggctgccaaatggttgccctgaactaccagtcagaggggcggatgctgcagctgaaccgagccaagttcagcgccaacggtggctgcggctacgtactcaagcctgggtgcatgtgccagggcgtgttcaaccccaactcggaggaccccctgcccgggcagctcaagaagcagctggtgctccggatcatcagtggccagcagcttcccaagccgcgcgactccatgctgggggaccgtggggagatcatcgacccctttgtggaggtggagatcattgggctccctgtggactgcagcagggagcagacccgcgtggtggacgacaacgggttcaaccccacctgggaggagaccctggttttcatggtgcacatgccggagatcgcgctggtccgcttcctcgtctgggaccacgatcccatygggcgtgacttcattggccagaggacgctggccttcagcagcatgatgccaggctacagacacgtgtacctagaagggatggaagaggcctccatcttcgtgcatgtggctgtcagtgacatcagcggtaaggtcaagcaggctctgggcctaaaaggcctcttcctccgaggcccaaagcccggctcgctggacagtcatgctgctgggcggcccccggcccggccctccgttagccagcggatcctgcggcgcacggccagcgccccgaccaagagccagaagccgggccgcaggggcttcccggagctggtcctgggtacacgggacacaggctccaagggggtggcagacgatgtggtgccccccgggcccggacctgctccggaagccccagcccaggaggggcccggcagcggcagcccccgagacacccgccccctctccacgcagcggccactccccccactgtgcagcctggaaaccatcgctgaggagcccgccccaggccctggtcccccgccaccagcggctgtccccaccagctcttctcagggacggcccccataccccacaggacccggagccaatgtggcaagccccctagaggacactgaggagccccgagacagcaggcctcggccgtgcaacggcgagggcgccggcggggcatacgagagggcccccggcagccagacggacggcaggagccagccccggaccctgggccacctgcccgtgattagaagggtgaagagtgaggggcaggtgcccacggagcccctgggagggtggcggcccctggccgctccctttccagctcctgccgtgtactccgatgccacgggcagtgacccgctgtggcagcggctggagccatgtggccaccgagacagcgtttcctcctcctccagcatgtcatccagcgacactgtcattgacctctccctgcccagcctgggcctgggccgcagccgtgagaacctcgctggagcccacatgggacgcctgccccccaggccccactcggcttcggctgcccgcccagacctgccacctgtgaccaagagcaaatccaaccccaaccttcgggctacaggccagcggcctcccatacctgacgaactgcagcccaggtccctggccccaaggatggctggcctccccttccggcctccctggggctgcctttccctggtgggcgtgcaggactgccccgtggctgccaagtccaagagcctgggcgacctcactgctgatgactttgcccctagctttgagggcggctcccgcagactgagccacagcctgggcctcccgggagggacacggcgggtgtcggggccaggggtgagacgggacaccctgacagagcagctgcgctggctcactgtcttccagcaggcaggagacatcacgtcacccaccagcctgggcccggctggggagggggtggcagggggccctggttttgtgcggcgctcctcctcccgcagccacagccgcgtgcgtgccattgccagccgggcccgccaggcccaggagcggcagcagagactgcagggcctgggccggcagggacccccagaagaggagcggggcacccccgagggcgcctgctccgtgggccacgagggcagtgtggatgcaccagcaccctccaagggagccctcgggccagcatccgcggctgctgaaaacctggtcctgctccgcctctgaccgtcagtggtgsgaacctgggcggctctggaggcccagggcaggggtgggcgtgttgtttgctcaggaaacagggcagccaggcccccaaaactgtgtccccctggctgccctgtgtcccctccrcccctgcctccctcctgcccctgctcccggggaggaaaggctaaagctgctggcccggggcccacaggaggggcttcgaggctggccctgccaggcagttttcccggcgttttaggatctgtacatagagaaatatttaaatttttagaagcaaaacttatacaacattaaaatgataccaagtccct

SEQ ID NO: 3904 - DNA, 4300 bp, Homo sapiens
gccctttgctgcggcagctttctgttctccctggctccctgcacggaactgagcttyggtgtgtgatgcgctgctggcccaggctacaccccgacaagggacaccgggggcccygggagcagagagacctcagagcagcctcctcctgcctcctgtggacggccggccccagctggtgatcccagccagtcccagctttcagttgctgcccccaccgacagtcctcagtccctccatgatggctcccccgacagccggcccccttcctggcccagctcttccgcctgaggacccagggccgkatccggagagcaggtggcttttcttgagcgccaacattctgcccgtggtggagcggtgcatgggtgccatgcaagaggggatgcagatggtgaagctgcgtggcggctccaagggcctggtccgcttctactacctggacgagcaccgctcctgcatccgctggaggccctcacgcaagaacgagaaggccaagatctccatcgactccatccaggaggtgagtgaggggcggcagtcggaggtcttccagcgctaccctgacggcagcttccgacccctttgtggaggtggagatcattgggctccctgtggactgcagcagggagcagacccgcgtggtggacgacaacgggttcaaccccacctgggaggagaccctggttttcatggtgcacatgccggagatcgcgctggtccgcttcctcgtctgggaccacgatcccatygggcgtgacttcattggccagaggacgctggccttcagcagcatgatgccaggctacagacacgtgtacctagaagggatggaagaggcctccatcttcgtgcatgtggctgtcagtgacatcagcggtaaggtcaagcaggctctgggcctaaaaggcctcttcctccgaggcccaaagcccggctcgctggacagtcatgctgctgggcggcccccggcccggccctccgttagccagcggatcctgcggcgcacggccagcgccccgaccaagagccagaagccgggccgcaggggcttcccggagctggtcctgggtacacgggacacaggctccaagggggtggcagacgatgtggtgccccccgggcccggacctgctccggaagccccagcccaggaggggcccggcagcggcagcccccgaggtaaggcgccagctgcggtggcagagaagagccctgtgcgagtgcggccccygcgtgtcctggacggccccgggcctgctgggatggccgccacatgcatgaagtgtgtggtgggatcctgcgccggcgtgaacaccgggggcctgcagagggagcggccacccagcccggggcctgcaagcaggcaggcagccattcgccagcagccccgggcccgggctgactcactgggggccccctgctgtggcctggaccctcacgctatcccggggagaagcagagaggcccccaagggtcctggggcctggaggcagggtccaggcggtagcggctccatgtcctcggactccagcagcccagacagcccgggcatccccgaaaggtccccccgctggcctgagggtgcctgcaggcaaccgggggccctgcagggagagatgagtgccttgtttgctcaaaagctggaggagatcaggagtaaatcccccatgttctccgccggtaagcccctcttgccctgcgtggtcctcccgcacgcccctggcatggctgggcctgggtcacctgctgctgcttctgcgtggacggtgtcgcctcgtgtgctcgtgctcgtggctctgtatccgtggcactgtctccgtggcactctgctcccttggcttgcctgtggcccayagccccagccctcctgtctgagcttgaggccctgggacttgggtggagctggtttgaggcccgacaggctgggaagaaccagctgctcttgctgagggtctggggccgggactgtggcctgacatgctgggcccctcyggctgggcgcttccccaaactcacctcctgggcggctggcgacctgcatggcccctgatgcctttcctgggactgggggccaygtaccatcccattcccacctccctctagggcaggctccaggggtccctactgggaagtctgatgtgggcaggtagtgcagctgctgggcgtctcctgcgcccctgggacgcctggagcctgctgagtgctgcgtggagtagattccctgggccccagggcttcgctgctttgggctgaagcaccccactagaagggtgtctccttagcctggagggagggacatacacggagcccgccccacaccaccctgcccctccagacccccctgaccaagctttcctttctgcccccacccacgctgcctccgtagttaggaactgagagcggcgagtgacaggtaacggggcccagccccggtgtcccgtgctgtcccagcccaaggagggccccgtgtgcggcacagggcgtggactgggccccagcagcagcagggtggggacaccgagtgtgccgcgcccgggggatgcctcggggtgggagctgggcctggcgaccctcggcacagggcaccggggacaccaccctgatccgactcctctccgcctctctccctgcctccctctctctcttctgcttctccctctggctctctctcactcccccacctccccacagacacccgccccctctccacgcagcggccactccccccactgtgcagcctggaaaccatcgctgaggagcccgccccaggccctggtcccccgccaccagcggctgtccccaccagctcttctcagggacggcccccataccccacaggacccggagccaatgtggcaagccccctagaggacactgaggagccccgagacagcaggcctcggccgtgcaacggcgagggcgccggcggggcatacgagagggcccccggcagccagacggacggcaggagccagccccggaccctgggccacctgcccgtgattagaagggtgaagagtgaggggcaggtgcccacggagcccctgggagggtggcggcccctggccgctccctttccagctcctgccgtgtactccgatgccacgggcagtgacccgctgtggcagcggctggagccatgtggccaccgagacagcgtttcctcctcctccagcatgtcatccagcgacactgtcattgacctctccctgcccagcctgggcctgggccgcagccgtgagaacctcgctggagcccacatgggacgcctgccccccaggccccactcggcttcggctgcccgcccagacctgccacctgtgaccaagagcaaatccaaccccaaccttcgggctacaggccagcggcctcccatacctgacgaactgcagcccaggtccctggccccaaggatggctggcctccccttccggcctccctggggctgcctttccctggtgggcgtgcaggactgccccgtggctgccaagtccaagagcctgggcgacctcactgctgatgactttgcccctagctttgagggcggctcccgcagactgagccacagcctgggcctcccgggagggacacggcgggtgtcggggccaggggtgagacgggacaccctgacagagcagctgcgctggctcactgtcttccagcaggcaggagacatcacgtcacccaccagcctgggcccggctggggagggggtggcagggggccctggttttgtgcggcgctcctcctcccgcagccacagccgcgtgcgtgccattgccagccgggcccgccaggcccaggagcggcagcagagactgcagggcctgggccggcagggacccccagaagaggagcggggcacccccgagggcgcctgctccgtgggccacgagggcagtgtggatgcaccagcaccctccaagggagccctcgggccagcatccgcggctgctgaaaacctggtcctgctccgcctctgaccgtcagtggtgsgaacctgggcggctctggaggcccagggcaggggtgggcgtgttgtttgctcaggaaacagggcagccaggcccccaaaactgtgtccccctggctgccctgtgtcccctccrcccctgcctccctcctgcccctgctcccggggaggaaaggctaaagctgctggcccggggcccacaggaggggcttcgaggctggccctgccaggcagttttcccggcgttttaggatctgtacatagagaaatatttaaatttttagaagcaaaacttatacaacattaaaatgataccaagtccctttc

SEQ ID NO: 3905 - DNA, 6452 bp, Homo sapiens
cacagggaacgggtagggtcccacggtttggggagagacatggcagtcctcaagggctgggatcagggcgcagccagggtttctgatggctttgctgatggtcaggacccaggcatgccaggcaaggcctcagcccagcagttgccaagcgtgtagccactttgggcccgtggagagagtcgcgctgcggagcccccagggggacctgaggtcacaagagcctcgatgcacctgagcgcggagctgggggtccctggagcygctgtccccacctgcggcgctggagccctggaggtgtccaggggcttccttggaacgtggagacgtgctggttaaacgtggagccccgggccagccgggcactgggggctgcaggtggagggaggtggatgctctccctcgtgggggcgtgtcttttccacaggaaagggaaagggggagggacacgggtcagcagtggggggctgtgcagtctcgcagatcttcacccttggttcttgaactctggaccctgagccctgccgagggtcccgcaaaggtgggcaaggagctcccggctgcttggtctccgcagtgttggggctgccagcagggggacgctgggcccccggggacctgacccgtgctccctccccaccccgcagtctccatcgactccatccaggaggtgagtgaggggcggcagtcggaggtcttccagcgctaccctgacggcagcttcgaccccaactgctgcttcagcatctaccacggcagccaccgcgagtcgctggacctggtctccaccagcagcgaggtggcgcgcacctgggtcactggcctgcgctacctcatggccggcatcagcgacgaggacagcctggctcgccgccagcgcaccagggaccatggctgaagcagacgtttgacgaggccgacaagaacggggatggcagcctgagcattggcgaggtcctgcagctgctgcacaagctcaacgtgaacctgccccggcagagggtgaagcagatgttcagggaagcggacacggatgaccaccaagggacgctgggttttgaagagttctgtgccttctacaagatgatgtccacccgccgggacctctacctgctcatgctgacctacagcaaccacaaggaccacctggatgccgccagcctgcagcgcttcctgcaggtggagcagaagatggcgggtgtgaccctcgagagctgccaggacatcatcgagcagtttgagccatgcccagaaaacaagagtaaggggctgctgggcattgatggcttcaccaactayaccaggagccctgctggtgacatcttcaaccctgagcaccaccatgtgcaccaggacatgacgcagccgctgagccactacttcatcacctcgtcccacaacacctacctcgtgggtgaccagctcatgtcccagtcacgggtggacatgtatgcttgggtcctgcaggctggctgccgctgcgtggaggtggactgctgggatgggcccgacggggagcccattgtgcaccatggctacactctgacttccaagatcctcttcaaagacgtcattgaaaccatcaacaaatatgccttcatcaagaatgagtacccagtgatcctgtccatcgaaaaccactgcagtgtcatccagcagaagaaaatggcccagtatctgactgacatccttggggacaagctggacctgtcatcagtgagcagtgaagatgccaccacactcccctctccacagatgctcaagggcaagatcctcgtgaaggggaagaagctcccagccaacatcagcgaggatgcggaggaaggcgaggtgtctgatgaggacagtgctgatgagattgacgatgactgcaagctcctcaatggggatgcatccaccaatcgaaagcgtgtagaaaacactgctaagaggaaactggattccctcatcaaagagtcgaagattcgggactgtgaggaccccaacaacttctccgtctccacactgtccccatctggaaagctcggacgcaakagcaaggctgaagaggacgtggagtctggggaggatgccggggccagcagacgcaatggccgcctcgtcgtgggaagcttctccaggcgcaagaagaagggcagcaagctgaagaaggcggccagcgtggaggagggagatgagggtcaggactccccgggaggccagagccgaggggcgacccggcagaagaagaccatgaagctgtcccgggccctctctgacctggtgaagtacaccaagtccgtggccacccacgacatakagatggaggcggcgtccagctggcaggtgtcgtccttcagygagaccaaggcccaccagattctgcagcagaagccggcgcagtacctacgcttcaaccagcagcagctctcccgcatctacccctcctcctaccgtgtggactccagcaactacaacccgcagcccttctggaacgccggctgccaaatggttgccctgaactaccagtcagaggggcggatgctgcagctgaaccgagccaagttcagcgccaacggtggctgcggctacgtactcaagcctgggtgcatgtgccagggcgtgttcaaccccaactcggaggaccccctgcccgggcagctcaagaagcagctggtgctccggatcatcagtggccagcagcttcccaagccgcgcgactccatgctgggggaccgtggggagatcatcgacccctttgtggaggtggagatcattgggctccctgtggactgcagcagggagcagacccgcgtggtggacgacaacgggttcaaccccacctgggaggagaccctggttttcatggtgcacatgccggagatcgcgctggtccgcttcctcgtctgggaccacgatcccatygggcgtgacttcattggccagaggacgctggccttcagcagcatgatgccaggctacagacacgtgtacctagaagggatggaagaggcctccatcttcgtgcatgtggctgtcagtgacatcagcggtaaggtcaagcaggctctgggcctaaaaggcctcttcctccgaggcccaaagcccggctcgctggacagtcatgctgctgggcggcccccggcccggccctccgttagccagcggatcctgcggcgcacggccagcgccccgaccaagagccagaagccgggccgcaggggcttcccggagctggtcctgggtacacgggacacaggctccaagggggtggcagacgatgtggtgccccccgggcccggacctgctccggaagccccagcccaggaggggcccggcagcggcagcccccgaggtaaggcgccagctgcggtggcagagaagagccctgtgcgagtgcggccccygcgtgtcctggacggccccgggcctgctgggatggccgccacatgcatgaagtgtgtggtgggatcctgcgccggcgtgaacaccgggggcctgcagagggagcggccacccagcccggggcctgcaagcaggcaggcagccattcgccagcagccccgggcccgggctgactcactgggggccccctgctgtggcctggaccctcacgctatcccggggagaagcagagaggcccccaagggtcctggggcctggaggcagggtccaggcggtagcggctccatgtcctcggactccagcagcccagacagcccgggcatccccgaaaggtccccccgctggcctgagggtgcctgcaggcaaccgggggccctgcagggagagatgagtgccttgtttgctcaaaagctggaggagatcaggagtaaatcccccatgttctccgccggtaagcccctcttgccctgcgtggtcctcccgcacgcccctggcatggctgggcctgggtcacctgctgctgcttctgcgtggacggtgtcgcctcgtgtgctcgtgctcgtggctctgtatccgtggcactgtctccgtggcactctgctcccttggcttgcctgtggcccayagccccagccctcctgtctgagcttgaggccctgggacttgggtggagctggtttgaggcccgacaggctgggaagaaccagctgctcttgctgagggtctggggccgggactgtggcctgacatgctgggcccctcyggctgggcgcttccccaaactcacctcctgggcggctggcgacctgcatggcccctgatgcctttcctgggactgggggccaygtaccatcccattcccacctccctctagggcaggctccaggggtccctactgggaagtctgatgtgggcaggtagtgcagctgctgggcgtctcctgcgcccctgggacgcctggagcctgctgagtgctgcgtggagtagattccctgggccccagggcttcgctgctttgggctgaagcaccccactagaagggtgtctccttagcctggagggagggacatacacggagcccgccccacaccaccctgcccctccagacccccctgaccaagctttcctttctgcccccacccacgctgcctccgtagttaggaactgagagcggcgagtgacaggtaacggggcccagccccggtgtcccgtgctgtcccagcccaaggagggccccgtgtgcggcacagggcgtggactgggccccagcagcagcagggtggggacaccgagtgtgccgcgcccgggggatgcctcggggtgggagctgggcctggcgaccctcggcacagggcaccggggacaccaccctgatccgactcctctccgcctctctccctgcctccctctctctcttctgcttctccctctggctctctctcactcccccacctccccacagacacccgccccctctccacgcagcggccactccccccactgtgcagcctggaaaccatcgctgaggagcccgccccaggccctggtcccccgccaccagcggctgtccccaccagctcttctcagggacggcccccataccccacaggacccggagccaatgtggcaagccccctagaggacactgaggagccccgagacagcaggcctcggccgtgcaacggcgagggcgccggcggggcatacgagagggcccccggcagccagacggacggcaggagccagccccggaccctgggccacctgcccgtgattagaagggtgaagagtgaggggcaggtgcccacggagcccctgggagggtggcggcccctggccgctccctttccagctcctgccgtgtactccgatgccacgggcagtgacccgctgtggcagcggctggagccatgtggccaccgagacagcgtttcctcctcctccagcatgtcatccagcgacactgtcattgacctctccctgcccagcctgggcctgggccgcagccgtgagaacctcgctggagcccacatgggacgcctgccccccaggccccactcggcttcggctgcccgcccagacctgccacctgtgaccaagagcaaatccaaccccaaccttcgggctacaggccagcggcctcccatacctgacgaactgcagcccaggtccctggccccaaggatggctggcctccccttccggcctccctggggctgcctttccctggtgggcgtgcaggactgccccgtggctgccaagtccaagagcctgggcgacctcactgctgatgactttgcccctagctttgagggcggctcccgcagactgagccacagcctgggcctcccgggagggacacggcgggtgtcggggccaggggtgagacgggacaccctgacagagcagctgcgctggctcactgtcttccagcaggcaggagacatcacgtcacccaccagcctgggcccggctggggagggggtggcagggggccctggttttgtgcggcgctcctcctcccgcagccacagccgcgtgcgtgccattgccagccgggcccgccaggcccaggagcggcagcagagactgcagggcctgggccggcagggacccccagaagaggagcggggcacccccgagggcgcctgctccgtgggccacgagggcagtgtggatgcaccagcaccctccaagggagccctcgggccagcatccgcggctgctgaaaacctggtcctgctccgcctctgaccgtcagtggtgsgaacctgggcggctctggaggcccagggcaggggtgggcgtgttgtttgctcaggaaacagggcagccaggcccccaaaactgtgtccccctggctgccctgtgtcccctccrcccctgcctccctcctgcccctgctcccggggaggaaaggctaaagctgctggcccggggcccacaggaggggcttcgaggctggccctgccaggcagttttcccggcgttttaggatctgtacatagagaaatatttaaatttttagaagcaaaacttatacaacattaaaatgataccaagtccctttc

SEQ ID NO: 3906 - DNA, 4340 bp, Homo sapiens
cccgcgcgcctccggcccctgcggcccccgaagagaacgagagggcgagcgagcgcggcgttcccgggccggcccggccccctcccttcaccatcgccggccctccgccgccttcctccgcttccacctcctctccccccccccaagttgaggccccctccgggggggggaggcccgggaccgggacccgtagcgaattctcctaactccctcgacctctcctctcgcccggcccgagtgtgaggagaagggcccggcccggcctgcgtcgtgtgtgaggaggaccccgggcgggcccacgggccgtgtggggcctggtcyggcccgccgggtgtgtgaagaccggggcccggtgctgcccggccggagggcgagcggaggggaggggcctggtccggcccggccggtgcgtgaggactggggcccgggcccggcgccgccgccgccgccgccgccgcgatggcccagcagcagatgaccagctcgcagaaggccctgatgctcgagctgaaatccctgcaggaggaaccggtggagggcttccggatcaccctggtggacgagtccgacctctacaactgggaggtggccatcttcggaccccccaacaccctctacgaaggcggctacttcaaggcgcatattaaatttcctattgactacccctattcaccacctaccttcagattcttgaccaaaatgtggcaccccaacatttatgagaatggagatgtatgcatttcgattcttcatccgcctgtagatgacccacagagtggagaactgccttctgaaaggtggaatcctactcagaatgtgaggactatcctattaagtgtaatctcactgcttaatgagcccaacaccttctccccagccaatgtcgatgcttcagttatgttcaggaaatggagagacagtaaaggaaaagacaaagaatatgctgaaattattaggaaacaagtttcagccactaaggccgaagcagaaaaggatggagtgaaggtccccacaaccctggcggaatactgcatcaaaactaaagtgccttccaatgacaacagctcagatttgctttacgacgacttgtatgatgacgacattgatgatgaagatgaggaggaggaagatgccgactgttatgatgatgatgattctgggaatgaggagtcgtgacgtgytccttcagtgcccctgtactgccctgccatctcaggccaaagggaggggagcaagtggggaccyggccatggcccctcagcaaaaacctattcacagcgggtggggaaacacacacagctcctgctgactccccttatggatctcagtttgctcctttttatggacctttaatggagagagagtaaccctccacagaatgtctgaattcttgcattctttacccttccatcactatattgattctttttttaaaaaayatgaacccaaactcccgcctcacttcgtctctacagaatgttcacagcaaaacacgtttggtctgtttttagattcttgaagaattcaatagtctttcaagatgtttaatgtgtttaaagctgggaacctgttgggagttcacaagtgctgcatatactgggtagcaaaagaaaatggaaaaaaacccacaaaacaaactttaaaaaaaaaaaaaaacaaatttgccaaggtttagctgctcatttacattagtgtgtgtgcattcgttcagccccatggtggtgaattctgtttctttcctttcctaaggctgggacatggtgggcatcagggactttgtgctaagcctgatgaaatgtgctccttcaatctccatgaaaccatcgtaacatggaggcctcagctgctctgaggagagaaatcagactttgttttttgaaatcgattgggatcgaaagcctgaaataaatattcatactttccatagaactgagcacttggttgctatttattttaaaggcagggttatttccccccagggagtggggcaagcggggaagttgggatgagtgcgtgtgggagcaaagagttaaaaatcactatgctaagtttggttgatgctactggggggaaaaagttgaaactactggtgaccactgttgggagaggaaacatctgttttatagatttagcatggccttcccatcaaaaatacactcgtaccatgacgttttgtttttgttttttaagtagccacttttaattactcagtattaatcctaggtgcatgtgttaagatttcggttttcatcgagctgcttatactgatagtgaaaaacttggatgtgtgtgagacgagttaccgccttcttcattggatgtgatctgaactttttttctcctttcaacatacttaggctgtggagtgcaagcagaattatgcatagaaattgtggcagggctgagggagttgactgcaggcagtttttaggccagataaggctagatcttcctgcaatgcacttgctgcagctttgattttccagatctcaatcgtgttgcttcaatcaatattgagatccagcagccttcaccatccaggagacttcagaacttgaaggtaatttttggttgttatgggggtgcaccagatcataggagggcattatttggaggaaaccgctataatgtaaaatcagatttcagaaggaaaatgcagcaaggactgactgtagtcctatttcagacccctgggcactagtgtcaactcctcctttggctcgtaactcagaaagaaccaaagggcagattagggacggggcaggagggatcctaggatggccagagtaggtgacgcttacttccttagctcctccttccattctgatctcagggttttcactcttcaaactcccaaacacatgacttcttcccagcagcccttcccggcctctaaagtttggtcccagcagcccttcccagcctctaaagtttggtctggtatgaaatgggactgtttaacaagcaaggctcttaggggacactgttgagcctggtcccagaatctgtgatctccacagggccagggttgctacttgcacccagaatctagtgattttagtcagatccatggaacagagcagcttcgtaatacattgtcaagttacctgattacaaactctcatagatgttggaactacctttttactccccatactttgtaagtaatgcttccagattaacctgcaaatcttgtggagccaaagcctctcacagtgctgatttacctcccccaaaatgcccccaaacccccatgcaagtttacagccagtagcttggtcttattctcttggagccctaaaattaagcctttcattcccctttgctaaagcatctcactcccagggcagccccagcaccctggcattgcgggaggtgctctgctgcacagctgttccatcaggccctattggcctctgttagacattgactcagggagccggagcgccaagtggaggttgtacctttcagccctttggggtgttaaaagtgtcaagggctgggtttgcctctgatgagtacaatcagttccagaagactgggtaagtctcttgctagcaggtggacattctggtattttagactgactgaacgaaacccagaggctggttccagagctctgtccctgagaacacatccctgtggaaaatacttgagtttgtaattttttttcccccttctgggagtggaggtctcaggctcaatccggaaccatgtacgtacagttttgcttattatttgatgtgacatgaactcaaaatcctgcatttttagattccttttagttctaattgaggcctcactagatgctcttcagttctgtgtattttgaggctgggtggagaagtatatgattctgctgttgattctttcagtcttccccccttctccttttatcaatcattccagagttattttctattagtcaaacttttttgtagaaccttctttcccttaccctggcaaattgcttctttacttgctggtttccttacgtttggggcacatgttgtaagaaactgattggaaggggaaatgtgcagctctccactggaaaggaactctccacccctcccatcctgataaaacaaacaaggtttacatttacaactaaaaggattcagatgcaattttcaactattctgaaaccagcaggacacacctgactttaatagttttagctgaaattgtagatgttttgcttcagtttaacttatgagaaaagattatctgacggattttgtgttgacttcccctttagtggtttattttgtctttttctgcccatctgtctactaataaaatgtgaaataaaatacctgtattgctacttccccatg

SEQ ID NO: 3907 - DNA, 3995 bp, Homo sapiens
gctctcctcctcctccgccgtcgcccctccccccgcgcagcccccgccgccaccgccgcgagacccccgcacgccgctctccccccaccctctcccgccgccgccgccgccgcgatggcccagcagcagatgaccagctcgcagaaggccctgatgctcgagctgaaatccctgcaggaggaaccggtggagggcttccggatcaccctggtggacgagtccgacctctacaactgggaggtggccatcttcggaccccccaacaccctctacgaaggcggctacttcaaggcgcatattaaatttcctattgactacccctattcaccacctaccttcagattcttgaccaaaatgtggcaccccaacatttatgagaatggagatgtatgcatttcgattcttcatccgcctgtagatgacccacagagtggagaactgccttctgaaaggtggaatcctactcagaatgtgaggactatcctattaagtgtaatctcactgcttaatgagcccaacaccttctccccagccaatgtcgatgcttcagttatgttcaggaaatggagagacagtaaaggaaaagacaaagaatatgctgaaattattaggaaacaagtttcagccactaaggccgaagcagaaaaggatggagtgaaggtccccacaaccctggcggaatactgcatcaaaactaaagtgccttccaatgacaacagctcagatttgctttacgacgacttgtatgatgacgacattgatgatgaagatgaggaggaggaagatgccgactgttatgatgatgatgattctgggaatgaggagtcgtgacgtgytccttcagtgcccctgtactgccctgccatctcaggccaaagggaggggagcaagtggggaccyggccatggcccctcagcaaaaacctattcacagcgggtggggaaacacacacagctcctgctgactccccttatggatctcagtttgctcctttttatggacctttaatggagagagagtaaccctccacagaatgtctgaattcttgcattctttacccttccatcactatattgattctttttttaaaaaayatgaacccaaactcccgcctcacttcgtctctacagaatgttcacagcaaaacacgtttggtctgtttttagattcttgaagaattcaatagtctttcaagatgtttaatgtgtttaaagctgggaacctgttgggagttcacaagtgctgcatatactgggtagcaaaagaaaatggaaaaaaacccacaaaacaaactttaaaaaaaaaaaaaaacaaatttgccaaggtttagctgctcatttacattagtgtgtgtgcattcgttcagccccatggtggtgaattctgtttctttcctttcctaaggctgggacatggtgggcatcagggactttgtgctaagcctgatgaaatgtgctccttcaatctccatgaaaccatcgtaacatggaggcctcagctgctctgaggagagaaatcagactttgttttttgaaatcgattgggatcgaaagcctgaaataaatattcatactttccatagaactgagcacttggttgctatttattttaaaggcagggttatttccccccagggagtggggcaagcggggaagttgggatgagtgcgtgtgggagcaaagagttaaaaatcactatgctaagtttggttgatgctactggggggaaaaagttgaaactactggtgaccactgttgggagaggaaacatctgttttatagatttagcatggccttcccatcaaaaatacactcgtaccatgacgttttgtttttgttttttaagtagccacttttaattactcagtattaatcctaggtgcatgtgttaagatttcggttttcatcgagctgcttatactgatagtgaaaaacttggatgtgtgtgagacgagttaccgccttcttcattggatgtgatctgaactttttttctcctttcaacatacttaggctgtggagtgcaagcagaattatgcatagaaattgtggcagggctgagggagttgactgcaggcagtttttaggccagataaggctagatcttcctgcaatgcacttgctgcagctttgattttccagatctcaatcgtgttgcttcaatcaatattgagatccagcagccttcaccatccaggagacttcagaacttgaaggtaatttttggttgttatgggggtgcaccagatcataggagggcattatttggaggaaaccgctataatgtaaaatcagatttcagaaggaaaatgcagcaaggactgactgtagtcctatttcagacccctgggcactagtgtcaactcctcctttggctcgtaactcagaaagaaccaaagggcagattagggacggggcaggagggatcctaggatggccagagtaggtgacgcttacttccttagctcctccttccattctgatctcagggttttcactcttcaaactcccaaacacatgacttcttcccagcagcccttcccggcctctaaagtttggtcccagcagcccttcccagcctctaaagtttggtctggtatgaaatgggactgtttaacaagcaaggctcttaggggacactgttgagcctggtcccagaatctgtgatctccacagggccagggttgctacttgcacccagaatctagtgattttagtcagatccatggaacagagcagcttcgtaatacattgtcaagttacctgattacaaactctcatagatgttggaactacctttttactccccatactttgtaagtaatgcttccagattaacctgcaaatcttgtggagccaaagcctctcacagtgctgatttacctcccccaaaatgcccccaaacccccatgcaagtttacagccagtagcttggtcttattctcttggagccctaaaattaagcctttcattcccctttgctaaagcatctcactcccagggcagccccagcaccctggcattgcgggaggtgctctgctgcacagctgttccatcaggccctattggcctctgttagacattgactcagggagccggagcgccaagtggaggttgtacctttcagccctttggggtgttaaaagtgtcaagggctgggtttgcctctgatgagtacaatcagttccagaagactgggtaagtctcttgctagcaggtggacattctggtattttagactgactgaacgaaacccagaggctggttccagagctctgtccctgagaacacatccctgtggaaaatacttgagtttgtaattttttttcccccttctgggagtggaggtctcaggctcaatccggaaccatgtacgtacagttttgcttattatttgatgtgacatgaactcaaaatcctgcatttttagattccttttagttctaattgaggcctcactagatgctcttcagttctgtgtattttgaggctgggtggagaagtatatgattctgctgttgattctttcagtcttccccccttctccttttatcaatcattccagagttattttctattagtcaaacttttttgtagaaccttctttcccttaccctggcaaattgcttctttacttgctggtttccttacgtttggggcacatgttgtaagaaactgattggaaggggaaatgtgcagctctccactggaaaggaactctccacccctcccatcctgataaaacaaacaaggtttacatttacaactaaaaggattcagatgcaattttcaactattctgaaaccagcaggacacacctgactttaatagttttagctgaaattgtagatgttttgcttcagtttaacttatgagaaaagattatctgacggattttgtgttgacttcccctttagtggtttattttgtctttttctgcccatctgtctactaataaaatgtgaaataaaatacctgtattgctacttccccatg

SEQ ID NO: 3908 - DNA, 4545 bp, Homo sapiens
ccgctgagagccgcccagcacccggcgtgcgcccctcctccctctctccctccctccctccctccctgcttctcggctccgttgctcccgcggcgcgaggcgctctcgctctcctcctcctccgccgtcgcccctccccccgcgcagcccccgccgccaccgccgcgagacccccgcacgccgctctccccccaccctctcctgccccgcgcgcctccggcccctgcggcccccgaagagaacgagagggcgagcgagcgcggcgttcccgggccggcccggccccctcccttcaccatcgccggccctccgccgccttcctccgcttccacctcctctccccccccccaagttgaggccccctccgggggggggaggcccgggaccgggacccgtagcgaattctcctaactccctcgacctctcctctcgcccggcccgagtgtgaggagaagggcccggcccggcctgcgtcgtgtgtgaggaggaccccgggcgggcccacgggccgtgtggggcctggtcyggcccgccgggtgtgtgaagaccggggcccggtgctgcccggccggagggcgagcggaggggaggggcctggtccggcccggccggtgcgtgaggactggggcccgggcccggcgccgccgccgccgccgccgccgcgatggcccagcagcagatgaccagctcgcagaaggccctgatgctcgagctgaaatccctgcaggaggaaccggtggagggcttccggatcaccctggtggacgagtccgacctctacaactgggaggtggccatcttcggaccccccaacaccctctacgaaggcggctacttcaaggcgcatattaaatttcctattgactacccctattcaccacctaccttcagattcttgaccaaaatgtggcaccccaacatttatgagaatggagatgtatgcatttcgattcttcatccgcctgtagatgacccacagagtggagaactgccttctgaaaggtggaatcctactcagaatgtgaggactatcctattaagtgtaatctcactgcttaatgagcccaacaccttctccccagccaatgtcgatgcttcagttatgttcaggaaatggagagacagtaaaggaaaagacaaagaatatgctgaaattattaggaaacaagtttcagccactaaggccgaagcagaaaaggatggagtgaaggtccccacaaccctggcggaatactgcatcaaaactaaagtgccttccaatgacaacagctcagatttgctttacgacgacttgtatgatgacgacattgatgatgaagatgaggaggaggaagatgccgactgttatgatgatgatgattctgggaatgaggagtcgtgacgtgytccttcagtgcccctgtactgccctgccatctcaggccaaagggaggggagcaagtggggaccyggccatggcccctcagcaaaaacctattcacagcgggtggggaaacacacacagctcctgctgactccccttatggatctcagtttgctcctttttatggacctttaatggagagagagtaaccctccacagaatgtctgaattcttgcattctttacccttccatcactatattgattctttttttaaaaaayatgaacccaaactcccgcctcacttcgtctctacagaatgttcacagcaaaacacgtttggtctgtttttagattcttgaagaattcaatagtctttcaagatgtttaatgtgtttaaagctgggaacctgttgggagttcacaagtgctgcatatactgggtagcaaaagaaaatggaaaaaaacccacaaaacaaactttaaaaaaaaaaaaaaacaaatttgccaaggtttagctgctcatttacattagtgtgtgtgcattcgttcagccccatggtggtgaattctgtttctttcctttcctaaggctgggacatggtgggcatcagggactttgtgctaagcctgatgaaatgtgctccttcaatctccatgaaaccatcgtaacatggaggcctcagctgctctgaggagagaaatcagactttgttttttgaaatcgattgggatcgaaagcctgaaataaatattcatactttccatagaactgagcacttggttgctatttattttaaaggcagggttatttccccccagggagtggggcaagcggggaagttgggatgagtgcgtgtgggagcaaagagttaaaaatcactatgctaagtttggttgatgctactggggggaaaaagttgaaactactggtgaccactgttgggagaggaaacatctgttttatagatttagcatggccttcccatcaaaaatacactcgtaccatgacgttttgtttttgttttttaagtagccacttttaattactcagtattaatcctaggtgcatgtgttaagatttcggttttcatcgagctgcttatactgatagtgaaaaacttggatgtgtgtgagacgagttaccgccttcttcattggatgtgatctgaactttttttctcctttcaacatacttaggctgtggagtgcaagcagaattatgcatagaaattgtggcagggctgagggagttgactgcaggcagtttttaggccagataaggctagatcttcctgcaatgcacttgctgcagctttgattttccagatctcaatcgtgttgcttcaatcaatattgagatccagcagccttcaccatccaggagacttcagaacttgaaggtaatttttggttgttatgggggtgcaccagatcataggagggcattatttggaggaaaccgctataatgtaaaatcagatttcagaaggaaaatgcagcaaggactgactgtagtcctatttcagacccctgggcactagtgtcaactcctcctttggctcgtaactcagaaagaaccaaagggcagattagggacggggcaggagggatcctaggatggccagagtaggtgacgcttacttccttagctcctccttccattctgatctcagggttttcactcttcaaactcccaaacacatgacttcttcccagcagcccttcccggcctctaaagtttggtcccagcagcccttcccagcctctaaagtttggtctggtatgaaatgggactgtttaacaagcaaggctcttaggggacactgttgagcctggtcccagaatctgtgatctccacagggccagggttgctacttgcacccagaatctagtgattttagtcagatccatggaacagagcagcttcgtaatacattgtcaagttacctgattacaaactctcatagatgttggaactacctttttactccccatactttgtaagtaatgcttccagattaacctgcaaatcttgtggagccaaagcctctcacagtgctgatttacctcccccaaaatgcccccaaacccccatgcaagtttacagccagtagcttggtcttattctcttggagccctaaaattaagcctttcattcccctttgctaaagcatctcactcccagggcagccccagcaccctggcattgcgggaggtgctctgctgcacagctgttccatcaggccctattggcctctgttagacattgactcagggagccggagcgccaagtggaggttgtacctttcagccctttggggtgttaaaagtgtcaagggctgggtttgcctctgatgagtacaatcagttccagaagactgggtaagtctcttgctagcaggtggacattctggtattttagactgactgaacgaaacccagaggctggttccagagctctgtccctgagaacacatccctgtggaaaatacttgagtttgtaattttttttcccccttctgggagtggaggtctcaggctcaatccggaaccatgtacgtacagttttgcttattatttgatgtgacatgaactcaaaatcctgcatttttagattccttttagttctaattgaggcctcactagatgctcttcagttctgtgtattttgaggctgggtggagaagtatatgattctgctgttgattctttcagtcttccccccttctccttttatcaatcattccagagttattttctattagtcaaacttttttgtagaaccttctttcccttaccctggcaaattgcttctttacttgctggtttccttacgtttggggcacatgttgtaagaaactgattggaaggggaaatgtgcagctctccactggaaaggaactctccacccctcccatcctgataaaacaaacaaggtttacatttacaactaaaaggattcagatgcaattttcaactattctgaaaccagcaggacacacctgactttaatagttttagctgaaattgtagatgttttgcttcagtttaacttatgagaaaagattatctgacggattttgtgttgacttcccctttagtggtttattttgtctttttctgcccatctgtctactaataaaatgtgaaataaaatacctgtattgctacttccccatg

SEQ ID NO: 3909 - DNA, 1314 bp, Homo sapiens
agtcaagatggcgggagcagctacccaggcttccctggagtcggccccacggatcatgcggctggtggccgaatgcagccgctccagggcccgggcaggcgagctgtggctgccgcatgggacagtggccactcctgtgttcatgccagtgggcacgcaggccaccatgaagggcatcacgaccgaacagctggacgctctgggttgccgcatctgcctgggcaatacctaccatctgggtctaaggccgggacccgagctgatccagaaagccaacggtctccacggcttcatgaattggcctcataatctgctaacggacagcggcggtttccagatggtgtcgctggtgtctctgtccgaggtgacggaggagggcgtccgcttccgctccccctacgacggcaatgagaccctgctgagcccggagaaatccgtgcagatccagaatgcgctgggctcggacatcatcatgcagctggacgacgtggttagcagtactgtgactgggccacgtgtggaggaggccatgtacaggtcaatccgctggctggaccggtgcattgcagcccatcagcggccggacaagcagaacctcttcgccattatccagggtgggctggacgcagatctccgggccacctgccttgaagagatgaccaagcgagacgtgcctggcttcgccatcgggggcctgagcgggggtgagagcaagtcgcagttctggcggatggtggcgctgagcacctctcggctgccgaaggacaagccccgatatctgatgggggttggctatgccactgatctggtagtctgcgtggctcttggatgtgacatgttcgactgcgtcttccccacacggacagcgcgctttggctctgccctggtgcccactgggaacctgcagttgaggaagaaggtgtttgagaaggacttcggccccatagacccggagtgcacctgccccacgtgccaaaagcacagccgcgccttcctgcacgcactgctgcacagtgacaacacggccgcgctgcaccacctcacggtccacaacatcgcctaccagctgcagctcatgagcgccgtccgcaccagcatcgtggagaagcgcttcccggacttcgtgcgggacttcatgggcgccatgtacggggatcccaccctctgtcccacctgggccactgacgctctggcctctgtgggaatcacactkggctgacctggcattgggagagggagggaggaaggaagggagggaggggctggaagatactgaaggattcctttttgaaaggttttttttattgtaactta

SEQ ID NO: 3910 - DNA, 2288 bp, Homo sapiens
ctagggcttaaatgactttggggggatataaaacttggtattttggtaatcatcaaccacattcccaagatccagagagtttggtaaatgttaactttctttccaaagtgggaacatcattgtggccactccaggccgcttggaggacatgttccggaggaaggccgaaggcttggatctggccagctgtgtgcgatccctggatgtcctggtgttggatgaggcagacagacttctggacatggggtttgaggcaagcatcaacaccattctggagtttttgccaaagcagaggagaacaggccttttctctgccactcagacgcaggaagtggagaacctggtgagagcgggcctccggaaccctgtccgggtctcagtgaaggagaagggcgtggcagccagcagtgcccagaagaccccctcccgcctggaaaactactacatggtatgcaaggcagatgagaaatttaatcagctggtccattttcttcgcartcataagcaggagaaacacctggtcttcttcagcacctgtgcctgtgtggaatactatgggaaggctctggaagtgctggtgaagggcgtgaagattatgtgcattcayggaaagatgaaatataaacgcaataagatcttcatggagttccgcaaattgcaaagtgggattttagtgtgcactgatgtgatggcccggggaattgatattcctgaagtcaactgggttttgcagtatgaccctcccagcaatgcaagtgccttcgtgcatcgctgcggtcgcacagctcgcattggccacgggggcagcgctctggtgttcctcctgcccatggaagagtcatacatcaatttccttgcaattaaccaaaaatgccccctgcaggagatgaagccccagagaaacacagcggaccttctgccaaaactcaagtccatggccctggctgacagagctgtgtttgaaaagggcatgaaagcttttgtgtcatatgtccaagcttatgcaaagcatgaatgcaacctgattttcagattaaaggatcttgattttgccagccttgctcgaggttttgccctgctgaggatgcccaagatgccagaattgagaggraagcagtttccagattttgtgcccgtggacgttaataccgacacgattccatttaaagataaaatcagagaaaagcagaggcagaaactcctggagcaacaaagaagagagaaaacagaaaatgaagggagaagaaaattcataaaaaataaagcttggtcaaagcagaaggccaaaaaaraaaaraaraaaaaaatgaatgagaaaaggaaaagggaagagggttctgatattgaagatgaggacatggaagaacttcttaatgacacaagactcttgaaaaaacttaagaaaggcaaaataactgaagaagaatttgagaagggcttgttgacaactggcaaaagaacaatcaagacagtggatttagggatctcagatttggaagatgactgctrattccagtgccacagatgaacccacaaggacatagctgttccctaacttggtggatggctccagtttgcttttaacgaaaatcacaacttcaggagacatctgaaaagaatgatgtctctgaaagctgtcctttcagatgagggagaaatgaaggatttcacacttcagaatattttactaaaaacattccagtcttggccgggtgcggtggctcctgcctataatcccagcactttgggaggctgaggcaggaggatcacttgagcccaggagttcaagaccagcctgggaacacagcgagaccctctcattaaaaacaacaaaacaaaacaattccagtcttggagtagtctaacagaagaaaatgtaaaattatttgagtgtaaataatagatgtcagtatttatcatgatgggtcacatatagacatatgtacatattatatatatatatatatatctcttttttctgaggctattttatagttatttttaaacataaagatacwgaagtcttcttgacttctgattttcaaaaccattcctcagtatcttcaggcatttgacctcctgaatgtgcttggccctgggcttcagttatcctttgatgycctgcaggggtggctaatgtgctggggtttttctgtgttaatagtcacagtattgttttattggtgaatagctgaaaaacagagggattaagtcatattccgggaaagagaattatagtttttatgcctcctgttgaataaatggtgtcctgattgcctgggtcttaa

SEQ ID NO: 3911 - DNA, 3458 bp, Homo sapiens
tttttgagactgagtctcgctttgtcacccacgctggagtgcagtggcgcaacctccacctccctggttcaagcgattcttctgcctcaggctcctgagtactcgggaggctgaggcaggagaagggcgtgaacccgggaggcggagcttgcagtgaaccgttatagcgcccagcctccagcctgggcaacagagcgagactccgtctcaaacaacaacaacaacaacaacaamaamaaaaacagctttctgagtgaagttgtatgtggacatgaatggcccaggcaaacagtgaacagaggaatgggacagtgttcttagttaggactctgaccctaacttccgggaaagtaaaccaacattcaggacgtaccggccatcggaccgcaacattcaggacgtaccggccatcagcgggtgcctgttttgcagggctgctaacccgggtccccgacacgtttctctgcccacggtagccagccccgctgtccttcggcctggacgcggtcctgtgctgccacctgcctccgaggggcagagaaagtgggagggccgggccagaatccctcccgccaaaactcctgcccggtgcggagagrygcccggagcccagggcgctgtgcggagcgggtgtaactccccaggcctgccccgccgcctgcctccaccgtcccgcggacgcctttcctccctcccgcggcgtgggagccttcgccgcgctccggaactctgctgctccagcgaagttcccggccggccgctggagctgcsggaagcggaagtgctcgttgggggtgcacaaggcgcgttcgagcagcggcgaccgacgcggcgaaggagcgcgccatggagcatgtgacagagggctcctgggagtcgctgcctgtgccgctgcacccgcaggtgctgggcgcgctgcgggagctgggcttcccgtacatgacgccggtgcagtccgcaaccatccctctgttcatgcgaaacaaagatgtcgctgcagaagcggtcacaggtagtggcaaaacactcgcttttgtcatccccatcctggaaattcttctgagaagagaagagaagttaaaaaagagtcaggttggagccataatcatcacccccactcgagagctggccattcaaatagacgaggtcctgtcgcatttcacgaagcacttccccgagttcagccagattctttggatcggaggcaggaatcctggagaagatgttgagaggtttaagcaacaaggtgggaacatcattgtggccactccaggccgcttggaggacatgttccggaggaaggccgaaggcttggatctggccagctgtgtgcgatccctggatgtcctggtgttggatgaggcagacagacttctggacatggggtttgaggcaagcatcaacaccattctggagtttttgccaaagcagaggagaacaggccttttctctgccactcagacgcaggaagtggagaacctggtgagagcgggcctccggaaccctgtccgggtctcagtgaaggagaagggcgtggcagccagcagtgcccagaagaccccctcccgcctggaaaactactacatggtatgcaaggcagatgagaaatttaatcagctggtccattttcttcgcartcataagcaggagaaacacctggtcttcttcagcacctgtgcctgtgtggaatactatgggaaggctctggaagtgctggtgaagggcgtgaagattatgtgcattcayggaaagatgaaatataaacgcaataagatcttcatggagttccgcaaattgcaaagtgggattttagtgtgcactgatgtgatggcccggggaattgatattcctgaagtcaactgggttttgcagtatgaccctcccagcaatgcaagtgccttcgtgcatcgctgcggtcgcacagctcgcattggccacgggggcagcgctctggtgttcctcctgcccatggaagagtcatacatcaatttccttgcaattaaccaaaaatgccccctgcaggagatgaagccccagagaaacacagcggaccttctgccaaaactcaagtccatggccctggctgacagagctgtgtttgaaaagggcatgaaagcttttgtgtcatatgtccaagcttatgcaaagcatgaatgcaacctgattttcagattaaaggatcttgattttgccagccttgctcgaggttttgccctgctgaggatgcccaagatgccagaattgagaggraagcagtttccagattttgtgcccgtggacgttaataccgacacgattccatttaaagataaaatcagagaaaagcagaggcagaaactcctggagcaacaaagaagagagaaaacagaaaatgaagggagaagaaaattcataaaaaataaagcttggtcaaagcagaaggccaaaaaaraaaaraaraaaaaaatgaatgagaaaaggaaaagggaagagggttctgatattgaagatgaggacatggaagaacttcttaatgacacaagactcttgaaaaaacttaagaaaggcaaaataactgaagaagaatttgagaagggcttgttgacaactggcaaaagaacaatcaagacagtggatttagggatctcagatttggaagatgactgctrattccagtgccacagatgaacccacaaggacatagctgttccctaacttggtggatggctccagtttgcttttaacgaaaatcacaacttcaggagacatctgaaaagaatgatgtctctgaaagctgtcctttcagatgagggagaaatgaaggatttcacacttcagaatattttactaaaaacattccagtcttggccgggtgcggtggctcctgcctataatcccagcactttgggaggctgaggcaggaggatcacttgagcccaggagttcaagaccagcctgggaacacagcgagaccctctcattaaaaacaacaaaacaaaacaattccagtcttggagtagtctaacagaagaaaatgtaaaattatttgagtgtaaataatagatgtcagtatttatcatgatgggtcacatatagacatatgtacatattatatatatatatatatatatatatatatatatatatatatatatataagctcttttttctgaggctattttatagttatttttaaacataaagatacwgaagtcttcttgacttctgattttcaaaaccattcctcagtatcttcaggcatttgacctcctgaatgtgcttggccctgggcttcagttatcctttgatgycctgcaggggtggctaatgtgctggggtttttctgtgttaatagtcacagtattgttttattggtgaatagctgaaaaacagagggattaagtcatattccgggaaagagaattatagtttttatgcctcctgttgaataaatggtgtcctgattgcctgggtcttaa

SEQ ID NO: 3912 - DNA, 3427 bp, Homo sapiens
tttttgagactgagtctcgctttgtcacccacgctggagtgcagtggcgcaacctccacctccctggttcaagcgattcttctgcctcaggctcctgagtactcgggaggctgaggcaggagaagggcgtgaacccgggaggcggagcttgcagtgaaccgttatagcgcccagcctccagcctgggcaacagagcgagactccgtctcaaacaacaacaacaacaacaacaamaamaaaaacagctttctgagtgaagttgtatgtggacatgaatggcccaggcaaacagtgaacagaggaatgggacagtgttcttagttaggactctgaccctaacttccgggaaagtaaaccaacattcaggacgtaccggccatcggaccgcaacattcaggacgtaccggccatcagcgggtgcctgttttgcagggctgctaacccgggtccccgacacgtttctctgcccacggtagccagccccgctgtccttcggcctggacgcggtcctgtgctgccacctgcctccgaggggcagagaaagtgggagggccgggccagaatccctcccgccaaaactcctgcccggtgcggagagrygcccggagcccagggcgctgtgcggagcgggtgtaactccccaggcctgccccgccgcctgcctccaccgtcccgcggacgcctttcctccctcccgcggcgtgggagccttcgccgcgctccggaactctgctgctccagcgaagttcccggccggccgctggagctgcsggaagcggaagtgctcgttgggggtgcacaaggcgcgttcgagcagcggcgaccgacgcggcgaaggagcgcgccatggagcatgtgacagagggctcctgggagtcgctgcctgtgccgctgcacccgcaggtgctgggcgcgctgcgggagctgggcttcccgtacatgacgccggtgcagtccgcaaccatccctctgttcatgcgaaacaaagatgtcgctgcagaagcggtcacaggtagtggcaaaacactcgcttttgtcatccccatcctggaaattcttctgagaagagaagagaagttaaaaaagagtcaggttggagccataatcatcacccccactcgagagctggccattcaaatagacgaggtcctgtcgcatttcacgaagcacttccccgagttcagccagattctttggatcggaggcaggaatcctggagaagatgttgagaggtttaagcaacaaggtgggaacatcattgtggccactccaggccgcttggaggacatgttccggaggaaggccgaaggcttggatctggccagctgtgtgcgatccctggatgtcctggtgttggatgaggcagacagacttctggacatggggtttgaggcaagcatcaacaccattctggagtttttgccaaagcagaggagaacaggccttttctctgccactcagacgcaggaagtggagaacctggtgagagcgggcctccggaaccctgtccgggtctcagtgaaggagaagggcgtggcagccagcagtgcccagaagaccccctcccgcctggaaaactactacatggtatgcaaggcagatgagaaatttaatcagctggtccattttcttcgcartcataagcaggagaaacacctggtcttcttcagcacctgtgcctgtgtggaatactatgggaaggctctggaagtgctggtgaagggcgtgaagattatgtgcattcayggaaagatgaaatataaacgcaataagatcttcatggagttccgcaaattgcaaagtgggattttagtgtgcactgatgtgatggcccggggaattgatattcctgaagtcaactgggttttgcagtatgaccctcccagcaatgcaagtgccttcgtgcatcgctgcggtcgcacagctcgcattggccacgggggcagcgctctggtgttcctcctgcccatggaagagtcatacatcaatttccttgcaattaaccaaaaatgccccctgcaggagatgaagccccagagaaacacagcggaccttctgccaaaactcaagtccatggccctggctgacagagctgtgtttgaaaagggcatgaaagcttttgtgtcatatgtccaagcttatgcaaagcatgaatgcaacctgattttcagattaaaggatcttgattttgccagccttgctcgaggttttgccctgctgaggatgcccaagatgccagaattgagaggraagcagtttccagattttgtgcccgtggacgttaataccgacacgattccatttaaagataaaatcagagaaaagcagaggcagaaactcctggagcaacaaagaagagagaaaacagaaaatgaagggagaagaaaattcataaaaaataaagcttggtcaaagcagaaggccaaaaaaraaaaraaraaaaaaatgaatgagaaaaggaaaagggaagagggttctgatattgaagatgaggacatggaagaacttcttaatgacacaagactcttgaaaaaacttaagaaaggcaaaataactgaagaagaatttgagaagggcttgttgacaactggcaaaagaacaatcaagacagtggatttagggatctcagatttggaagatgactgctrattccagtgccacagatgaacccacaaggacatagctgttccctaacttggtggatggctccagtttgcttttaacgaaaatcacaacttcaggagacatctgaaaagaatgatgtctctgaaagctgtcctttcagatgagggagaaatgaaggatttcacacttcagaatattttactaaaaacattccagtcttggccgggtgcggtggctcctgcctataatcccagcactttgggaggctgaggcaggaggatcacttgagcccaggagttcaagaccagcctgggaacacagcgagaccctctcattaaaaacaacaaaacaaaacaattccagtcttggagtagtctaacagaagaaaatgtaaaattatttgagtgtaaataatagatgtcagtatttatcatgatgggtcacatatagacatatgtacatattatatatatatatatatatctcttttttctgaggctattttatagttatttttaaacataaagatacwgaagtcttcttgacttctgattttcaaaaccattcctcagtatcttcaggcatttgacctcctgaatgtgcttggccctgggcttcagttatcctttgatgycctgcaggggtggctaatgtgctggggtttttctgtgttaatagtcacagtattgttttattggtgaatagctgaaaaacagagggattaagtcatattccgggaaagagaattatagtttttatgcctcctgttgaataaatggtgtcctgattgcctgggtcttaa

SEQ ID NO: 3913 - DNA, 1885 bp, Homo sapiens
ctccttcgcgcagcggcgcgccaaccgcaggcgccctttctgccgacctcacgggctatttaaaggtacgcgccgsggccaaggccgcaccgtactgggcgggggtctggggagcgcagcagccatggcaagccgtctcctgctcaacaacggcgccaagatgcccwtcctggggttgggtacctggaagtcccctccagggcaggtgactgaggccgtgaaggtggccattgacgtcgggtaccgccwcatcgactgtgcccatgtgtaccagaatgagaatgaggtgggggtggccattcaggagaagctcagggagcaggtggtgaagcgtgaggagstcttcatcgtcagcaagwtgtggtgcacgtaccatgagaagggcctggtgraaggagcctgccagaagacactcagygacctgaagctggactacctggacctctaccttattcactggccgactggctttaagcctgggaaggaatttttcccattggatgagtcgggcaatgtggttcccagtgacaccaacattctggacacrtgggcggccatggaagagctggtggatgaagggctggtgaaagctattggcatctccaacttcaaccatctccaggtggagatgatcttaaacaaacctggcttgaagtataagcctgcagttaaccagattgagtgccacccatatctcactcaggagaagttaatccagtactgccagtccaaargcatcgtggtgaccgcctacagccccctcggctctcctgacaggccctgggccaagcccgaggacccttctctcctggaggatcccaggatcaaggcgatcgcagccaagcacaataaaactacagcccaggtcctgatccggttccccatgcagaggaacttggtggtgatccccaagtctgtgacaccagaacgcattgctgagaactttaaggtctttgactttgaactgagcagccaggatatgaccaycttactcagctacaacaggaactggagggtctgtgccttgttgagctgtacctcccacaaggattaccccttccatgaagagttttgaagctgtggttgcctgctcgtccccaagtgacctatacctgtgtttcttgcctcatttttttccttgcaaatgtagtakggccygtgtcactcagcagtgggacagcaacctgtagagtggccagmgagggcgtgtctagcttgatgttggatctcaagagccctgtcagtagagtagaagtctcttccagtttgctttgcccttctttytaccctgctggggaaagtacaacctgaatacccttttctgaccaaagagaagcaaaatctaccaggtcaaaatagtgccactaacggttgagtactggaatcctttcagcaagacttctctttgcctcaaataaaaagtgcttttgtgagcttggttttgtgagctttggttttttaaaacaatagcaaccttctatctcacttcaaccatcactctccacatacccataaggcaggccagtcagtgatgcaaaaggagtgaggacttgacttttctacaagtcctcaactgcaagttgggggcccctcaccccagtactttacccatttagctttagggttgtgggtctcatcctggctgcacaccaggtcacctttgggggctttaaggctggtgatgtctggacctcgccctggaggctgatctgattgggctgtgatcaggacagsaggagtgtacaggctctccaggtgattccagggtgcagccaaggctgagccacagctttwrggtaaacccatgttcgattccacagattccttggttgctccttctacgtatgaaggccgaggtcggtgtttactaagcagcacaacctga

SEQ ID NO: 3914 - DNA, 1448 bp, Homo sapiens
ctccttcgcgcagcggcgcgccaaccgcaggcgccctttctgccgacctcacgggctatttaaaggtacgcgccgsggccaaggccgcaccgtactgggcgggggtctggggagcgcagcagccatggcaagccgtctcctgctcaacaacggcgccaagatgcccwtcctggggttgggtacctggaagtcccctccagggcaggtgactgaggccgtgaaggtggccattgacgtcgggtaccgccwcatcgactgtgcccatgtgtaccagaatgagaatgaggtgggggtggccattcaggagaagctcagggagcaggtggtgaagcgtgaggagstcttcatcgtcagcaagwtgtggtgcacgtaccatgagaagggcctggtgraaggagcctgccagaagacactcagygacctgaagctggactacctggacctctaccttattcactggccgactggctttaagcctgggaaggaatttttcccattggatgagtcgggcaatgtggttcccagtgacaccaacattctggacacrtgggcggccatggaagagctggtggatgaagggctggtgaaagctattggcatctccaacttcaaccatctccaggtggagatgatcttaaacaaacctggcttgaagtataagcctgcagttaaccagattgagtgccacccatatctcactcaggagaagttaatccagtactgccagtccaaargcatcgtggtgaccgcctacagccccctcggctctcctgacaggccctgggccaagcccgaggacccttctctcctggaggatcccaggatcaaggcgatcgcagccaagcacaataaaactacagcccaggtcctgatccggttccccatgcagaggaacttggtggtgatccccaagtctgtgacaccagaacgcattgctgagaactttaaggtctttgactttgaactgagcagccaggatatgaccaycttactcagctacaacaggaactggagggtctgtgccttgttgagctgtacctcccacaaggattaccccttccatgaagagttttgaagctgtggttgcctgctcgtccccaagtgacctatacctgtgtttcttgcctcatttttttccttgcaaatgtagtakggccygtgtcactcagcagtgggacagcaacctgtagagtggccagmgagggcgtgtctagcttgatgttggatctcaagagccctgtcagtagagtagaagtctcttccagtttgctttgcccttctttytaccctgctggggaaagtacaacctgaatacccttttctgaccaaagagaagcaaaatctaccaggtcaaaatagtgccactaacggttgagttttgacygcttggaactggaatcctttcagcaagacttctctttgcctcaaataaaaagtgcttttgtgag

SEQ ID NO: 3915 - DNA, 1764 bp, Homo sapiens
  misc_feature (1)...(1764): n = A,T,C or G
actttgcacaaggttgccatgtttaataattcattcacagaatcctcaatctcacaaaagcctggaatggatttcctgtttggttatggcagggaagctactgtggccaggctccaactcctcccactgtagatagcagcagccttcttaagcagcctgtggccgggcacagtagctcacacctgtaatcccagcactttggaaggccgaggtgggcggatcacctgagctcaggagtttgagaccagccwgtctctactaacaatataaaaattagctgggagtcacggtgggcgcctgtaatcccagctactcgggaggcygaggcaggagaattgcttgaacccaggagacagaggttgtagtgagctgagatcgcaccactgyactctagccttggcaacagtgcaagactgtctcaaaaacagcaacagaragcaggacgtgagacttctacctgctcactcagaatcatttctgcaccaaccatggccacrtttgtggagctcagtaccaaagccaagatgcccattgtgggcctgggcacttggaartctcctctyggcaaagtgaaagaagcagtgaaggtggccattgatgcaggatatcggcacattgactgtgcctatgtctatcagaatgaacatgaagtgggggaagccatccaagagaagatccaagagaaggctgtgaagcgggaggacctgttcatcgtcagcaagttgtggcccactttctttgagagaccccttgtgaggaaagcctttgagaagaccctcaaggacctgaagctgagctatctggacgtctatcttattcactggccacagggattcaagtctggggatgaccttttccccaaagatgataaaggtaatgccatcggtggaaaagcaacgttcttggatgcctgggaggccatggaggagctggtggatgaggggctggtgaaagcccttggggtctccaatttcagccacttccagatcgagaagctcttgaacaaacctggactgaaatataaaccagtgactaaccaggttgagtgtcacccatacctcacrcaggagaaactgatccagtactgccactccaagggcatcaccgttacggcctacagccccctgggctctccggatagaccttgggccaagccwgargacccttccctgctggaggatcccaagattaaggagattgctgcaaagcacaaaaaaaccgcagcycargttctgatccgtttccatatccagaggaatgtgattgtcatccccaagtctgtgacaccagcacgcattgttgagaacattcaggtctttgactttaaattgagtgatgaggagayggcaaccatactcagcttcaacagaaactggagggcctgtaacgtgttgcaatcctctcatttggaagactatcccttcnatgcagaatattgaggttgaatctcctggtgagattatacaggagattctctttcttcgctgaagtgtgactacctccactcatgtcccattttagccaagcttatttaagatcacagtgaacttagtcctgttatagacgagaatcgaggtgctgttttagacatttatttctgtatgttcaactaggatcagaatatcacagaaaagcatggcttgaataaggaaatgacaattttttccacttatctgatcagaacaaatgtttattaagcatcagaaactctgccaacactgaggatgtaaagatcaataaaaaaaataataatcataaccaaca

SEQ ID NO: 3916 - DNA, 1879 bp, Homo sapiens
aagataaactctcttctggatgtctgaggtactgtgtagcagagcccttccaatagtaagatcccctggaaggaagcagggcgatgccgctgtatttagggttctggcagacctggccctatctatcattttgtgtagtagacagaaaaactcgaatgcggtgaaaagagaaggaggtgaatatatgcagtgttttcatgtaggaatctggagccaaatcacaagttcttagaaccactagaaataaaaacatgtattgctgtccttgaatattagcccatttgaaaacgcctgggaagttcagccatcagtatgtccaagtacaaacttattatgttaagacatggagagggtgcttggaataaggagaaccgtttttgtagctgggtggatcagaaactcaacagcgaaggaatggaggaagctcggaactgtgggaagcaactcaaagcgttaaactttgagtttgatcttgtattcacatctgtccttaatcggtccattcacacagcctggctgatcctggaagagctaggccaggaatgggtgcctgtggaaagctcctggcgtctaaatgagygtcactatggggccttgatcggtctcaacagggagcagatggctttgaatcatggtgaagaacaagtgaggctctggagaagaagctacaatgtaaccccgcctcccattgaggagtctcatccttactaccaagaaatctacaacgaccggaggtataaagtatgcgatgtgcccttggatcaactgccacggtcggaaagcttaaaggatgttctggagagactccttccctattggaatgaaaggattgctcccgaagtattacgtggcaaaaccattctgatatctgctcatggaaatagcagtagggcactcctaaaacacctggaaggtatctcagatgaagacatcatcaacattactcttcctactggagtccccattcttctggaattggatgaaaacctgcgtgctgttgggcctcatcagttcctgggtgaccaagaggcgatccaagcagccattaagaaagtagaagatcaaggaaaagtgaaacaagctaaaaaatagtctttctcaactgttggctaagaagaaatgcaaaagaagtggcataggagtgtgttatgggtgctgaactctctctctttttccccrattttccagagctaggctgtggagtagagtttgtataggtaactaggtaacttattgtggcccagataaggctttaggatgcctcagtgcttatgtcatagccttatgagttagctttcttgctagccccctagtcggtcaccaaactagtaactagtggggcttaatgaaggtcataagtttctgagatgggagagcaacaagtagagatgaagttaaaggtatttatcattcaagaaatcattattgagtcaccattgacaggcactattctaatcagtagttcactttaatatttaataagattttctgggataacagtaagggatattagataatataccgtatgtatttattactagtcttttcctctaggaaaagggatactttgataattaaggccagaggcccattagttgagaaagtcacagatatatttctccaagaaagccaacaaccmccmccacaatgacagaaatgacaacaaggccctttaacttgtcttctagtttagagacatccttcatttgacatttagtagaattcctctttggccacaagaataagcagcaaataaacaactatggctgttgaggttctcattttggtttgttttaattttttgaactttgggtacctgtaattagtttaaaaataaagttcctgataataaagtgactgaaaatggcatccccaaagt

SEQ ID NO: 3917 - DNA, 2060 bp, Homo sapiens
aaaagagcgtcgatgccggcggcagtgatgagtcctaggaggcgctggstctttggcggctcggaggagcggctgctgctgctgctgctgctgctggtggcccctttgcagaaaagttctaagaacagtgctgttggctcagtgagatgaggttatcggaaaactttctgtttacacaagagttgcctccttcaaagaagcatgcatggtccttgcaggtcactgtgcccatcactctgcatagtccagctgcactctgcttcacacagctgcctgcccattgcaggcatttgagtttgcaatccatgccttaaactttaaatcacactggctacagcrttgtgtgtttcttggtaaacactgggtaaatcagctcctgtggatgttgactgaagtttctatgtttgcaagctaatcctcagcagtttctttatgtattgctgtccttgaatattagcccatttgaaaacgcctgggaagttcagccatcagtatgtccaagtacaaacttattatgttaagacatggagagggtgcttggaataaggagaaccgtttttgtagctgggtggatcagaaactcaacagcgaaggaatggaggaagctcggaactgtgggaagcaactcaaagcgttaaactttgagtttgatcttgtattcacatctgtccttaatcggtccattcacacagcctggctgatcctggaagagctaggccaggaatgggtgcctgtggaaagctcctggcgtctaaatgagygtcactatggggccttgatcggtctcaacagggagcagatggctttgaatcatggtgaagaacaagtgaggctctggagaagaagctacaatgtaaccccgcctcccattgaggagtctcatccttactaccaagaaatctacaacgaccggaggtataaagtatgcgatgtgcccttggatcaactgccacggtcggaaagcttaaaggatgttctggagagactccttccctattggaatgaaaggattgctcccgaagtattacgtggcaaaaccattctgatatctgctcatggaaatagcagtagggcactcctaaaacacctggaaggtatctcagatgaagacatcatcaacattactcttcctactggagtccccattcttctggaattggatgaaaacctgcgtgctgttgggcctcatcagttcctgggtgaccaagaggcgatccaagcagccattaagaaagtagaagatcaaggaaaagtgaaacaagctaaaaaatagtctttctcaactgttggctaagaagaaatgcaaaagaagtggcataggagtgtgttatgggtgctgaactctctctctttttccccrattttccagagctaggctgtggagtagagtttgtataggtaactaggtaacttattgtggcccagataaggctttaggatgcctcagtgcttatgtcatagccttatgagttagctttcttgctagccccctagtcggtcaccaaactagtaactagtggggcttaatgaaggtcataagtttctgagatgggagagcaacaagtagagatgaagttaaaggtatttatcattcaagaaatcattattgagtcaccattgacaggcactattctaatcagtagttcactttaatatttaataagattttctgggataacagtaagggatattagataatataccgtatgtatttattactagtcttttcctctaggaaaagggatactttgataattaaggccagaggcccattagttgagaaagtcacagatatatttctccaagaaagccaacaaccmccmccacaatgacagaaatgacaacaaggccctttaacttgtcttctagtttagagacatccttcatttgacatttagtagaattcctctttggccacaagaataagcagcaaataaacaactatggctgttgaggttctcattttggtttgttttaattttttgaactttgggtacctgtaattagtttaaaaataaagttcctgataataaagtgactgaaaatggcatccccaaagt

SEQ ID NO: 3918 - DNA, 1687 bp, Homo sapiens
tgcatctggatttattcctgctgaaaactctatcttgaggtaggtgcaagattatttagatgtattgctgtccttgaatattagcccatttgaaaacgcctgggaagttcagccatcagtatgtccaagtacaaacttattatgttaagacatggagagggtgcttggaataaggagaaccgtttttgtagctgggtggatcagaaactcaacagcgaaggaatggaggaagctcggaactgtgggaagcaactcaaagcgttaaactttgagtttgatcttgtattcacatctgtccttaatcggtccattcacacagcctggctgatcctggaagagctaggccaggaatgggtgcctgtggaaagctcctggcgtctaaatgagygtcactatggggccttgatcggtctcaacagggagcagatggctttgaatcatggtgaagaacaagtgaggctctggagaagaagctacaatgtaaccccgcctcccattgaggagtctcatccttactaccaagaaatctacaacgaccggaggtataaagtatgcgatgtgcccttggatcaactgccacggtcggaaagcttaaaggatgttctggagagactccttccctattggaatgaaaggattgctcccgaagtattacgtggcaaaaccattctgatatctgctcatggaaatagcagtagggcactcctaaaacacctggaaggtatctcagatgaagacatcatcaacattactcttcctactggagtccccattcttctggaattggatgaaaacctgcgtgctgttgggcctcatcagttcctgggtgaccaagaggcgatccaagcagccattaagaaagtagaagatcaaggaaaagtgaaacaagctaaaaaatagtctttctcaactgttggctaagaagaaatgcaaaagaagtggcataggagtgtgttatgggtgctgaactctctctctttttccccrattttccagagctaggctgtggagtagagtttgtataggtaactaggtaacttattgtggcccagataaggctttaggatgcctcagtgcttatgtcatagccttatgagttagctttcttgctagccccctagtcggtcaccaaactagtaactagtggggcttaatgaaggtcataagtttctgagatgggagagcaacaagtagagatgaagttaaaggtatttatcattcaagaaatcattattgagtcaccattgacaggcactattctaatcagtagttcactttaatatttaataagattttctgggataacagtaagggatattagataatataccgtatgtatttattactagtcttttcctctaggaaaagggatactttgataattaaggccagaggcccattagttgagaaagtcacagatatatttctccaagaaagccaacaaccmccmccacaatgacagaaatgacaacaaggccctttaacttgtcttctagtttagagacatccttcatttgacatttagtagaattcctctttggccacaagaataagcagcaaataaacaactatggctgttgaggttctcattttggtttgttttaattttttgaactttgggtacctgtaattagtttaaaaataaagttcctgataataaagtgactgaaaatggcatccccaaagt

SEQ ID NO: 3919 - DNA, 1743 bp, Homo sapiens
ctagaaaagagcgtcgatgccggcggcagtgatgagtcctaggaggcgctggstctttggcggctcggaggagcggctgctgctgctgctgctgctgctggtggcccctttgcagatgtattgctgtccttgaatattagcccatttgaaaacgcctgggaagttcagccatcagtatgtccaagtacaaacttattatgttaagacatggagagggtgcttggaataaggagaaccgtttttgtagctgggtggatcagaaactcaacagcgaaggaatggaggaagctcggaactgtgggaagcaactcaaagcgttaaactttgagtttgatcttgtattcacatctgtccttaatcggtccattcacacagcctggctgatcctggaagagctaggccaggaatgggtgcctgtggaaagctcctggcgtctaaatgagygtcactatggggccttgatcggtctcaacagggagcagatggctttgaatcatggtgaagaacaagtgaggctctggagaagaagctacaatgtaaccccgcctcccattgaggagtctcatccttactaccaagaaatctacaacgaccggaggtataaagtatgcgatgtgcccttggatcaactgccacggtcggaaagcttaaaggatgttctggagagactccttccctattggaatgaaaggattgctcccgaagtattacgtggcaaaaccattctgatatctgctcatggaaatagcagtagggcactcctaaaacacctggaaggtatctcagatgaagacatcatcaacattactcttcctactggagtccccattcttctggaattggatgaaaacctgcgtgctgttgggcctcatcagttcctgggtgaccaagaggcgatccaagcagccattaagaaagtagaagatcaaggaaaagtgaaacaagctaaaaaatagtctttctcaactgttggctaagaagaaatgcaaaagaagtggcataggagtgtgttatgggtgctgaactctctctctttttccccrattttccagagctaggctgtggagtagagtttgtataggtaactaggtaacttattgtggcccagataaggctttaggatgcctcagtgcttatgtcatagccttatgagttagctttcttgctagccccctagtcggtcaccaaactagtaactagtggggcttaatgaaggtcataagtttctgagatgggagagcaacaagtagagatgaagttaaaggtatttatcattcaagaaatcattattgagtcaccattgacaggcactattctaatcagtagttcactttaatatttaataagattttctgggataacagtaagggatattagataatataccgtatgtatttattactagtcttttcctctaggaaaagggatactttgataattaaggccagaggcccattagttgagaaagtcacagatatatttctccaagaaagccaacaaccmccmccacaatgacagaaatgacaacaaggccctttaacttgtcttctagtttagagacatccttcatttgacatttagtagaattcctctttggccacaagaataagcagcaaataaacaactatggctgttgaggttctcattttggtttgttttaattttttgaactttgggtacctgtaattagtttaaaaataaagttcctgataataaagtgactgaaaatggcatccccaaagt

SEQ ID NO: 3920 - DNA, 3465 bp, Homo sapiens
ctccttttcacggcgtcttgcattactattgtgcggctgcaggaggtgtcgagcggcgttatttttttttgcggtttgcctttttttttcttttttttttttttggaaccgcggttgtttaaaagcctgagggaacctggagrggggctcccactcyctaccytctttcctccgagtttgtgactccgagatggacaaagtgtgtgctgtttttggaggctcccgaggcattggcagagctgtggcccagttaatggcccggaaaggctaccgactggcggtcattgccagaaacctggaaggggccaaagccgccgccggtgacctcggcggagatcatttggcatttagctgtgatgttgctaaagaacatgatgttcaaaatacatttgaagagmtggagaaacatttaggtcgagtaaatttcttggtaaatgcagctggtattaacagggatggtcttttagtaagaacaaaaactgaagatatggtatctcagcttcatactaacctcttgggttccatgctgacctgtaaagctgccatgaggactatgattcaacaacagggagggtctattgttaatgtaggaagcattgttggcttaaaaggcaactctggccagtccgtttacagtgccagtaaaggaggattagttggattttcacgtgctcttgctaaagaggtagcaagaaagaaaattagagtgaatgtagttgcaccaggatttgtacacacagatatgacgaaagacttgaaagaagaacatttaaagaaaaatattcctcttgggaggtttggagaaactattgaggtggcacatgcggttgtgtttcttttagaatcaccgtatattacagggcatgttctggtagtggatgggggattacaactcattttgtaatttgcagattattcagttataggggtgattagcatcaagggcacactttggctactgattagacaattatacctacatgggtaacatgtgctaatcaaacctgctgatgctacaaatgttaatttctgtctttataaaaatatgtctcaaaagaacaatgtgtgacaaattgtggtttttttttttttggtctaagttacatcagtgttgttttgtttaaaaagccttcatgagatacaattcacataccatataatcacacatttaaaatacacaattcagtggttttaacatatttaaatacatgtgcaatcatccccccagacaaattgtgttttctaaaggatgtgtatcacttacctttggttacctcatagactgtagcaatcttagtgtatagacattttgcaagtcatataaacaagtattgatttatatattttgtctcaaaagtggaaaaattatattgtctaattatgatgaattattttcttgtatcaagctgaattttctaaaagttaaccttgtgggctgttgccaaaataagagtatttagaggacactgattagttgtcaatactttagcaagcccactaaagataactatattccttttgcatgtgcttgggtgatcagtttttatacaggttgcaaaacatagtattcattaaagacatgaatttagaattgatttctttgagtggtatttctcttgattgagcagctagacaaaataatctgcaaatttaaatgtggcgcatttgactcattcttgagaaattctcataagtgaagaggattagcccttaaggttttaatacctggtacagtagtgaaccgcacagatttcatgaacttaggatgtgttttttattcatgaaaaacttagaatagtgaactattaatatttaaaaacgagaamtacaacatttaaaaaattaagagtattttgcattagtgattatgattcttatcccaaaattctagaaagtaataaattctgtatgaataagcataaaaaataaataaatatgcaataacattaaattaaatgtctttacaagaagcagtgaaggcactggtcttaagtgagaatatttgcctgggagtagagataaagacacaaaccgaatgtgaaataccaggtaataattattttgcattaaactctttttatcgggaatagtatgatattttcartgtcactccattcatgttgatttggagctgacagttattttgtgtaagcagagatttaattttatattgaaagtcagtgcaaaattatgaataggatatactaataaatacaaagtaataacaaaagtcaaagcagtgttytaaataaaaattctgggttccttaaaaattattttaaatttatctttgaaatagttttcttagattaatctcaggatatgagaaagtcaattaagtgtgagtaaagttagtatcattaaacaaattgtctattaaatgcaagacgtggtaatatacagaatttatcaggcattaccaagtctaggcacatataggaaatgcagcactcagaatggtttcaatgtagtagttgatgcttgtaaggtaggggagcttattcagacatagtagatagtttctctaatgctgtctcaattgctggcctttggctacctgtacttccccattatggcagcccattcagtcttgagttttcttctctggacaccttatgctctgaaatcatgagcgaggctgattcaattggtgatttgggtagaaagcagtatgttttgctgacattaagatgtaggttatagataggtttagcctttaagtgtatgtttttatactttaaaataagaaatataaccttttaagctattccacctcctcccccagcctatctcaaactggtggaatatatggagagatcttgaaagaggtaaaataaaccttcactgctccactccaggtgaatccgcccactcccactgacctagtagaatttgtaatttaatacttaccttctatttctgaaatcagttgtgaactgttgccttatgttcagaggtttaagaacctcagtgaattcattttttaaaatctgctattctgagaagcattgaatgaattcttaacaagaagactcatctgtagctgtttgctgactcctatgagcccataagggttctgtgcttagcattaacaaaataaggtttataggtaaagccaatgtattaatttttttttgcatggagggctttaaaatttgtgctctttttcatattttattcatattcaatttatggtttgtaactgctttttagggagataattatatgttataaattagttttggggggaataattgtgcaaagaggataatttaatttacgtgcttctgttattcagaataaagagagaagactacgctgcatattcaagagttgtaccttaacattggtgaaacattttttctaagattttcaaaaggaatatgtgtaaattgagaaatcataaccactgtcctaacttggtaaacaaactgttcttaaataaagtatttaatgattttaaac

SEQ ID NO: 3921 - DNA, 1627 bp, Homo sapiens
ctccttttcacggcgtcttgcattactattgtgcggctgcaggaggtgtcgagcggcgttatttttttttgcggtttgcctttttttttcttttttttttttttggaaccgcggttgtttaaaagcctgagggaacctggagrggggctcccactcyctaccytctttcctccgagtttgtgactccgagatggacaaagtgtgtgctgtttttggaggctcccgaggcattggcagagctgtggcccagttaatggcccggaaaggctaccgactggcggtcattgccagaaacctggaaggggccaaagccgccgccggtgacctcggcggagatcatttggcatttagctgtgatgttgctaaagaacatgatgttcaaaatacatttgaagagmtggagaaacatttaggtcgagtaaatttcttggtaaatgcagctggtattaacagggatggtcttttagtaagaacaaaaactgaagatatggtatctcagcttcatactaacctcttgggttccatgctgacctgtaaagctgccatgaggactatgattcaacaacagggagggtctattgttaatgtaggaagcattgttggcttaaaaggcaactctggccagtccgtttacagtgccagtaaaggaggattagttggattttcacgtgctcttgctaaagaggtagcaagaaagaaaattagagtgaatgtagttgcaccaggttagtgaaaactttattaaaataacttgattatgattattgttttatagggaagccattatttggaacattagtaattgacatctgggtagaatagtttgtaaaatgattgtgaaaagaatcaaataatgaactgggggactcaaaaaaattttttgtacctcatattctatataaagtctatgtgttagcctgtttgcattgctctaaaggactgtctgaggtaattcataaaaaaaagaggcttatttggcwctcgggcctgcaggctgtacaagcatgacaccaacatctgctcagcttctggtgaggcccaggaaactttttttcagtcatggcggaaggtaaagaggtagcagccaagtcatatggggatagcaggagcaagagagagaggaggtggcaggctctaaacaaccagctctggcatgaactaacagtgagaactcattatttaccatgtggagggcaccaagctattcatgaggaatccgcctccatgacccaaacacctcccgctaggcccacctccaacattgggaatcacatttcaacatgagatttggaggggacaracatccaaaccataagagtctttatttttaaattttgcactagtggaataacttaaggtggagagggtcttagaaataattttttccagtcatttttgtagattagaaaactgtacctgggattcagagtgacttgcctaagrttacacagctagtttatggaagaactgttactaaaagctttgtcttttgatttccacctratgggagcttaaaaataatgtcctaccaggtatggtagctcatgtgggaggctgaggcaggagtattgtgaggccaggagttccagatcagcctgagcaacatagcaagatgctgtctgtaccg

SEQ ID NO: 3922 - DNA, 1935 bp, Homo sapiens
aggggagaagaagcggggggatgggtggagggtagaggggagaaaaatacgtgacaaagaaaacattctctgcytgggaggagactctctgagggtgtagagctagagggagcattcactggccatgccagtagttaccactgatgctgagtcagaaacaggtatcccaaaatccctttccaatgagcctccctcagaaaccatggaggaaatagagcacacatgcccacagcctcgactgaccctgackgcacctgccccatttgctgatgaaaccaactgccagtgtcaagcaccccatgaaaaactgaccattgctcaggcccgcttaggaacaccagctgacaggcctgtcagagtatacgccgatggaatatttgacctcttccactcaggtcatgcaagagcccttatgcaagcaaaaacactgtttcccaacagctacttgttggtaggagtttgcagtgatgatctcacccacaaattcaaaggtttcaccgtgatgaatgaagccgagagatacgaagctctcagacactgtcgctacgtagacgaagttatcagagatgctccctggacactcacgccagagtttctggaaaaacacaagattgactttgtggctcatgatgacattccktattcctctgctggctctgatgatgtttacaagcacataaaggaagcagggatgttcgttccaacgcagagaacagaaggcatctcaacatcggacatcattaccagaattgttcgtgactatgatgtttatgcccgacgtaacctccagagagggtatacagccaaggaactgaatgtcagctttataaatgagaagaggtaccgtttccagaaccaagtggacaaaatgaaggaaaaagtcaagaatgtggaggaaagatcaaaggaatttgtgaacagagtggaagaaaagagccatgatctaattcaaaagtgggaagagaagtcaagggaattcattggcaacttcctagaactgtttggacctgatggagcatggaagcagatgttccaggagaggagcagccggatgctgcagkccttatccccgaagcagagccctgtgagcagcccaacccggagccggtccccttcccgctccccatcgcccaccttctcatggcttccactcaaaacctcacccccttcctcacccaaagcagcctcagcctctatcagcagcatgagcgagggggatgaggatgaaaagtagaggctgctgggaggcaagagccgcaccatgcaggatggggaggagggcgagagtcacagggttgcctgggtggtgtttgaagggtaatagtcacaggagctgcagctcagcagagagaccctgaactctgctaagggaaggtcttgggaccagttctctctcactctccgtacagctgaagagttgggcgaggtgcagagacttctagctggacaacctacacaaaccttagcgtctagagtcactctaaccttgctaaggaaggatgcagagttccctagagagacttgcactgatggggtgacttctgctttggtccttccaccacccyyaccaagtaaaccacctgtggcagcggctgttccctcaacctgctacttctgcgtccataagggtcctgcacgttgcctcccaccaccccagctctgccagaataaaattgtttccaatagaggtggcaaagtgcttctgaaatagtcgagaaaaagacagattccaacctcctcagtccagccactgagacctgatgttggaacgcatcagctccttccagttccatgaatgtggctcatagacaaagccttgctttaggctggttataaaaggtcatctagtgtgaaccttaactttttattcaaaggacagttttgtcaagaactccacgtaaggcctgatgtgctcctggttgtactttctcatca

SEQ ID NO: 3923 - DNA, 1410 bp, Homo sapiens
aggggagaagaagcggggggatgggtggagggtagaggggagaaaaatacgtgacaaagaaaacattctctgcytgggaggagactctctgagggtgtagagctagagggagcattcactggccatgccagtagttaccactgatgctgagtcagaaacaggtatcccaaaatccctttccaatgagcctccctcagaaaccatggaggaaatagagcacacatgcccacagcctcgactgaccctgackgcacctgccccatttgctgatgaaaccaactgccagtgtcaagcaccccatgaaaaactgaccattgctcaggcccgcttaggaacaccagctgacaggcctgtcagagtatacgccgatggaatatttgacctcttccactcaggtcatgcaagagcccttatgcaagcaaaaacactgtttcccaacagctacttgttggtaggagtttgcagtgatgatctcacccacaaattcaaaggtttcaccgtgatgaatgaagccgagagatacgaagctctcagacactgtcgctacgtagacgaagttatcagagatgctccctggacactcacgccagagtttctggaaaaacacaagattgactttgtggctcatgatgacattccktattcctctgctggctctgatgatgtttacaagcacataaaggaagcagggatgttcgttccaacgcagagaacagaaggcatctcaacatcggacatcattaccagaattgttcgtgactatgatgtttatgcccgacgtaacctccagagagggtatacagccaaggaactgaatgtcagctttataaatgagaagaggtaccgtttccagaaccaagtggacaaaatgaaggaaaaagtcaagaatgtggaggaaagatcaaaggaatttgtgaacagagtggaagaaaagagccatgatctaattcaaaagtgggaagagaagtcaagggaattcattggcaacttcctagaactgtttggacctgatggagcatggcggctgttccctcaacctgctacttctgcgtccataagggtcctgcacgttgcctcccaccaccccagctctgccagaataaaattgtttccaatagaggtggcaaagtgcttctgaaatagtcgagaaaaagacagattccaacctcctcagtccagccactgagacctgatgttggaacgcatcagctccttccagttccatgaatgtggctcatagacaaagccttgctttaggctggttataaaaggtcatctagtgtgaaccttaactttttattcaaaggacagttttgtcaagaactccacgtaaggcctgatgtgctcctggttgtactttctcatcactggtttgacttcattgttttgcagaaattaccttaatccgtg

SEQ ID NO: 3924 - DNA, 1610 bp, Homo sapiens
aggggagaagaagcggggggatgggtggagggtagaggggagaaaaatacgtgacaaagaaaacattctctgcytgggaggagactctctgagggtgtagagctagagggagcattcactggccatgccagtagttaccactgatgctgagtcagaaacaggtatcccaaaatccctttccaatgagcctccctcagaaaccatggaggaaatagagcacacatgcccacagcctcgactgaccctgackgcacctgccccatttgctgatgaaaccaactgccagtgtcaagcaccccatgaaaaactgaccattgctcaggcccgcttaggaacaccagctgacaggcctgtcagagtatacgccgatggaatatttgacctcttccactcaggtcatgcaagagcccttatgcaagcaaaaacactgtttcccaacagctacttgttggtaggagtttgcagtgatgatctcacccacaaattcaaaggtttcaccgtgatgaatgaagccgagagatacgaagctctcagacactgtcgctacgtagacgaagttatcagagatgctccctggacactcacgccagagtttctggaaaaacacaagattgactttgtggctcatgatgacattccktattcctctgctggctctgatgatgtttacaagcacataaaggaagcagggatgttcgttccaacgcagagaacagaaggcatctcaacatcggacatcattaccagaattgttcgtgactatgatgtttatgcccgacgtaacctccagagagggtatacagccaaggaactgaatgtcagctttataaatgagaagaggtaccgtttccagaaccaagtggacaaaatgaaggaaaaagtcaagaatgtggaggaaagatcaaaggaatttgtgaacagagtggaagaaaagagccatgatctaattcaaaagtgggaagagaagtcaagggaattcattggcaacttcctagaactgtttggacctgatggagcatggaagcagatgttccaggagaggagcagccggatgctgcagkccttatccccgaagcagagccctctgaagagttgggcgaggtgcagagacttctagctggacaacctacacaaaccttagcgtctagagtcactctaaccttgctaaggaaggatgcagagttccctagagagacttgcactgatggggtgacttctgctttggtccttccaccacccyyaccaagtaaaccacctgtggcagcggctgttccctcaacctgctacttctgcgtccataagggtcctgcacgttgcctcccaccaccccagctctgccagaataaaattgtttccaatagaggtggcaaagtgcttctgaaatagtcgagaaaaagacagattccaacctcctcagtccagccactgagacctgatgttggaacgcatcagctccttccagttccatgaatgtggctcatagacaaagccttgctttaggctggttataaaaggtcatctagtgtgaaccttaactttttattcaaaggacagttttgtcaagaactccacgtaaggcctgatgtgctcctggttgtactttctcatca

SEQ ID NO: 3925 - DNA, 5573 bp, Homo sapiens
tcgcaggaggcgctccttggcggtgcctggagcccgggcgcaccccaccgctcccgggacctgttgggggctggcccgaaccgtcgtcgaagggagccgctcggccacccccgacgttcctcgccccgcccgacgttccctcaagtggccgaaccagccggacgagccaaactcgccgggcctcccggcggcagcaggtggccccgtccttccagggagggccctgcgccccgcggcgctccggagccctctcggccgcccccgccaggcgggatggaggcggatggggacggagaggagctggcccggctgcgctcagtcttcgccgcctgcgacgcgaaccgctcggggcgcctggagcgcgaggagttccgggcactgtgcacggagctgcgggtgcggccggccgacgccgaggcagtattccagcggctggacgccgaccgtgacggcgccatcaccttccaggagttcgcgcgtggcttcctcgggtccctccgcggggggcggcgccgggactggggtcctctggatcccgcgcccgccgtgtctgaggcggggccggagacacacgacagcgaggaggacgaaggcgacgaggacgcggcggcggcgctggccacctcgtgcggcccggcgagtcccggccgggcttggcaggatttccaggcgcgacttggggacgaagccaagttcattcccagagaagagcaagttagtaccttgtaccaaaacatcaaccttgtggagccaagattaattcagccatatgaacatgttataaagaacttcatccgtgagatcagacttcaaagcacagaaatggaaaatttggccattgcggtgaagagagcccaggacaaggcagctatgcagttgagtgagttggaagaggaaatggatcagaggattcaggctgcagaacataagacacggaaagacgaaaaacgcaaagctgaggaagccctcagtgacctcagacgtcagtatgaaactgaagtaggagatctgcaggtgaccattaaaaagctaagaaagctcgaagaacaatcaaaaygcgtaagtcaaaaggaagatgtggctgcattgaaaaaacaaatttatgatttatcaatggaaaaccagaaagttaagaaagaccttttagaagcacagacaaacatagcctttcttcagagtgagttagatgctttgaaaagtgattatgctgatcagagtctgaatactgaaagggatctggaaataatccgagcatacacagaagatcgaaatagtcttgagaggcaaattgaaatactccaaacagctaaccggaagctacatgacagtaatgatggccttagaagtgcccttgaaaacagttatagcaagttcaacagatctttgcatataaataatatctcaccagggaatacaatttctagaagcagtcccaaattcattggtcattcccctcaacctctaggctatgacaggtcatcccgctcttcctatgtggatgaggactgtgactccctggccctctgtgatcctctgcagaggacaaattgtgaagttgacagcctgcctgaaagctgcttcgacagcggcttgtctaccttgagagatcccaatgagtatgactcagaagtggaatacaagcaccagaggggatttcagaggtcacacggggtgcaggagagctttggaggtgatgcttcagacacagatgttcctgacataagggatgaagagacatttggtttagaagatgtggcttccgtcttagactggaagccccaagggtctgttagtgaaggcagcattgttagttcatcaagaaagcccatctcagcactctcgccccagacagacctggtagatgacaacgctaaatcttttagctcacagaaggcttacaagattgtacttgctggggacgctgcagtggggaagtctagtttcctcatgagactttgcaagaatgaatttcgagaaaatataagcgccaccctgggagttgayttccaaatgaaaaccctcattgtggatggagaacgaacagttctgcagctctgggatacagctggtcaggagagattcagaagtattgccaagtcttacttcagaaaggcagatggtgttttgctgctgtatgatgttacatgtgagaaaagctttcttaacatacgagaatgggtagatatgattgaggatgcagcccatgagactgttcccattatgctggtaggaaacaaggctgacattcgtgacactgctgctacagagggacaaaaatgtgtcccagggcactttggagagaaactggccatgacgtatggggcattattctgtgaaacaagtgccaaagatggttctaacatagtggaggctgttctgcaccttgctcgagaagtgaaaaagagaactgacaaggatgacagcagatccattaccaatctaaccgggaccaattccaaaaagtcaccacagatgaagaattgttgcaatggctaaatcccaaacatccttggcctgtgaagtcttcatttccagaatactgaatttgtgtgacttatttggctcttaacagagtggcayatcctactgacactgtcctatggagagttacagtgcaggaaacctgaacccagctctcaggtccctctggaactttggctcttctttgttttgtctcagtgagtgatttgggccctctggctaaatagactagtcatgtccttacaggtcttaaaagataacatgtaaatgtttttaaaatggtaaaaaaaaagaaatcacatgctcagatcaaagctgtagaggaaactgacataattagattcatgtggtggctgaattaggttacccacaaagtcagcatttaaatatttgatactaaagttctagtaagaagggattctcatcctagctttgctgttaactggccttgtgaccttggacatatcacaagcccatgtcggatctgtttcttcatctgtaaaatgtgcagcttgccctcaaaggccttgcagcccttggcacctcagattctgtgggaagcagtaggacagagagtgtggtggcccacagttaataatagaactatggttattcctgctttttaatattggagtattgatttttctcacttctgaaataaggacagaatttgattaaaaaatggaaacagaaatatctattttttatgtataaagaaacatgtttgagacaaaaatagttgtatataaaaggatatttcataatctcagaatagttacaaagctcactgcttgaatttggtgttaaaaattctaatggaaacatgtaaagccacatactactgaaagcacaatgcccaggaaagttgtcactcttcacttaagggagtggttgccaggggctgagaaagggaggatggggagtgactgctaataggtatgtggtttctttgggcgatgatgagaatgttctggaattggaatagtggtgatagttgtataactgtttgaatgtactaggaaccactgaattgtatactttgaaagggtgaattttatggttgtgaattatctcactaaaaaaaatgctagtacttagagtgatgtaacattttgcaaaattttcattttcgtatccctgctgatttcaaaccttcccatggtttagaagcataacctgtaatgtaatgcaagtcccctaactccctggttgctaacattaacttccttaagtaataatcaatgaaagaaattctatgcatggttttgaaataatgtccttgaaagaggaatcaccattaggaaaggtgagtcagggtcctttgtttaatgtgactagtggctcatcatcaccagtgacctggttgggcctactctccttccagaacctgcattgcttcccagacctccccactgagatgcctctaagagccaaaggagtcaacacttgagcctagggtgggctacaacaaaagattctaatttaccttgcttcatctaggtccaggccccaagtagcttgctgaaggaacttaaaaagtagctgttatttattgtattrtataagctaaaaacatttatttttgttgaatcgaaacaattccatgtagcaatcttttttctgttcacggtgtttgtgatagaaccttaaattccgcaagcatcagttttttgaaaaaatgggaattgaccggatagttacaggcaaagattataaatagctacaacatcatttaacttttataaacatgccttctctctattgaagacatctgatatttttgctggaaagttggatctatcctcagtaactctgccatgaattcctgtttcctggttccagaaaaagaaaagattacatttctgatcataaagaatgtcttgcatatgggaaatttttcaaaataaggggggtattatttatgtggcatgggaaaacttttgccatggctgtttgtcttagtggcatcttttgatgacattggatcagatatatgtagatgctgatatatgggacacatgtttaggttttggtgcagttgcacaaaactgtgttagtttatatgttactgtgttgcctttatttattctctccaaagtgtctctttatatttgttttacaatctgtgaaagagtataccataatacagaagtattttcatagtctttacctctggattgtcctgtcagtatagccacgttgatgagattacaccagtgcctttgatggtcaaccaatcatctttaagtatttgagccctgataaatattttggtaacataatccaaattagagacttagagctctggttagcaatcatgtttaaagagaagcttcttaaagctctgtatgctgggagattcatgattattaccaacgttttgatttcatgaaggtgttctcaaatttaaagcacattttcagtaagaacaaaaatatttaatgtttttatcttagacttgatacatttgcatattactatggaagttattcaccttgtccctgtttttctttaagatattttaaaatcatagttatactacagtccttttttaaatgtatcctgatacattgtaaaatattttaatttcattgtggaaaataatgttggataaggagatatttttcactgttaacttttagcccatgcattttcataatttatttttttcacttgctgctttatatgacatatgtgacatttgattatttaacacttgatgtgatctgcataaacccaagttgcacaaccctcctgctgaagataaaattgaggttaaagataaagatttattttcatatttgtacagtgatcggcttcagtgatggtttttgtgggcatttattgtgtgtgtgtaagaaatttcatatgtatatattaagtaggcctctgagtattgaataattgttttatgattttgatttatatggtttacattttcattgtgtgggccatatttcgtttatactgtttatttctcttcaaaccttaataattataccataaagtgtaatttttatagcaatgcaaatgtctaaggaactacaaatattttctacgttgtaaattcaataaagcttgcttcctttggc

SEQ ID NO: 3926 - DNA, 548 bp, Homo sapiens
ttcttctttgcagcaaaacctcagggttttgagtctcgtattcacatctttttactaagaagggctcctccagactcctggtgtatatttgttggaggccttaagctgttcrtggcagtacattgcggagcatagaacgaaaccgggtgtggaacactgagtcccaaggatagccatcttcagagatacggctcatgacccaggtacatggtaagcagagagcatcacacctgagcagcattcttactcagctcaacagcaatatctgagccyragtttcccattccaatcaccaggatgcgttttccctcaratccatctggatgcttgtattggcggctatggaaatattggcctttgaacctctccataccttcagggggaagaagagagaagtctgtgagctccagagcaactatgtcaagctaatttcaataaaactgcattgccagcttttcctttctggagttaataatttgttttgcctcttctctataggagtaaagcacataagaaagtttaggtaccagaccaggtggggcctgtaa

SEQ ID NO: 3927 - DNA, 450 bp, Homo sapiens
ttcttctttgcagcaaaacctcagggttttgagtctcgtattcacatctttttactaagaagggctcctccagactcctggtgtatatttgttggaggccttaaggtacatggtaagcagagagcatcacacctgagcagcattcttactcagctcaacagcaatatctgagccyragtttcccattccaatcaccaggatgcgttttccctcaratccatctggatgcttgtattggcggctatggaaatattggcctttgaacctctccataccttcagggggaagaagagagaagtctgtgagctccagagcaactatgtcaagctaatttcaataaaactgcattgccagcttttcctttctggagttaataatttgttttgcctcttctctataggagtaaagcacataagaaagtttaggtaccagaccaggtggggcctgtaa

SEQ ID NO: 3928 - DNA, 456 bp, Homo sapiens
gctcctgattatgacagaagccagtggctgaatgaaaaattcaagctgggcctggactttcccaatctgccctacttgattgatggggctcacaagatcacccagagcaacgccatcttgtgctacattgcccgcaagcacaacctgtgtggggagacagaagaggagaagattcgtgtggacattttggagaaccagaccatggacaaccatatgcagctgggcatgatctgctacaatccagaatttgagaaactgaagccaaagtacttggaggaactccctgaaaagctaaagctctactcagagtttctggggaagcggccatggtttgcaggaaacaagatcacytttgtagattttctcgtctatgatgtccttgacctccaccgtatatttgagcccaagtgcttggaygccttcccaaatctgaaggacttcatctcccgctttgag

SEQ ID NO: 3929 - DNA, 2951 bp, Homo sapiens
agtctcgcgcgcgggcggaggtgggccggtgcggcgctgtcacgtaggttcagtgggcggaagaggtggcyccggatgctgcggcgcccgctggccgggctggctgcggccgccctgggccgggccccaccggamggcttgctctgctctttacctggggttgctgtcgaggaccctgtgcaagactcggccggtttttctttytccctgatggacagacccaaacatagccgcgcagcatcgtgaagggctggggccttcactcctctgtggctctggaagagcccgatttcctcaggaggcatgtcgggccccaggcctgtggtgctgagcgggccttcgggagctgggaagagcaccctgctgaagaggctgctccaggagcamagcggcatctttggcttcagcgtgtcccataccacgaggaacccgaggcccggcgaggagaacggcaaagattactactttgtaaccagggaggtgatgcagcgtgacatagcagccggcgacttcatcgagcatgccgagttctcggggaacctgtatggcacgagcaaggtggcrgtgcaggcygtgcaggccatgaaccgcatctgtgtgctggacgtggacctgcagggtgtgcggaacatcaaggccaccgatctgcggcccatctacatctctgtgcagccgccttcactgcacgtgctggagcagcggctgcggcagcgcaacactgaaaccgaggagagcctggtgaagcggctggctgctgcccaggccgacatggagagcagcaaggagcccggcctgtttgatgtggtcatcattaacgacagcctggaccaggcctacgcagagctgaaggaggcgctctctgaggacccgcccgcccgcccctatgaccaacatgagctggagcttcctgacgcggctgctggaggagatccacaaccactccaccttcgtgggcaaggtgtggctcacggtgctggtggtcttccgcatcgtgctgacggctgtgggcggcgaggccatctactcggacgagcaggccaagttcacttgcaacacgcggcagccaggctgcgacaacgtctgctatgacgccttcgcgcccctgtcgcacgtgcgcttctgggtcttccagattgtggtcatctccacgccctcggtcatgtacctgggctacgccgtgcaccgcctggcccgtgcgtctgagcaggagcggcgccgcgccctccgccgccgcccggggccacgccgcgcgccccgagcgcacctgccgcccccgcacgccggctggcctgagcccgccgacctgggcgaggaggagcccatgctgggcctgggcgaggaggaggaggaggaggagacgggggcagccgagggcgccggcgaggaagcggaggaggcaggcgcggaggaggcgtgcactaaggcggtcggcgctgacggcaaggcggcagggaccccgggcccgaccgggcaacacgatgggcggaggcgcatccagcgggagggcctgatgcgcgtgtacgtggcccagctggtggccagggcagctttcgaggtggccttcctggtgggccagtacctgctgtacggcttcgaggtgcgaccgttctttccctgcagccgccagccctgcccgcacgtggtggactgcttcgtgtcgcgccctactgaaaagacggtcttcctgctggttatgtacgtggtcagctgcctgtgcctgctgctcaacctctgtgagatggcccacctgggcttgggcagcgcgcaggacgcggtgcgcggccgccgcggccccccggcctccgcccccgcccccgcgccgcggcccccgccctgcgccttccctgcggcggccgctggcttggcctgcccgcccgactacagcctggtggtgcgggcggccgagcgcgctcgggcgcatgaccagaacctggcaaacctggccctgcaggcgctgcgcgacggggcagcggctggggaccgcgaccgggacagttcgccgtgcgtcggcctccctgcggcctcccgggggccccccagagcaggcgcccccgcgtcccggacgggcagtgctacctctgcgggcactgtcggggagcagggccggcccggcacccacgagcggccaggagccaagcccagggctggctccgagaagggcagtgccagcagcagggacgggaagaccaccgtgtggatctgagggcgctggcttgcgagctgggccagggaggaggagggttggggggctccggtggaaacctgcgaccccttctcctcagccttctccttagccgrtggcctcaggcagactctgcccagaggggcagccaggctgctcagggaaggggctgaaagcggcagaggagtgccctggcttggtcaccactggggccaaggtggggtggagagaggcctaggagccagaaagggccctctgctgtggtctgaaccccagggggagtggggcattgactccacccctgtcctgagctggaataggtcctctgggatgccagctctcccctttgtgcttccctgcagcaacccatggagggcccagggtgcctggtatgggcatcagttggtgggggtgcgggggtgcgtgtccccattccctgcaacagcaaatggggctccttcttcagccctccccttcccagccccaaactgagacagactgggagctgggagcctggggtggacaggaccataccctctttgagcttctgcgatgccggccttccgttcctctgggaggcttgaagttctgcagagatgttgatatgccttgcagcttggacccaatgggtggtggtcagggcctgggggcttggccatgctgggggaatggggctctgggttcctgcctgtggcctgtctgtcctcctccctaattcagacccagcctcaagaggaaagggagtaaaataaaactaacttgtttataa

SEQ ID NO: 3930 - DNA, 2306 bp, Homo sapiens
ctgaggagcccaccgccgctctcgggggccgacttccgggggctgagccgttgaagcggaggctggggcggggggcagccggcgcggccggggcaggaggcgcagactcatgaaatggccacagatgataagacgtccccaacactggactctgctaatgatttgcctcgatctcctactagtccttctcatctcacacactttaaacctttgactcctgatcaagatgagcccccttttaaatcagcttatagttcttttgtaaatctctttcgttttaacaaagagagagcagaaggaggccagggagaacagcagcctttgagtggaagttggaccagccctcagctcccttcgaggacacagtctgttaggtcacccacaccttataaraagcagcttaatgaggaactccagcggcgctcttcagcattaggagacctccgagcttgcacatattgtagaaaaatagccttaagttatgctcattccacagacagtaattctattggggaagacttgaatgctctttcagattctgcttgctctgtgtctgtgcttgatccaagtgaaccccgaacacctgttgggagtaggaaagccagccgtaacatatttttagaggatgatttggcctggcaaagtttgattcatccagattcctcaaatactcctctttcaacaagacttgtatctgtgcaagaggatgctgggaaatctcctgctcgaaatagatcagccagcattactaacctgtcactggatagatctggttctcctatggtaccttcatatgagacatctgtcagtccccaggctaaccgaacatatgttaggacagagaccactgaggatgaacgcaaaattcttctggacagtgtgcagttaaaagacctgtggaaaaaaatctgccatcacagcagtggaatggagtttcaggatcaccgctactggttgagaacgcatcccaactgcattgtaggaaaggaattagtcaactggctaatccgaaatgggcatattgccacaagggcacaagctatagcaattggacaagcaatggttgatggacgttggctggattgtgttagtcatcacgaccagcttttcagagatgagtatgcgctgtatagaccactgcagagtacagaattttctgagacgccttctcccgacagtgactcagtgaactccgtggaaggacactctgagccatcctggtttaaagacataaagtttgatgacagtgacacagaacagatagctgaagaaggtgacgataatttggctaattctgccagtcctagcaagcgcacatcagtcagcagtttccagtccacagtggacagtgactcagccgcttctatcagcctgaacgtggagctggacaacgtgaacttccatatcaagaagccctccaagtacccacatgtgccccctcaccctgctgaccaaaaaggattctgaactattcttggaaagttagcaagtaaaacctagagaagaaggtgaaaatcacggcttccgtaaatctctagatgtagttttccgtgtataggaaaacatgggatagaggagcaagttaaacacaccatgagaaaacaatggattgtactccgaatgtgggacattgcacagaacatttgacctgggttcttttaaattcatgttatgaaaagaaaaaaagacaggagatctgttctagattaaaagagaatgaagagatacaggaaccaaatgccatgtgtgaacttgattgcatcgaggcttaagaagaaaaactgtggattaaaaacattttggagacagttggataaacttgagtatgggctaattctgtgctattaagacattgttaattttctcaaatatgtaaataattttgtggctatagagaagaatacctttatttttatgagagttgtgctgatgtcctagtggtaaagtgtcatgatgtgtgtaactttgaatgatcggggggaagaaacatacacatatatggcaaatccttaacaattgttgaactcaggtggatggtatacagcattttctgtaggtttgaatttttttcataactaaatggggaaaatccaccatttctggagtctcatatagatacaattaagctttagtgtgagaaggctggtaaagaacaatacattaattgaactaataggatttggtgttactcattcctgtgagggaagagtagaaataaagtgtaacatctatcttgcccacatactcgattttattgtatttggcatagtgcacttgaactttctaaataaaatattttctttgtt

SEQ ID NO: 3931 - DNA, 9617 bp, Homo sapiens
ccgcrtcaaccatgtaagcagcttcgcttcctgccgcaaccgtccgcggcctgaggagcccaccgccgctctcgggggccgacttccgggggctgagccgttgaagcggaggctggggcggggggcagccggcgcggccggggcaggaggcgcagactcatgaaatggccacagatgataagacgtccccaacactggactctgctaatgatttgcctcgatctcctactagtccttctcatctcacacactttaaacctttgactcctgatcaagatgagcccccttttaaatcagcttatagttcttttgtaaatctctttcgttttaacaaagagagagcagaaggaggccagggagaacagcagcctttgagtggaagttggaccagccctcagctcccttcgaggacacagtctgttaggtcacccacaccttataaraagcagcttaatgaggaactccagcggcgctcttcagcattaggagacctccgagcttgcacatattgtagaaaaatagccttaagttatgctcattccacagacagtaattctattggggaagacttgaatgctctttcagattctgcttgctctgtgtctgtgcttgatccaagtgaaccccgaacacctgttgggagtaggaaagccagccgtaacatatttttagaggatgatttggcctggcaaagtttgattcatccagattcctcaaatactcctctttcaacaagacttgtatctgtgcaagaggatgctgggaaatctcctgctcgaaatagatcagccagcattactaacctgtcactggatagatctggttctcctatggtaccttcatatgagacatctgtcagtccccaggctaaccgaacatatgttaggacagagaccactgaggatgaacgcaaaattcttctggacagtgtgcagttaaaagacctgtggaaaaaaatctgccatcacagcagtggaatggagtttcaggatcaccgctactggttgagaacgcatcccaactgcattgtaggaaaggaattagtcaactggctaatccgaaatgggcatattgccacaagggcacaagctatagcaattggacaagcaatggttgatggacgttggctggattgtgttagtcatcacgaccagcttttcagagatgagtatgcgctgtatagaccactgcagagtacagaattttctgagacgccttctcccgacagtgactcagtgaactccgtggaaggacactctgagccatcctggtttaaagacataaagtttgatgacagtgacacagaacagatagctgaagaaggtgacgataatttggctaattctgccagtcctagcaagcgcacatcagtcagcagtttccagtccacagtggacagtgactcagccgcttctatcagcctgaacgtggagctggacaacgtgaacttccatatcaagaagccctccaagtacccacatgtgccccctcaccctgctgaccaaaaagagtatttgatttctgacactggaggacaacagctctcaataagtgacgctttcatcaaagaatccttatttaatcgccgagtagaggaaaaatccaaagagctgcctttcacacctttgggctggcatcataacaacctggagctcctgagggaggagaatggggagaaacaagccatggagaggttgctttcagctaatcataaccacatgrtggcactactccagcagttgctccatagtgactcactgtcatcatcttggagggacatcatcgtgtcattggtctgccaggttgttcagacagtccgacctgatgtcaagaaccaggatgatgacatggatatccgtcagtttgtccacatcaaaaaaatcccaggtggaaagaagtttgattctgtggttgtcaatggctttgtttgtaccaagaacattgcacataaaaagatgaattcttgtattaaaaacccyaaaattcttctgttgaagtgttccattgagtatctctacagagaagaaactaagtttacttgcattgatcctattgtgcttcaggaaagggaattcttgaagaattatgtccagcgaatagttgatgttcgacccaccttggttcttgttgagaaaacagtgtctcggattgcccaggacatgttattggaacatggcattactttggtcattaatgtaaagtcacaagttttggaacgaatcagtcgaatgacccaaggtgatttagtgatgtcaatggaccagctgcttacgaaaccacacctgggcacttgtcacaaattttatatgcagatatttcagttgcctaatgaacaaaccaagacactgatgttttttgaaggttgtccacagcacctaggctgtacaatcaagctaagaggaggctctgattatgagctggctcgagttaaggagatcctaatatttatgatctgtgttgcttatcattctcaactagaaatatcctttctcatggatgaatttgctatgcctcccacattaatgcaaaacccttcattccattccctgattgagggacgagggcatgagggggctgtccaagagcagtacggtggaggttccatcccctgggatcctgacatccctcctgagtctctgccctgtgatgatagcagtttgctggaatygaggattgtgtttgagaagggtgagcaggaaaataaaaatcttccgcaggctgttgcctctgtgaagcatcaagaacatagcacaacagcttgcccggcgggtctcccttgtgctttctttgcacctgtaccggaatcattgttgccactccctgtggatgaccaacaagatgctttaggcagcgagcwgccagagastttgcagcaaacagttgtgctgcaggatcccaaaagccagataagagcctttagagaccctctacaggatgacactggattatatgttactgaggaagtcacckcctctgaagataaacgraagacttattctttggcctttaagcaggaattaaaagatgtgatcctctgtatctccccagtaatcacattccgagaaccctttcttttaactgaaaaggggatgagatgctctacccgagattattttgcagagcaggtttactggtctcctctcctcaataaagaattcaaagaaatggagaacaggaggaagaaacagctgctcagggatctctctggacttcagggcatgaatggaagtattcaggccaagtctattcaagtcttaccctcacatgagctagtgagcactagaattgctgagcatctgggcgatagccagagcttgggtagaatgctggccgattatcgagccagaggaggaagaattcagcccaaaaattcagacccttttgctcattcaaaggatgcatcaagtacttcaagtggcmaatcaggaagcaaaaaygagggtgatgaagagagagggcttattctgagtgatgctgtgtggtcaacaaaggtggactgtctgaatcccattaatcaccagagactttgtgtgctcttcagcagctcttctgcccagtccagcaatgctcctagtgcctgtgtcagtccttggattgtaacaatggaattttatggaaagaatgatcttacattaggaatatttttagagagatactgtttcaggccttcttatcagtgtccaagcatgttctgtgatacccccatggtacatcatattcggcgctttgttcatggccaaggctgtgtgcagataatcctgaaggagttggattctccagtacctggatatcagcatacaattcttacatattcctggtgtagaatctgcaaacaggtaacaccagttgttgctctttccaatgagtcctggtctatgtcatttgcaaaataccttgaacttaggttttatgggcaccagtatactcgcagagccaacgctgagccctgtggtcactccatccatcatgattatcaccagtatttctcctataaccagatggtggcgtctttcagttattctcccattcggcttcttgaagtatgtgttccactccccaaaatattcattaagcgtcaggccccattraaagtgtcccttcttcaggatctgaaggacttctttcaaaaagtttcacaggtatatgttgccattgatgaaagacttgcatctttgaaaactgatacatttagtaaaacaagagaggaaaaaatggaagatatttttgcacagaaagagatggaagaaggtgagttcaagaactggattgagaagatgcaagcaaggctcatgtcttcctctgtagatacccctcagcaactgcagtcggtctttgagtcactcattgccaagaaacaaagtctctgtgaagtgctgcaagcttggaataacaggttgcaggaccttttccaacaggaaaagggtagaaagagaccttcagttcctccaagtcctggaagactgagacaaggggaagaaagcaagataagtgcgatggatgcatctccacggaatatttctccaggacttcagaatggagaaaaagaggatcgcttcttaacaactttgtccagccagagctccaccagttctactcatctccarttgcctacgccacctgaagtcatgtctgaacagtcagtgggagggccccctgagctagatacagccagcagttccgaagatgtgtttgatgggcatttgctgggatccacagacagccaagtgaaggaaaagtcaaccatgaaagccatctttgcaaatttgcttccaggaaatagctataatcctattccatttccttttgatccagataaacactacttaatgtatgaacatgaacgagtgcccattgcagtctgygagaaggaacccagctccatcattgcttttgctctcagttgtaaagaataccgaaatgccttagaggaattgtctaaagcgactcagtggaacagtgccgaagaagggcttccaacaaatagtacttcagatagcagaccaaagagtagcagccctatcagattacctgaaatgagtggaggacagacaaatcgtacaacagaaacagaaccacaaccaaccaaaaaggcttctggaatgttgtccttcttcagagggacagcagggaaaagccccgatctctcttcccagaagagagagaccttacgtggagcagatagtgcttactaccaggttgggcagacrggcaaggaggggaccgagaatcaaggcgttgagcctcaagatgaagtagatggaggagatacrcaaaagaagcaactcataaatcctcatgtggaacttcaattttcagatgctaatgccaagttttactgtcggctctactatgcgggagagtttcataagatgcgtgaagtgatyctggacagcagtgargaagatttcattcgttccctctcccactcatcaccctggcaggcccrgggaggcaaatcaggagctgccttctatgcaactgaggatgatagatttattttgaagcaaatgcctcgtctggaagtccagtccttcctcgactttgcaccacattacttcaattatattacaaatgctgttcaacaaaagaggcccacggcgttggccaaaattcttggagtttacagaattggttataagaactctcagaacaacactgagaagaagttagatctccttgtcatggaaaatcttttctacgggagaaagatggcacaggtttttgatttgaagggctctcttaggaatcggaatgtaaaaactgacactggaaaagagagttgtgatgtggtcctgctagatgaaaatctcctaaagatggttcgagacaaccctctatatattcgttctcattccaaagctgtgctgagaacctcgatccatagtgactcccatttcctttctagccacctcattatagattattctttgctggttgggcgagatgatactagcaatgagctagtagttggaattatagattatattcgaacatttacatgggacaaaaagcttgagatggttgtgaaatcaacaggaattttaggtggacaaggtaaaatgccaacagtggtgtctccggagttgtacaggactaggttttgtgaggcaatggacaagtatttcctaatggtaccagaccactggacaggcttgggtctgaattgctgaaatcaagcacatattttgaaatggactgtgaaggaaaaggggacaggaacaaaggaccaaaaataagctacatgttttatttcttcatcgtgttcaccactgtatgccaaggcttttcagttctgtgkctgtttagactgtccgtaatggaatggtaaaactccatgaatttgcactttggtttttgatacctgtggagctgtctgtacgttgggaagtggcatgaaaattttcttaagctaaaatacagacatgtttcaaagggctaaagttggagatgagtagatagggtgaaaaatgggttaaatttgctagcttaattgttttaagaagaaaacagtgtctcataaattgactatcctggcatcacatttaacatgttatctacttagaaagcatttgtagagctgctgaatttgttttgtgtttttctgtaataatttaatgttacttattatcagaatttctgaaacctttacaaaaattctgatttattccattaatggccagttaaacacgtgggcatttattgttttattgaggaatttgacttaaactgggaatcctgtcatgttgtttatctttccagcttgcctgtttttgagtatgtttgatgtttttaaaattttgtcttctctgtggawgacaggaggctacagcaattaactttaagcctccttttagagatatttttaaarcttgtttaaaatttttgtgcaattcatatattaaattgcacttacttgcatacgctcatattctagggttttttctctatttttagggtatcatagtaaatcattagtaaatgagtctgtagttactaaaccctaatggaataattattaatgaaagatttttgaaatataaaaaataaattaggcccaatccaagaaattgagtgagaaggaaacacttgttttattcacagaggtaaagtgtcttttcaatataaccagcaatttaggtggcatctataaaataaaaaatttctactgtggacatccccttttccaactttctacataatggctagttctgactactaagaaatgttaagaaataggccaagtgcggtggctcacgcctataatcctatcactttgggaggcctaggcaggcagatcacctgaggtcaggagttcaagaccagcctggccaacatgaggaaaccccatctctactaaaaagacaaaaaattagctgggcatggtggcatatacctgtaaccccaactacttgggtggctgaggcaggagaattgtttgaacctgggaggcggaggctgcagtgagctgggattacaccattgcattccagcctgggcaacagagcaagactgtctcaaaaaacaaaacgaaacaaaaaaagaaagttattcttagtaaggaacttcttgtttaatagcatttttgtttattttaaaaagtgatcagaagtagtaaactatctttgaggaaatactgtaaccccagaatatttcctcttgacttctttttgtaacaaggataatttagggatttataaagttgtaaggatttcactgttttcggactgcctataataatagcacattaaccttcacataataagaaatctggacaagttcagttacacagtatgatgaatacttgaattaggaacattgtggaaaatttgctttagagaatcaaggcagtagtttggtatttggtgcttattaaaaatgtggtttgttttgaactggaagcaagttgaccaaggacttatgactaatgtgatgctaagttccacttggccccttttaaaaacgtgtatgtgccttttgaagatacacaaaacactgaggattttagttttgaaatcaaagactattaaaggagctgtacagaggtaaaaaaataaatgtggaacattattaacttattttgtgtctaggaacaatggattttgtatctgatttaaaatgccaacactgttttgtctctgttcattttttctgtgaggatacttaaggttattattcctgtctgtttcctgtactcccctagtcatgagcacttgaagtacaaggtgtctccccctaggtgcaattaggttgtttctttgtttttagtttcaattctatgtgcatagcaggaatgctccacaggaatggcttctgacaataatctgtcctgttgattttgttttccttgcccatgacttgaacaactgtgttttaaagtactgtagtctagtaggtaactttgtggcaaaaattttcaatataatacattctgaaacaatagttgctgccttgcaaaggtaatctctcattttaaaattggacagtattaatgaaggggaaatatacaatttatttctattgagtggtagaactatatgtctggtcccttgctgctcttgtttaggccactatcatagatatatttcaaatattgtactactcagtgttaagtattgaatgactgtttccctttccttcaaggcctagagtatattctgaaaatttaggaatgaggaagaaatcttaatacttccttccttaacatacaacatgagtcccgagaataattgatagtagcaagagaaaactatgtcagtaacatgttgctttgtataaaaatcttatttataaatgtgaagctttttgatgccatcaaaacttattaaaaaataggatttacttttttctaattctgacctaagaaaaataatgagaacaagctgttgcaagctcttttgtagtctattgaatattttatagatattcaaaatttcctacaaactataattttttccatgatttagcagtgagtgattttctagctttggctcttattaggtattgtaaatagtagggttatatcgatatcagcttttgtgatggcattgtggtcatcagcttcatgacattttacccatttgcagtgatcctgtgtaaaactgccaaggaaagtaattacctgtaggagtttgctgagcttgaagagtgaaaactgttgtgaatgagcctgatcataaaacggaccaggccattcattattcctcaagtgttaatatactgacttatgcagtattcaaaccatctagtgcaatgtttttgtttttgttttttttttttggtaacacaggtgcagtgtattatagaaaaaataaaaactacaatcattagcagttttaatactgctgtgtcagttttgtaaaaaatgtacattatgtcttttgacatgttgaattttaaactagggaaatgacattgtaaatcatagtagcctcttttaatttaatatgaaaaatgccactatattgaaagtacttaatgtattgtatatatttctctactttggttctagctattttatatgattgacatgttatttaaaagataactgccttgaacttttggagacttgtactgtaaataaagaaatcttaacaataaactcagaatctacttactcc

SEQ ID NO: 3932 - DNA, 9741 bp, Homo sapiens
cgcrtcaaccatgtaagcagcttcgcttcctgccgcaaccgtccgcggcctgaggagcccaccgccgctctcgggggccgacttccgggggctgagccgttgaagcggaggctggggcggggggcagccggcgcggccggggcaggaggcgcagactcatgaaatggccacagatgataagacgtccccaacactggactctgctaatgatttgcctcgatctcctactagtccttctcatctcacacactttaaacctttgactcctgatcaagatgagcccccttttaaatcagcttatagttcttttgtaaatctctttcgttttaacaaagagagagcagaaggaggccagggagaacagcagcctttgagtggaagttggaccagccctcagctcccttcgaggacacagtctgttaggtcacccacaccttataaraagcagcttaatgaggaactccagcggcgctcttcagcattagacacaagaaggaaagcagaacctacctttggaggtcatgaccctcgtacagctgttcagcttcgaagcctcagcacagtattaaaacgcctcaaggaaatcatggaggggaaaagccaggagacctccgagcttgcacatattgtagaaaaatagccttaagttatgctcattccacagacagtaattctattggggaagacttgaatgctctttcagattctgcttgctctgtgtctgtgcttgatccaagtgaaccccgaacacctgttgggagtaggaaagccagccgtaacatatttttagaggatgatttggcctggcaaagtttgattcatccagattcctcaaatactcctctttcaacaagacttgtatctgtgcaagaggatgctgggaaatctcctgctcgaaatagatcagccagcattactaacctgtcactggatagatctggttctcctatggtaccttcatatgagacatctgtcagtccccaggctaaccgaacatatgttaggacagagaccactgaggatgaacgcaaaattcttctggacagtgtgcagttaaaagacctgtggaaaaaaatctgccatcacagcagtggaatggagtttcaggatcaccgctactggttgagaacgcatcccaactgcattgtaggaaaggaattagtcaactggctaatccgaaatgggcatattgccacaagggcacaagctatagcaattggacaagcaatggttgatggacgttggctggattgtgttagtcatcacgaccagcttttcagagatgagtatgcgctgtatagaccactgcagagtacagaattttctgagacgccttctcccgacagtgactcagtgaactccgtggaaggacactctgagccatcctggtttaaagacataaagtttgatgacagtgacacagaacagatagctgaagaaggtgacgataatttggctaattctgccagtcctagcaagcgcacatcagtcagcagtttccagtccacagtggacagtgactcagccgcttctatcagcctgaacgtggagctggacaacgtgaacttccatatcaagaagccctccaagtacccacatgtgccccctcaccctgctgaccaaaaagagtatttgatttctgacactggaggacaacagctctcaataagtgacgctttcatcaaagaatccttatttaatcgccgagtagaggaaaaatccaaagagctgcctttcacacctttgggctggcatcataacaacctggagctcctgagggaggagaatggggagaaacaagccatggagaggttgctttcagctaatcataaccacatgrtggcactactccagcagttgctccatagtgactcactgtcatcatcttggagggacatcatcgtgtcattggtctgccaggttgttcagacagtccgacctgatgtcaagaaccaggatgatgacatggatatccgtcagtttgtccacatcaaaaaaatcccaggtggaaagaagtttgattctgtggttgtcaatggctttgtttgtaccaagaacattgcacataaaaagatgaattcttgtattaaaaacccyaaaattcttctgttgaagtgttccattgagtatctctacagagaagaaactaagtttacttgcattgatcctattgtgcttcaggaaagggaattcttgaagaattatgtccagcgaatagttgatgttcgacccaccttggttcttgttgagaaaacagtgtctcggattgcccaggacatgttattggaacatggcattactttggtcattaatgtaaagtcacaagttttggaacgaatcagtcgaatgacccaaggtgatttagtgatgtcaatggaccagctgcttacgaaaccacacctgggcacttgtcacaaattttatatgcagatatttcagttgcctaatgaacaaaccaagacactgatgttttttgaaggttgtccacagcacctaggctgtacaatcaagctaagaggaggctctgattatgagctggctcgagttaaggagatcctaatatttatgatctgtgttgcttatcattctcaactagaaatatcctttctcatggatgaatttgctatgcctcccacattaatgcaaaacccttcattccattccctgattgagggacgagggcatgagggggctgtccaagagcagtacggtggaggttccatcccctgggatcctgacatccctcctgagtctctgccctgtgatgatagcagtttgctggaatygaggattgtgtttgagaagggtgagcaggaaaataaaaatcttccgcaggctgttgcctctgtgaagcatcaagaacatagcacaacagcttgcccggcgggtctcccttgtgctttctttgcacctgtaccggaatcattgttgccactccctgtggatgaccaacaagatgctttaggcagcgagcwgccagagastttgcagcaaacagttgtgctgcaggatcccaaaagccagataagagcctttagagaccctctacaggatgacactggattatatgttactgaggaagtcacckcctctgaagataaacgraagacttattctttggcctttaagcaggaattaaaagatgtgatcctctgtatctccccagtaatcacattccgagaaccctttcttttaactgaaaaggggatgagatgctctacccgagattattttgcagagcaggtttactggtctcctctcctcaataaagaattcaaagaaatggagaacaggaggaagaaacagctgctcagggatctctctggacttcagggcatgaatggaagtattcaggccaagtctattcaagtcttaccctcacatgagctagtgagcactagaattgctgagcatctgggcgatagccagagcttgggtagaatgctggccgattatcgagccagaggaggaagaattcagcccaaaaattcagacccttttgctcattcaaaggatgcatcaagtacttcaagtggcmaatcaggaagcaaaaaygagggtgatgaagagagagggcttattctgagtgatgctgtgtggtcaacaaaggtggactgtctgaatcccattaatcaccagagactttgtgtgctcttcagcagctcttctgcccagtccagcaatgctcctagtgcctgtgtcagtccttggattgtaacaatggaattttatggaaagaatgatcttacattaggaatatttttagagagatactgtttcaggccttcttatcagtgtccaagcatgttctgtgatacccccatggtacatcatattcggcgctttgttcatggccaaggctgtgtgcagataatcctgaaggagttggattctccagtacctggatatcagcatacaattcttacatattcctggtgtagaatctgcaaacaggtaacaccagttgttgctctttccaatgagtcctggtctatgtcatttgcaaaataccttgaacttaggttttatgggcaccagtatactcgcagagccaacgctgagccctgtggtcactccatccatcatgattatcaccagtatttctcctataaccagatggtggcgtctttcagttattctcccattcggcttcttgaagtatgtgttccactccccaaaatattcattaagcgtcaggccccattraaagtgtcccttcttcaggatctgaaggacttctttcaaaaagtttcacaggtatatgttgccattgatgaaagacttgcatctttgaaaactgatacatttagtaaaacaagagaggaaaaaatggaagatatttttgcacagaaagagatggaagaaggtgagttcaagaactggattgagaagatgcaagcaaggctcatgtcttcctctgtagatacccctcagcaactgcagtcggtctttgagtcactcattgccaagaaacaaagtctctgtgaagtgctgcaagcttggaataacaggttgcaggaccttttccaacaggaaaagggtagaaagagaccttcagttcctccaagtcctggaagactgagacaaggggaagaaagcaagataagtgcgatggatgcatctccacggaatatttctccaggacttcagaatggagaaaaagaggatcgcttcttaacaactttgtccagccagagctccaccagttctactcatctccarttgcctacgccacctgaagtcatgtctgaacagtcagtgggagggccccctgagctagatacagccagcagttccgaagatgtgtttgatgggcatttgctgggatccacagacagccaagtgaaggaaaagtcaaccatgaaagccatctttgcaaatttgcttccaggaaatagctataatcctattccatttccttttgatccagataaacactacttaatgtatgaacatgaacgagtgcccattgcagtctgygagaaggaacccagctccatcattgcttttgctctcagttgtaaagaataccgaaatgccttagaggaattgtctaaagcgactcagtggaacagtgccgaagaagggcttccaacaaatagtacttcagatagcagaccaaagagtagcagccctatcagattacctgaaatgagtggaggacagacaaatcgtacaacagaaacagaaccacaaccaaccaaaaaggcttctggaatgttgtccttcttcagagggacagcagggaaaagccccgatctctcttcccagaagagagagaccttacgtggagcagatagtgcttactaccaggttgggcagacrggcaaggaggggaccgagaatcaaggcgttgagcctcaagatgaagtagatggaggagatacrcaaaagaagcaactcataaatcctcatgtggaacttcaattttcagatgctaatgccaagttttactgtcggctctactatgcgggagagtttcataagatgcgtgaagtgatyctggacagcagtgargaagatttcattcgttccctctcccactcatcaccctggcaggcccrgggaggcaaatcaggagctgccttctatgcaactgaggatgatagatttattttgaagcaaatgcctcgtctggaagtccagtccttcctcgactttgcaccacattacttcaattatattacaaatgctgttcaacaaaagaggcccacggcgttggccaaaattcttggagtttacagaattggttataagaactctcagaacaacactgagaagaagttagatctccttgtcatggaaaatcttttctacgggagaaagatggcacaggtttttgatttgaagggctctcttaggaatcggaatgtaaaaactgacactggaaaagagagttgtgatgtggtcctgctagatgaaaatctcctaaagatggttcgagacaaccctctatatattcgttctcattccaaagctgtgctgagaacctcgatccatagtgactcccatttcctttctagccacctcattatagattattctttgctggttgggcgagatgatactagcaatgagctagtagttggaattatagattatattcgaacatttacatgggacaaaaagcttgagatggttgtgaaatcaacaggaattttaggtggacaaggtaaaatgccaacagtggtgtctccggagttgtacaggactaggttttgtgaggcaatggacaagtatttcctaatggtaccagaccactggacaggcttgggtctgaattgctgaaatcaagcacatattttgaaatggactgtgaaggaaaaggggacaggaacaaaggaccaaaaataagctacatgttttatttcttcatcgtgttcaccactgtatgccaaggcttttcagttctgtgkctgtttagactgtccgtaatggaatggtaaaactccatgaatttgcactttggtttttgatacctgtggagctgtctgtacgttgggaagtggcatgaaaattttcttaagctaaaatacagacatgtttcaaagggctaaagttggagatgagtagatagggtgaaaaatgggttaaatttgctagcttaattgttttaagaagaaaacagtgtctcataaattgactatcctggcatcacatttaacatgttatctacttagaaagcatttgtagagctgctgaatttgttttgtgtttttctgtaataatttaatgttacttattatcagaatttctgaaacctttacaaaaattctgatttattccattaatggccagttaaacacgtgggcatttattgttttattgaggaatttgacttaaactgggaatcctgtcatgttgtttatctttccagcttgcctgtttttgagtatgtttgatgtttttaaaattttgtcttctctgtggawgacaggaggctacagcaattaactttaagcctccttttagagatatttttaaarcttgtttaaaatttttgtgcaattcatatattaaattgcacttacttgcatacgctcatattctagggttttttctctatttttagggtatcatagtaaatcattagtaaatgagtctgtagttactaaaccctaatggaataattattaatgaaagatttttgaaatataaaaaataaattaggcccaatccaagaaattgagtgagaaggaaacacttgttttattcacagaggtaaagtgtcttttcaatataaccagcaatttaggtggcatctataaaataaaaaatttctactgtggacatccccttttccaactttctacataatggctagttctgactactaagaaatgttaagaaataggccaagtgcggtggctcacgcctataatcctatcactttgggaggcctaggcaggcagatcacctgaggtcaggagttcaagaccagcctggccaacatgaggaaaccccatctctactaaaaagacaaaaaattagctgggcatggtggcatatacctgtaaccccaactacttgggtggctgaggcaggagaattgtttgaacctgggaggcggaggctgcagtgagctgggattacaccattgcattccagcctgggcaacagagcaagactgtctcaaaaaacaaaacgaaacaaaaaaagaaagttattcttagtaaggaacttcttgtttaatagcatttttgtttattttaaaaagtgatcagaagtagtaaactatctttgaggaaatactgtaaccccagaatatttcctcttgacttctttttgtaacaaggataatttagggatttataaagttgtaaggatttcactgttttcggactgcctataataatagcacattaaccttcacataataagaaatctggacaagttcagttacacagtatgatgaatacttgaattaggaacattgtggaaaatttgctttagagaatcaaggcagtagtttggtatttggtgcttattaaaaatgtggtttgttttgaactggaagcaagttgaccaaggacttatgactaatgtgatgctaagttccacttggccccttttaaaaacgtgtatgtgccttttgaagatacacaaaacactgaggattttagttttgaaatcaaagactattaaaggagctgtacagaggtaaaaaaataaatgtggaacattattaacttattttgtgtctaggaacaatggattttgtatctgatttaaaatgccaacactgttttgtctctgttcattttttctgtgaggatacttaaggttattattcctgtctgtttcctgtactcccctagtcatgagcacttgaagtacaaggtgtctccccctaggtgcaattaggttgtttctttgtttttagtttcaattctatgtgcatagcaggaatgctccacaggaatggcttctgacaataatctgtcctgttgattttgttttccttgcccatgacttgaacaactgtgttttaaagtactgtagtctagtaggtaactttgtggcaaaaattttcaatataatacattctgaaacaatagttgctgccttgcaaaggtaatctctcattttaaaattggacagtattaatgaaggggaaatatacaatttatttctattgagtggtagaactatatgtctggtcccttgctgctcttgtttaggccactatcatagatatatttcaaatattgtactactcagtgttaagtattgaatgactgtttccctttccttcaaggcctagagtatattctgaaaatttaggaatgaggaagaaatcttaatacttccttccttaacatacaacatgagtcccgagaataattgatagtagcaagagaaaactatgtcagtaacatgttgctttgtataaaaatcttatttataaatgtgaagctttttgatgccatcaaaacttattaaaaaataggatttacttttttctaattctgacctaagaaaaataatgagaacaagctgttgcaagctcttttgtagtctattgaatattttatagatattcaaaatttcctacaaactataattttttccatgatttagcagtgagtgattttctagctttggctcttattaggtattgtaaatagtagggttatatcgatatcagcttttgtgatggcattgtggtcatcagcttcatgacattttacccatttgcagtgatcctgtgtaaaactgccaaggaaagtaattacctgtaggagtttgctgagcttgaagagtgaaaactgttgtgaatgagcctgatcataaaacggaccaggccattcattattcctcaagtgttaatatactgacttatgcagtattcaaaccatctagtgcaatgtttttgtttttgttttttttttttggtaacacaggtgcagtgtattatagaaaaaataaaaactacaatcattagcagttttaatactgctgtgtcagttttgtaaaaaatgtacattatgtcttttgacatgttgaattttaaactagggaaatgacattgtaaatcatagtagcctcttttaatttaatatgaaaaatgccactatattgaaagtacttaatgtattgtatatatttctctactttggttctagctattttatatgattgacatgttatttaaaagataactgccttgaacttttggagacttgtactgtaaataaagaaatcttaacaataaactcagaatctacttactccacttag

SEQ ID NO: 3933 - DNA, 854 bp, Homo sapiens
cgcrtcaaccatgtaagcagcttcgcttcctgccgcaaccgtccgcggcctgaggagcccaccgccgctctcgggggccgacttccgggggctgagccgttgaagcggaggctggggcggggggcagccggcgcggccggggcaggaggcgcagactcatgaaatggccacagatgataagacgtccccaacactggactctgctaatgatttgcctcgatctcctactagtccttctcatctcacacactttaaacctttgactcctgatcaagatgagcccccttttaaatcagcttatagttcttttgtaaatctctttcgttttaacaaagagagagcagaaggaggccagggagaacagcagcctttgagtggaagttggaccagccctcagctcccttcgaggacacagtctgttaggtcacccacaccttataaraagcagcttaatgaggaactccagcggcgctcttcagcattagacacaagaaggaaagcagaacctacctttggaggtcatgaccctcgtacagctgttcagcttcgaagcctcagcacagtattaaaacgcctcaaggaaatcatggaggggaaaagccaggatagtgacctgaaacaatactggatgccagatagccaatgtaaagagtgctatgactgtagtgagaaatttacaacctttaggcgcagacaccattgccgactatgtgggcagattttctgcagtcgttgctgtaatcaagaaatccctggaaaatttatgggctatacaggtaaatgcattttattgccagtttacaatttttaaaggtcataactataagacacttataatacaggatagtgttaag

SEQ ID NO: 3934 - DNA, 2035 bp, Homo sapiens
caaccatgtaagcagcttcgcttcctgccgcaaccgtccgcggcctgaggagcccaccgccgctctcgggggccgacttccgggggctgagccgttgaagcggaggctggggcggggggcagccggcgcggccggggcaggaggcgcagactcatgaaatggccacagatgataagacgtccccaacactggactctgctaatgatttgcctcgatctcctactagtccttctcatctcacacactttaaacctttgactcctgatcaagatgagcccccttttaaatcagcttatagttcttttgtaaatctctttcgttttaacaaagagagagcagaaggaggccagggagaacagcagcctttgagtggaagttggaccagccctcagctcccttcgaggacacagtctgttaggtcacccacaccttataaraagcagcttaatgaggaactccagcggcgctcttcagcattaggagacctccgagcttgcacatattgtagaaaaatagccttaagttatgctcattccacagacagtaattctattggggaagacttgaatgctctttcagattctgcttgctctgtgtctgtgcttgatccaagtgaaccccgaacacctgttgggagtaggaaagccagccgtaacatatttttagaggatgatttggcctggcaaagtttgattcatccagattcctcaaatactcctctttcaacaagacttgtatctgtgcaagaggatgctgggaaatctcctgctcgaaatagatcagccagcattactaacctgtcactggatagatctggttctcctatggtaccttcatatgagacatctgtcagtccccaggctaaccgaacatatgttaggacagagaccactgaggatgaacgcaaaattcttctggacagtgtgcagttaaaagacctgtggaaaaaaatctgccatcacagcagtggaatggagtttcaggatcaccgctactggttgagaacgcatcccaactgcattgtaggaaaggaattagtcaactggctaatccgaaatgggcatattgccacaagggcacaagctatagcaattggacaagcaatggttgatggacgttggctggattgtgttagtcatcacgaccagcttttcagagatgagtatgcgctgtatagaccactgcagagtacagaattttctgagacgccttctcccgacagtgactcagtgaactccgtggaaggacactctgagccatcctggtttaaagacataaagtttgatgacagtgacacagaacagatagctgaagaaggtgacgataatttggctaattctgccagtcctagcaagcgcacatcagtcagcagtttccagtccacagtggacagtgactcagccgcttctatcagcctgaacgtggagctggacaacgtgaacttccatatcaagaagccctccaagtacccacatgtgccccctcaccctgctgaccaaaaaggtaggaggtagtcaccatctggaatccaaacacaggctggacagctgggccataggatctcatgccagcctgtccttctggcttcctctgtcccacgtggctgagggtatttggtgtgggttttgttctaccctttctyatttctcccacacctcctccccataccttttttggttgattccttttatttcttgttttctccctcagcaccaccatgcccagtgtaaagcttgtagtctttaaaaggaactacatctgactgctcttcccataatgtgcaacttccaaggtggcatttctttgcatttataacatggatgttctgctctattcttttctctttcttcatttaacattttaaagcctatttgcctttgccgttacccagtaacataatatttcactaaacccattaagatgcttgaactagattgggggaaaatcattcacacattccaaaatatctccataataattcataatgcttattatgtatattctatatttattaaaacaatttcttctctaatgt

SEQ ID NO: 3935 - DNA, 2105 bp, Homo sapiens
agtgacagaaggaagtcaaggcaccattatgacccagatgagaaatcaaaaacaagagaaaatgttgttatagatgacctggatgcttccaaggccaaaaaaaactaaaatgaaagagaagctaaatggagacactgaagaaggatttgtagactttcagataaattctctaaatctcataggaagaaaagatctaccaaatggaaatattgatgaatatgaaaaaaaaaatcaaagcaagtatcatccttagatagttctactcataaatcaagtgataataaactagaggagaccttaacatgtgaacagaaagaaagagctttctcctatttccgtatttctgaagagactgtaaagcttctgaaacatcaaagggtaacatatctctttcctattcaagttaggaccttgtcctgtatttgaaagaaaagatttaatagctcgagcatggacaggaacaggaaagacattcttttttgccatccccttgattgaaagactccaaagaaatcaagaaacaatttttaaaaagctgctcaacaaaggtacttgttttggctccagcaagggaactggcaaaccaagtagccaaagacttcaaagataaaactaggaaactcagcatggtgtgtttttatggtgcaataccatatcaaagccaaattaatcatatgcaaaatggtattgacatcttggttggaacccctggtcatatcaaagatcatctgcagagtggctgattggatctttctaaactgtgccatgttgtgcttgatgaagtggatcaaacgttagatttagattttaatgaacaagttgaagatgtgattcacaaatcctacaaaactgaatctgaagaccatcctcagactttacttttttctgcaacttgcccacagtgggtatacaaagttgcaaataaatacatgaaatccagatatgaacaggttgaccttattggataaatgactcaaaaggctgcaactactgtggaacacttggccattcagtgtcattggtctcagaggccagcagttattggagatgtccttcaagtctacagtgggtctgaagggagggctattattttctgtgagaccaggaagaatgtaactgaaatggccatgaatccacacataaaacagaatgcccagtgtttacatggggatattgcacagtcacaaagagaaattacactaaaaggcttcagagaagatagttttaaagttttggtggcaaccaatgtggctgcccatagtttgcacattcctgaagtagacctggtgattcaacattctcctcctcaggatgttgaggcccgtatccatcgctctggatgcacaggtagagctggacagggatttgtatatgtttttatcaaccaagagaaagaggtcaactaagatatgtggaacaaaaagcaagaattacttttaaatgtgtaggtgttccttctacaatggatttagttaaatctaaaagcatggataccatcaggtttctgacttccgtttcttatgctgctgttgattttttctgaccatcagctcagagactgatagaagagaaaggggcagtggatgcattggctgcaactttagcccacatttctggtgcatcaagttttgaaccacagtctttgatcgcctctgatgaccatgactctggaaagcctagaggaaatacaggatgtcacctgtgcctggaaagaacttaayagaaagctaagtagtaatacagcgtctcagattaccagtgtgtgcctcctgaaaggaaatatgggtgtttgctttgatgttcctacaactgaatcagaaaggttacaggcagtgtggcacgattccaactggatactctcagtgccagccaaattacctgaaattgaagaatattatgatggaaacaagtcttctaatccccaacggaggaatggctggtcaagtggctggtcaggcgggtcaggccagtcaggtggtccatctggtggcctatcaggtagacagagtcgacaagggagtcactcaggaagtcgacaagatggtagaagatgaagtgggaatagaactcgatcaagaagtgggggccacaaatggagttttgac

SEQ ID NO: 3936 - DNA, 2337 bp, Homo sapiens
agtgaggccgacccttacgtgatcctacagctgtcgacygcacctggaatgaagtttaagaccaagacgctcaccgacaccagtcatcctgtgtggaatgaggccttccgtttccttatccaaagtcaggtcaagaatgttctggagcttagcatctatgatgaggactcagtcacggaggatgacatctgcttcaaggttctctatgacatctcagaagtcctccctggcaagctgctccggaaaaccttctcccagagtccccagggagaggaggagctggatgtggagttcctgatggaagaaacgtcagatcgcccagaaaacctcatcaccaacaaagtcattgtgrcccgagagctgtcatgcctggatgtgcatctggacagcacagggagcaccgctgtggttgcagatcaggacaagctggagctggagctggtgctgaaggggtcctatgaggacacacagacatccttcctgggcacagcctctgccttccgcttccactacatggcagccctagagacagagctgagcgggcgcctgaggagctccagaagcaatggctggaatggggacaactcagctgggtacctcactgtgcccctgaggcccttgaccattgggaaggaggtgactatggatgttcctgctccaaatgccccaggagtgaggctgcagctcaaggcagagggctgccstgaggagctggccgtgcacctgggcttcaatctctgtgcagaggagcaggccttcctgagcaggaggaagcaggtggtggccaaggccctgaagcaggccctgcagctggacagagacctgcaggaggatgaggtacccgttgtgggcatcatggccacaggaggaggtgcccgggccatgacctcactctacggccacctattggccttgcagaagctgggcctcctagactgtgtgacctacttcagtggcatctctggctctacgtggacaatggcccacctgtacggggaccctgagtggtcgcagagggacctggagggacctatcagatacgcccgggagcacctggccaagagcaagctggaggtcttttccccagagcgcctggcgagctaccgccgggagctggagctgcgggctgagcagggccaccccacgacctttgtggacctgtgggcgctagtgctggagwccatgctgcacggccaggtgatggatcagaagctgtcaggacagagagccgccctggaacggggtcagaaccctctgcccctctacttgagcctcaatgtcaaagagaacaatctggagacactggacttcaaggagtgggttgagttctccccctatgaggtcggtttcctgaagtacggggccttcgtccctcctgagctcttcggctccgagttcttcatgggacggctgatgaggaggatcccggagccccggatctgctttctggaagccatctggagcaacattttctccctgaacctgctggatgcctggtatgacctcaccagttctggggagtcctggaaacagcacatcaaggacaagaccaggagcttagagaaggagcccctgaccacctcggggacctcctcgcggctggaggcctcgtggctgcagccaggcacggcgctggcccaggcatttaaaggcttcctgacaggcaggcccctccaccagcgcagccccaacttcctccagggcctccagctgcaccaggactactgtagccacaaagacttctccacctgggcagactaccagcttgactccatgcccagccagctgacccccaaggagccccggctctgcctggtggacgccgcctacttcatcaacaccagctctccctccatgttccggccaggccgcaggctggacctcatcctctccttcgactactccctatctgcgcccttcgaggcactgcagcagacggagctgtactgccgggcccgggggctgcccttcccccgggtggaacccagccctcaggaccagcaccagccaagggaatgccacctcttctcagaccccgcctgccccgaggccccgatcctgctgcacttcccgctggtcaatgcctccttcaaggaccactcagcccccggtgtccagcgcagccccgcagagctccagggtggccaagtggatctcaccggggccacctgcccctacaccctgtccaacatgacctacaaggaggaagacttcgagcgcctgctgcrgctcagtgactacaacgtgcagaccagccagggtgccatcctgcaggccctgaggaccgcgctgaagcaccrgactctagaggcgaggcctccaagggcacagacctga

SEQ ID NO: 3937 - DNA, 3780 bp, Homo sapiens
accatgagtgctcccagggacccccggctgcagaagtccatggctggacctcagctgtcttctgttggatttggctgttggcttgtccataggggcccttccctgagcttccttcgtttccatgctgctgttagtgctactgactcagaattgagcctggaactttcctcacttaaaactcgatcccccaggcaacgagtaccactcactatgacacttgatgttgctgtggtagacatgagcgatgtctccagacagccttccctcttctaccatcttggagtccgagaaagctttgacatggccaataatgtgatcttgtaccatgacaccgatgccgacactgctctctctttgaaggcatccagtggaaattattatttcatcccatacatcgtgacaccgtgcrctgattatttttgctgcgagagtgatgcccagagacgagcctccgagtacatgcagcccaactgggacaacatcctgggcccgctgtgcatgcctttggtggacaggttcattagcctccttaaggacatccaygtgacctcatgtgtttattacaaagaaaccttgttaaatgacatccggaaagccagagagaaataccaaggtgaggaactggcgaaggagctagctcggatcaagctccgcatggataatactgaggttctgacctcagacatcatcattaacttactcctgtcctaccgtgatatccaggactatgatgcgatggtgaagctggtggaaacactggagatgctgcctacgtgtgatttggccgatcagcataacattaaattccactaygcgtttgcactgaataggagaaacagcacaggtgaccgtgagaaggctctgcagatcatgctccaggttctgcagagctgtgatcacccgggccccgacatgttctgcctgtgtgggaggatctacaaggacatcttcttggattcagactgcaaagatgacaccagccgcgacagcgccattgagtggtatcgcaaagggtttgaactccagtcatccctctattcgggaattaatcttgcagttttgctgattgttgctggacaacaatttgaaacttccttggaactaaggaaaataggtgtccggctgaacagtttgttgggaagaaaagggagcttggagaaaatgaacaattactgggatgtgggtcagttcttcagcgtcrgcatgctggcccatgatgtcgggaaagccgtccaggcagcagagaggttgttcaaactgaaacctccagtctggtacctgcgatcattagttcagaacttgttactaattcggcgcttcaagaaaaccattattgaacactcrcccaggcaagagcggctgaacttctggttagatataatttttgaggcaacaaatgaagtcactaatggactcagatttccagttctggtcatagagccaaccaaagtgtaccagccttcttatgtttccataaacaatgaagccgaggagagaacagtttctttatggcatgtctcacccacagaaatgaaacagatgcacgaatggaattttacagcctcttccataaagggaataagcctatcaaagtttgatgaaaggtgttgttttctttatgtccatgataattctgatgactttcaaatctacttttccaccgaagagcagtgcagtagatttttctctttggtcaaagagatgataaccaatacagcaggcagtacggtggagctggagggagagaccgatggagacaccttggagtatgagtatgaccatgatgcaaatggtgagagagttgtcttggggaaaggcacgtatgggattgtgtatgctggccgagatctgagcaatcaagtgcgaatagccatcaaagaaatcccggagagagatagcaggtattctcagcctctgcacgaggagatagccctgcacaagtaccttaagcaccgcaatatcgttcagtacctgggctctgtttcagagaacggctacattaagatatttatggagcaggtgcctggaggaagcctttctgctcttctgcgatccaaatgggggccgatgaaggaaccgacaatcaagttttacaccaaacagatcctggagggccttaagtatcttcatgaaaaccagatcgtgcacagagacataaagggygataatgttctggtgaacacctacagcggagtggtgaaaatctccgattttggaacctcgaaacgtcttgcgggtgtgaacccctgcacagagacttttactggcaccctgcagtacatggcacctgagataattgaccaagggcctcgcggatatggtgccccagccgatatctggtccctgrgctgcaccatcattgagatggccaccagcaagcctccgttccatgagcttggtgagccgcaggcagccatgttcaaagtgggcatgtttaagatccaccctgagattccagaagccctttcagctgaagcccgagccttcattttatcctgtttcgagcctgacccccacaaacgtgccaccactgctgagctactgagagagggtttcttaaggcaggtgaacaagggcaagaagaaccgaattgccttcaagccctcagaaggtccccgcggtgtcgtcctggccctgcccacacagggagagcccatggccaccagcagcagygagcacggctctgtctccccagactccgacgcccagcctgacgcactctttgagaggacccgggcgcccaggcaccaccttggccacctcctcagtgttccagacgagagctcagccttggaagaccggggcttggcctygtccccggaggacagggaccagggcctcttcctgctacgcaaggacagtgagcgccgtgccatcctgtacaaaatcctctgggaggagcagaaccaggtggcttccaacctgcaggagtgtgtggcccagagttccgaagagttgcatctctcagttggacacatcaagcaaatcattgggatcctgagggacttcatccgctccccagagcaccgggtgatggcgaccacaatatcaaagctcaaggtggacctggactttgacagctcgtccatcagtcagattcacctggtgctgttcggatttcaggatgccgtaaataaaattttgaggaaccacttaattaggccccactggatgttcgcgatggacaacatcatccgccgagcggtgcwggccgcggtcaccattctcatcccagagctccgagcccactttgagcctacctgtgagactgaaggggtagataaggacatggatgaagcggaagagggctatcccccagccaccggacctggccaggaggcccagccccaccagcagcacctgagcctccagctgggtgagctcagacaggagaccaacagacttttggaacacctagttgaaaaagagagagagtaccagaatcttctgcggcaaactctagaacagaaaactcaagaattgtatcaccttcagttaaaattaaaatcgaattgtattacagagaacccagcaggcccctacgggcagagaacagataaagagcttatagactggttgcggctgsaaggagctgatgcaaagacaattgaaaagattgttgaagagggttatacactttcggatattcttaatgagatcactaaggaagatctaagataccttcgactacggggtggtctcctctgcagactctggagtgcggtctcccagtacagaarggctcaggaggcctcagaaaccaaagacaaggcttgatac

SEQ ID NO: 3938 - DNA, 2680 bp, Homo sapiens
gggttaaggcacctgggccaccgcccctgccggcccctcctcccgcggccgggaagaggaaagtcgcggcgggggcgcggcccggtctccgtccccacccgcccgccgtcccgccggcccgagccgtggcgcccagagctgcgagccgctcgcccctccgccgctccggcccgggccgccatgtcgctgtggaagaaaaccgtctaccggagtctgtgcctggccctggccctgctcgtggccgtgacggtgttccaacgcagtctcacccctggtcagtttctgcaggagcctccgccacccaccctggagccacagaaggcccagaagccaaatggacagctggtgaaccccaacaacttctggaagaacccgaaagatgtggctgcgcccacgcccatggcctctcaggggccccaggcctgggacgtgaccaccactaactgctcagccaatatcaacttgacccaccagccctggttccaggtcctggagccgcagttccggcagtttctcttctaccgccactgccgctacttccccatgctgctgaaccacccggagaagtgcaggggcgatgtctacctgctggtggttgtcaagtcggtcatcacgcagcacgaccgccgcgaggccatccgccagacctggggccgcgagcggcagtccgcgggtgggggccgaggcgccgtgcgcaccctcttcctgctgggcacggcctccaagcaggaggagcgcacgcactaccagcagctgctggcctacgaagaccgcctctacggcgacatcctgcagtggggctttctcgacaccttcttcaacctgaccctcaaggagatccacttcctcaagtggctggacatctactgcccccacrtccccttcattttcaaaggcgacgatgacgtcttcgtcaaccccaccaacctgctagaatttctggctgaccggcagccacaggaaaacctgttcgtgggcgatgtcctgcagcacgctcggcccattcgcaggaaagacaacaaatactacatcccgggggccctgtacggcaaggccagctatccgccgtatgcaggcggcggtggcttcctcatggccggcagcctggcccggcgcctgcaccatgcctgcgacaccctggagctctacccgatcgacgacgtctttctgggcatgtgcctggaggtgctgggcgtgcagcccacggcccacgagggcttcaagactttcggcatctcccggaaccgcaacacagccggtttggccctggaagtggacattcctctattactgtgaagttttatttatgaagaatttggagggagaaggctccaggcttcaggagggggtggtgtcctccctggccctcctcccttccctcccctcattccagctgcctgccctcagcacccccaggcccctcacagcccagccccctccagagccctgccccaccgcaccctgcttctccagggcctagcagaccagcatctgccccggtgaagggatggatcagctgtgggggtgggtgcagaaggttgccacctcctacctcagcgggagtcacctaggaaagatggagggattgacactattttctcaataaaatgggactttttttttttttttttttttttttggtgtgaaacttcctgttcccagctgcatcagagagcctgtctggggccaaggttgccagagatttctgaagacacagcttkttccttgttcttggctggtgggtgcacaaggacttctggaagggatttagacggggctgagtgctaggattaaagtggggatgggagtacggcaacagaaaaacctgggagctagcaatgcacccagcccttgactgtgccctggtggacagccgagctgtggctctagcgtgagccagtgccttcctgtccctgccaagggtgaggccagagttggccccgaggctaatgtttcagtgggtgagattaggtcggccgtacagaggccggtgggctccctgacatcccttccaggcaacctgaaagcactgaaatagcttatggccctgtgccagggaccttggcccaagctgctgacctccagggtggggagggagctacccccaggagaagagtcactcagacagcagtatgagcaagccagccagcagctccgtgcctgcacccagctcaggggaatcccagggggttcagatgcccaggaaggaaaaggggacagcgctactgctatggwatgagaccaccacttctcctgttgtccttcccagyttctccccaacctccccttttccctagtttataagacaggagaaaagggagaaagcaaaaagctggaaagaaacagaagtaagataaatagctagacgaccttggcgccaccacctggccctggtggttaaaatgataataatattaacccctgaccaaaacgactggtgttatcygtaaatyccagacattgtgtgagaaagcaccgtaaaactttttgtcctattagctgatgtgtgtagcccccagtcacgttcctcacgcttacttgatctattatgaccctttyacgtggaccccttagagttgtaagctcttaaaagggctaggartttctttttcggggagctcggctcttaagacgcgagtctgccgacgctcccggccgaataaaaacctcttccttcttt

SEQ ID NO: 3939 - DNA, 1434 bp, Homo sapiens
gggttaaggcacctgggccaccgcccctgccggcccctcctcccgcggccgggaagaggaaagtcgcggcgggggcgcggcccggtctccgtccccacccgcccgccgtcccgccggcccgagccgtggcgcccagagctgcgagccgctcgcccctccgccgctccggcccgggccgccatgtcgctgtggaagaaaaccgtctaccggagtctgtgcctggccctggccctgctcgtggccgtgacggtgttccaacgcagtctcacccctggtcagtttctgcaggagcctccgccacccaccctggagccacagaaggcccagaagccaaatggacagctggtgaaccccaacaacttctggaagaacccgaaagatgtggctgcgcccacgcccatggcctctcaggggccccaggcctgggacgtgaccaccactaactgctcagccaatatcaacttgacccaccagccctggttccaggtcctggagccgcagttccggcagtttctcttctaccgccactgccgctacttccccatgctgctgaaccacccggagaagtgcaggggcgatgtctacctgctggtggttgtcaagtcggtcatcacgcagcacgaccgccgcgaggccatccgccagacctggggccgcgagcggcagtccgcgggtgggggccgaggcgccgtgcgcaccctcttcctgctgggcacggcctccaagcaggaggagcgcacgcactaccagcagctgctggcctacgaagaccgcctctacggcgacatcctgcagtggggctttctcgacaccttcttcaacctgaccctcaaggagatccacttcctcaagtggctggacatctactgcccccacrtccccttcattttcaaaggcgacgatgacgtcttcgtcaaccccaccaacctgctagaatttctggctgaccggcagccacaggaaaacctgttcgtgggcgatgtcctgcagcacgctcggcccattcgcaggaaagacaacaaatactacatcccgggggccctgtacggcaaggccagctatccgccgtatgcaggcggcggtggcttcctcatggccggcagcctggcccggcgcctgcaccatgcctgcgacaccctggagctctacccgatcgacgacgtctttctgggcatgtgcctggaggtgctgggcgtgcagcccacggcccacgagggcttcaagactttcggcatctcccggaaccgcaacagccgcatgaacaaggagccgtgctttttccgcgccatgctcgtggtgcacaagctgctgccccctgagctgctcgccatgtgggggctggtgcacagcaatctcacctgctcccgcaagctccaggtgctctgaccccagccgggctactaggacaggccagggcacttgctcctgagcccc

SEQ ID NO: 3940 - DNA, 2155 bp, Homo sapiens
agttctctcaggctttccagagctcaggacctctgagaagaatggagccctcctggcttcaggaactcatggctcaccccttcttgctgctgatcctmctctgcatgtctctgctgctgtttcaggtaatcaggttgtaccagaggaggagatggacgatcagagccatgcacctgtttcctgcaccccctgcgcactggttctatggccacaaggagtcttacccagtaaaagagtttgaggtgtatcctgagctgatggaaaaatacccatgtgccgttcccttgtgggttggaccctttacgatgttcttcaatatccatgacccagactatgtcaagattctcctgaaaagacaagagaaagtaatccaggaccggaaggagtctcttaaggataagctaaaacaagatactactcagaaaaggcgctaggattttctggacatacttttgagtgccaaaagtgaaaacaccaaagacttctctgaagcagatctccaagctgaagtgaaaacgttcatgtttgcaggacatgacaccacaactactgctatctcctggatcttttactgcttggcaaagtaccctgagcatcagcagagatgctgagatgaaatcagggaactcctaggggatgggtcttctattacctgggaacacctgagccagatgccttacgccacaatgtgcatcaaggaatgcctccgcctctacgcaccrgtagtaaacatatcccggttactcgacaaacccatyacctttccagatggacgctccttacctgcaggtcttaaaacaactttttttttttttaacaatgcagctatgtttggattgaaatgtcttaacacactcatgtctttaacagttatttatccttagactctgtggaacctagggccattcttatttcccagagagggagaaagaggagagagctctcaggactatctaaacaggcacaggattatgcaggtgcaaaggtacagaatcctgccatatggactgaggagtgggtgaggrggccttcatgaagcatcatggctttaatgctgaaccttaaaggactagatttatatcagcaaagatgagagaggcgcattgttggcagagagaagagcagacacaaagcagcaggcagcctgccttctcccttccctcaggcacaccagcagggcatgtcactggagcaattgctgtaatccaccagactccaggattcacagagggaagttgtgggactatacctggagccatgatgtagccagatcatagttttctgaaggccaacctttgtgttcagcctttctcaatcaagcagcagatttaagacatctaagctgggtagcacgattatagttattttttagaaagattaatacattggtgggatgcaagatggattgaaagatgacattagagatataaaggaatgagccagaatttatctttgacctatgttgaggtgtgtttctacaccttcctccaatttaaccatctttcaaatactggatttgattgggcatttgtagtagtctaattaaatatttgtttcctacaaaatcaactttactattgtaacaacaaaaggaaaaaattatttagcacttactaggagctgagaattgttccatatgttttgcatgtgttaactcattttatccacccatcctcctgccccccagttctgctgtggaaatactagtgttatgcacattttagcaaacagggacaaaaaggtaaaacttcatctctggtaaatggtagaactaggacttgaacccaagaaatgggactctagagtgtgctcttaactactacactacagcaacaacttaagctttctctgggatctctccagagaaagatctttgctatcatggggatctttgcaatcatctagtatctaaagaagtttcctctttttaattcagtgttatttttcacatrgtatttattgtaatatttattacctacataatattgcatctatgcacataatgttccacgcacctagttgttcaaacaagacagctcagagtcaacttttactaccttttcccttaaccttgcatttcaataatacttaaatcctgtcaataatctctggtttttttcaatatcaataaaatgatgatttattgctgccttcc

SEQ ID NO: 3941 - DNA, 3242 bp, Homo sapiens
atcgcttgaacccgggaggcggagcttgcagtgagccgagatcgcgccatcacactccagcctaggcgacagagtgagactccgtctcaaagaaaaaaaacttgcagcctgatagttaagatacagcaaccccaaatccctatgctaaaaggtgagaatggcccagataaaggtcatgtctcctagctccctgctttttcatgccatcctccagaagggaagaaattaaataatccatcctcctactccaggcgactagaaggcaggctgcctcagggccacacactgggacttggactcaacctgatgggcttctgggcccagccccagacaaacccccggcaaacgtcccattccgaggaaagcatgagcagatggagtatggaagaaatgcccaagacggcaggcagcagctgtggcggccggcgggacgacaatccgaggagaggcctctgatgtcctgaggtctcagaggacgcctaaaggccttgaatgggacaagcttagcgggcgggcgcagaagagaataatactctggagacacttcccgagggctctggggccggagctgtgttcgctccggttcttggtgaagacagggttcgtgggaggcggcccaaggagggcgaacgcctaagaytgcaaaggctcgggggagaacggctctcggagaacgggctggggaaggacgtggctctgaagacggacagccctgaggaaccgcggggcgcccagatggaactcgttagcgccccgagtgcagacaatcccggagggggaaaggcgagcagctggcagagagcccagtgccggccaaccgcgcgagcgcctcagaacggcccgcccaccctgatttctcattggcgcctcctacctcctcctcggattggctacctctaggtgaaatgagcggtggttgagccctacttccggtggtgctgtggtctgcccctggagaacccagaagaacacagctgtgcgcgcccacaggctctgggggcgggagaagataagtcgcaaggagggggcgggacctacacctcaggaaagccggagaattggggcacgaagcggggctttgatgacccgcaaagggcgaggcatgcaggaggyggaggaattaagtgaaacagggaaggttgttaaacagcaccgtgtgggcgaggccttaagggtcgtggtccttgtctgggcggggtctttgggcgtcgacgaggcctggttctgggtaggcggggctactrcgggkcggtgcctgctgtggaaatgcctgcccgcgcgcttctgcccaggcgcatggggcatcgtactctagcctccactcctgccctgtgggcctccatcccgtgccctcgctctgagctgcgcctggacctggttctgccttctggacaatctttccggtggagggagcaaagtcctgcacactggagtggtgtactagcggatcaagtatggacactgactcagactgaggagcagctccactgcactgtgtaccgaggagacaagagccaggctagcaggcccacaccagacgagctggaggccgtgcgcaartacttccagctagatgttaccctggctcaactgtatcaccactggggttccgtggactcccacttccaagaggtggctcagaaattccaaggtgtgcgactgctgcgacaagaccccatcgaatgccttttctcttttatctgttcctccaacaacaacatcgcccgcatcactggcatggtggagcggctgtgccaggcttttggacctcggctcatccagcttgatgatgtcacctaccatggcttccccagcctgcaggccctggctgggccagaggtggaggctcatctcaggaagctgggcctgggctatcgtgcccgttacgtgagtgccagtgcccgagccatcctggaagaacagggcgggctagcctggctgcagcagctacragagtcctcatatgaggaggcccacaaggccctctgcatcctgcctggagtgggcaccaaggtggctgactgcatctgcctgatggccctagacaagccccaggctgtgcccgtggatgtccatatgtggcacattgcccaacgtgactacagctggcaccctaccacgtcccaggcgaagggaccgagcccccagaccaacaaggaactgggaaactttttccggagcctgtggggaccttatgctggctgggcccaagcgctctgtcaggtcatcaccacttttatgacctttctcggaccccataggctggatcagatgcctcctgaagaattacagacttcttcctctagacttggagggcctccttggcaatgcatttgatggccaccagcttctgcgtcctcttatcttctgccaggatcacctccgagaaggcccccctatcgggagaggggattcacaaggtgaagaactggaaccccagcttccctccagcctctcctccattccctatgggttctgtgaccactgctggaccaaggacgtggatgaccctcccctagtcactcatccatcccctggctccagagatggtcacatgacccaggcctggccagtcaaagtagtctctcccctggccacagtaattggtcatgtgatgcaagccagcttactagcactttgagaatgagtctcctgttgagctggtaggatgtaagcctggagctaatggcgatcatctttgccaccacctggggagagcctgcttgggaatgaaattaacacaaaggaagtccaacctgagaaatggccaaatatatttcctgataacattatgtggccctctggatccagccatgcctgaggtctacccctgggcttttggattatgtgtacagttggttcatccctttttctgctaattcgagtcatggctaatttaacaccctttagaaccttaaagaaccatcagcatcacccgggaacttttttagaaatgcaaaatctctactgctttggatcctgggtcaaaaaaaagaaaaaaaaaagaaatgcaaaactttaggccctgccccagatttactaaatcaatctgcagtttaacaaaatcctcaggtgatttgtatgctcattgaactttaagaagcagtgttttagaacaggttcttaaaaaggaacaaataaactcatttaactaaagttaactgattaaagaggatttgctagggtattctttccacatctgtttgctttctctgggagaataagaagtcataagtcaaaga

SEQ ID NO: 3942 - DNA, 2328 bp, Homo sapiens
atcgcttgaacccgggaggcggagcttgcagtgagccgagatcgcgccatcacactccagcctaggcgacagagtgagactccgtctcaaagaaaaaaaacttgcagcctgatagttaagatacagcaaccccaaatccctatgctaaaaggtgagaatggcccagataaaggtcatgtctcctagctccctgctttttcatgccatcctccagaagggaagaaattaaataatccatcctcctactccaggcgactagaaggcaggctgcctcagggccacacactgggacttggactcaacctgatgggcttctgggcccagccccagacaaacccccggcaaacgtcccattccgaggaaagcatgagcagatggagtatggaagaaatgcccaagacggcaggcagcagctgtggcggccggcgggacgacaatccgaggagaggcctctgatgtcctgaggtctcagaggacgcctaaaggccttgaatgggacaagcttagcgggcgggcgcagaagagaataatactctggagacacttcccgagggctctggggccggagctgtgttcgctccggttcttggtgaagacagggttcgtgggaggcggcccaaggagggcgaacgcctaagaytgcaaaggctcgggggagaacggctctcggagaacgggctggggaaggacgtggctctgaagacggacagccctgaggaaccgcggggcgcccagatggaactcgttagcgccccgagtgcagacaatcccggagggggaaaggcgagcagctggcagagagcccagtgccggccaaccgcgcgagcgcctcagaacggcccgcccaccctgatttctcattggcgcctcctacctcctcctcggattggctacctctaggtgaaatgagcggtggttgagccctacttccggtggtgctgtggtctgcccctggagaacccagaagaacacagctgtgcgcgcccacaggctctgggggcgggagaagataagtcgcaaggagggggcgggacctacacctcaggaaagccggagaattggggcacgaagcggggctttgatgacccgcaaagggcgaggcatgcaggaggyggaggaattaagtgaaacagggaaggttgttaaacagcaccgtgtgggcgaggccttaagggtcgtggtccttgtctgggcggggtctttgggcgtcgacgaggcctggttctgggtaggcggggctactrcgggkcggtgcctgctgtggaaatgcctgcccgcgcgcttctgcccaggcgcatggggcatcgtactctagcctccactcctgccctgtgggcctccatcccgtgccctcgctctgagctgcgcctggacctggttctgccttctggacaatctttccggtggagggagcaaagtcctgcacactggagtggtgtactagcggatcaagtatggacactgactcagactgaggagcagctccactgcactgtgtaccgaggagacaagagccaggctagcaggcccacaccagacgagctggaggccgtgcgcaartacttccagctagatgttaccctggctcaactgtatcaccactggggttccgtggactcccacttccaagaggtggctcagaaattccaaggtgtgcgactgctgcgacaagaccccatcgaatgccttttctcttttatctgttcctccaacaacaacatcgcccgcatcactggcatggtggagcggctgtgccaggcttttggacctcggctcatccagcttgatgatgtcacctaccatggcttccccagcctgcaggccctggctgggccagaggtggaggctcatctcaggaagctgggcctgggctatcgtgcccgttacgtgagtgccagtgcccgagccatcctggaagaacagggcgggctagcctggctgcagcagctacragagtcctcatatgaggaggcccacaaggccctctgcatcctgcctggagtgggcaccaaggaaactttttccggagcctgtggggaccttatgctggctgggcccaagcggtgctgttcastgccgacctgcgccaatsccgccatgctcaggagccaccagcaaagcgcagaaagggttccaaagggccggaaggctagatggggcacccwggacaaagaaattcccyaagcaccttcccctccattccccacttctctctccccatccccacccagtctcatgttggggaggggcctccctgtgactacctcaaaggccaggcacccccaaatcaagcagtcagtttgcacaacaagatggggtgggggatat

SEQ ID NO: 3943 - DNA, 2574 bp, Homo sapiens
atcgcttgaacccgggaggcggagcttgcagtgagccgagatcgcgccatcacactccagcctaggcgacagagtgagactccgtctcaaagaaaaaaaacttgcagcctgatagttaagatacagcaaccccaaatccctatgctaaaaggtgagaatggcccagataaaggtcatgtctcctagctccctgctttttcatgccatcctccagaagggaagaaattaaataatccatcctcctactccaggcgactagaaggcaggctgcctcagggccacacactgggacttggactcaacctgatgggcttctgggcccagccccagacaaacccccggcaaacgtcccattccgaggaaagcatgagcagatggagtatggaagaaatgcccaagacggcaggcagcagctgtggcggccggcgggacgacaatccgaggagaggcctctgatgtcctgaggtctcagaggacgcctaaaggccttgaatgggacaagcttagcgggcgggcgcagaagagaataatactctggagacacttcccgagggctctggggccggagctgtgttcgctccggttcttggtgaagacagggttcgtgggaggcggcccaaggagggcgaacgcctaagaytgcaaaggctcgggggagaacggctctcggagaacgggctggggaaggacgtggctctgaagacggacagccctgaggaaccgcggggcgcccagatggaactcgttagcgccccgagtgcagacaatcccggagggggaaaggcgagcagctggcagagagcccagtgccggccaaccgcgcgagcgcctcagaacggcccgcccaccctgatttctcattggcgcctcctacctcctcctcggattggctacctctaggtgaaatgagcggtggttgagccctacttccggtggtgctgtggtctgcccctggagaacccagaagaacacagctgtgcgcgcccacaggctctgggggcgggagaagataagtcgcaaggagggggcgggacctacacctcaggaaagccggagaattggggcacgaagcggggctttgatgacccgcaaagggcgaggcatgcaggaggyggaggaattaagtgaaacagggaaggttgttaaacagcaccgtgtgggcgaggccttaagggtcgtggtccttgtctgggcggggtctttgggcgtcgacgaggcctggttctgggtaggcggggctactrcgggkcggtgcctgctgtggaaatgcctgcccgcgcgcttctgcccaggcgcatggggcatcgtactctagcctccactcctgccctgtgggcctccatcccgtgccctcgctctgagctgcgcctggacctggttctgccttctggacaatctttccggtggagggagcaaagtcctgcacactggagtggtgtactagcggatcaagtatggacactgactcagactgaggagcagctccactgcactgtgtaccgaggagacaagagccaggctagcaggcccacaccagacgagctggaggccgtgcgcaartacttccagctagatgttaccctggctcaactgtatcaccactggggttccgtggactcccacttccaagaggtggctcagaaattccaaggtgtgcgactgctgcgacaagaccccatcgaatgccttttctcttttatctgttcctccaacaacaacatcgcccgcatcactggcatggtggagcggctgtgccaggcttttggacctcggctcatccagcttgatgatgtcacctaccatggcttccccagcctgcaggccctggctgggccagaggtggaggctcatctcaggaagctgggcctgggctatcgtgcccgttacgtgagtgccagtgcccgagccatcctggaagaacagggcgggctagcctggctgcagcagctacragagtcctcatatgaggaggcccacaaggccctctgcatcctgcctggagtgggcaccaaggtggctgactgcatctgcctgatggccctagacaagccccaggctgtgcccgtggatgtccatatgtggcacattgcccaacgtgactacagctggcaccctaccacgtcccaggcgaagggaccgagcccccagaccaacaaggaactgggaaactttttccggagcctgtggggaccttatgctggctgggcccaagcgactccaccctcctacaggtgctgttcastgccgacctgcgccaatsccgccatgctcaggagccaccagcaaagcgcagaaagggttccaaagggccggaaggctagatggggcacccwggacaaagaaattcccyaagcaccttcccctccattccccacttctctctccccatccccacccagtctcatgttggggaggggcctccctgtgactacctcaaaggccaggcacccccaaatcaagcagtcagtttgcacaacaagatggggtgggggatattgagggagacagcgctaaggatggttttatcttccctttattacaagaaggaacaataaaatagaaacatttgtatgg

SEQ ID NO: 3944 - DNA, 2759 bp, Homo sapiens
atcgcttgaacccgggaggcggagcttgcagtgagccgagatcgcgccatcacactccagcctaggcgacagagtgagactccgtctcaaagaaaaaaaacttgcagcctgatagttaagatacagcaaccccaaatccctatgctaaaaggtgagaatggcccagataaaggtcatgtctcctagctccctgctttttcatgccatcctccagaagggaagaaattaaataatccatcctcctactccaggcgactagaaggcaggctgcctcagggccacacactgggacttggactcaacctgatgggcttctgggcccagccccagacaaacccccggcaaacgtcccattccgaggaaagcatgagcagatggagtatggaagaaatgcccaagacggcaggcagcagctgtggcggccggcgggacgacaatccgaggagaggcctctgatgtcctgaggtctcagaggacgcctaaaggccttgaatgggacaagcttagcgggcgggcgcagaagagaataatactctggagacacttcccgagggctctggggccggagctgtgttcgctccggttcttggtgaagacagggttcgtgggaggcggcccaaggagggcgaacgcctaagaytgcaaaggctcgggggagaacggctctcggagaacgggctggggaaggacgtggctctgaagacggacagccctgaggaaccgcggggcgcccagatggaactcgttagcgccccgagtgcagacaatcccggagggggaaaggcgagcagctggcagagagcccagtgccggccaaccgcgcgagcgcctcagaacggcccgcccaccctgatttctcattggcgcctcctacctcctcctcggattggctacctctaggtgaaatgagcggtggttgagccctacttccggtggtgctgtggtctgcccctggagaacccagaagaacacagctgtgcgcgcccacaggctctgggggcgggagaagataagtcgcaaggagggggcgggacctacacctcaggaaagccggagaattggggcacgaagcggggctttgatgacccgcaaagggcgaggcatgcaggaggyggaggaattaagtgaaacagggaaggttgttaaacagcaccgtgtgggcgaggccttaagggtcgtggtccttgtctgggcggggtctttgggcgtcgacgaggcctggttctgggtaggcggggctactrcgggkcggtgcctgctgtggaaatgcctgcccgcgcgcttctgcccaggcgcatggggcatcgtactctagcctccactcctgccctgtgggcctccatcccgtgccctcgctctgagctgcgcctggacctggttctgccttctggacaatctttccggtggagggagcaaagtcctgcacactggagtggtgtactagcggatcaagtatggacactgactcagactgaggagcagctccactgcactgtgtaccgaggagacaagagccaggctagcaggcccacaccagacgagctggaggccgtgcgcaartacttccagctagatgttaccctggctcaactgtatcaccactggggttccgtggactcccacttccaagaggtggctcagaaattccaaggtgtgcgactgctgcgacaagaccccatcgaatgccttttctcttttatctgttcctccaacaacaacatcgcccgcatcactggcatggtggagcggctgtgccaggcttttggacctcggctcatccagcttgatgatgtcacctaccatggcttccccagcctgcaggccctggctgggcctccttggcaatgcatttgatggccaccagcttctgcgtcctcttatcttctgccaggatcacctccgagaaggcccccctatcgggagaggggattcacaaggtgaagaactggaaccccagcttccctccagcctctcctccattccctatgggttctgtgaccactgctggaccaaggacgtggatgaccctcccctagtcactcatccatcccctggctccagagatggtcacatgacccaggcctggccagtcaaagtagtctctcccctggccacagtaattggtcatgtgatgcaagccagcttactagcactttgagaatgagtctcctgttgagctggtaggatgtaagcctggagctaatggcgatcatctttgccaccacctggggagagcctgcttgggaatgaaattaacacaaaggaagtccaacctgagaaatggccaaatatatttcctgataacattatgtggccctctggatccagccatgcctgaggtctacccctgggcttttggattatgtgtacagttggttcatccctttttctgctaattcgagtcatggctaatttaacaccctttagaaccttaaagaaccatcagcatcacccgggaacttttttagaaatgcaaaatctctactgctttggatcctgggtcaaaaaaaagaaaaaaaaaagaaatgcaaaactttaggccctgccccagatttactaaatcaatctgcagtttaacaaaatcctcaggtgatttgtatgctcattgaactttaagaagcagtgttttagaacaggttcttaaaaaggaacaaataaactcatttaactaaagttaactgattaaagaggatttgctagggtattctttccacatctgtttgctttctctgggagaataagaagtcataagtcaaaga

SEQ ID NO: 3945 - DNA, 2941 bp, Homo sapiens
atcgcttgaacccgggaggcggagcttgcagtgagccgagatcgcgccatcacactccagcctaggcgacagagtgagactccgtctcaaagaaaaaaaacttgcagcctgatagttaagatacagcaaccccaaatccctatgctaaaaggtgagaatggcccagataaaggtcatgtctcctagctccctgctttttcatgccatcctccagaagggaagaaattaaataatccatcctcctactccaggcgactagaaggcaggctgcctcagggccacacactgggacttggactcaacctgatgggcttctgggcccagccccagacaaacccccggcaaacgtcccattccgaggaaagcatgagcagatggagtatggaagaaatgcccaagacggcaggcagcagctgtggcggccggcgggacgacaatccgaggagaggcctctgatgtcctgaggtctcagaggacgcctaaaggccttgaatgggacaagcttagcgggcgggcgcagaagagaataatactctggagacacttcccgagggctctggggccggagctgtgttcgctccggttcttggtgaagacagggttcgtgggaggcggcccaaggagggcgaacgcctaagaytgcaaaggctcgggggagaacggctctcggagaacgggctggggaaggacgtggctctgaagacggacagccctgaggaaccgcggggcgcccagatggaactcgttagcgccccgagtgcagacaatcccggagggggaaaggcgagcagctggcagagagcccagtgccggccaaccgcgcgagcgcctcagaacggcccgcccaccctgatttctcattggcgcctcctacctcctcctcggattggctacctctaggtgaaatgagcggtggttgagccctacttccggtggtgctgtggtctgcccctggagaacccagaagaacacagctgtgcgcgcccacaggctctgggggcgggagaagataagtcgcaaggagggggcgggacctacacctcaggaaagccggagaattggggcacgaagcggggctttgatgacccgcaaagggcgaggcatgcaggaggyggaggaattaagtgaaacagggaaggttgttaaacagcaccgtgtgggcgaggccttaagggtcgtggtccttgtctgggcggggtctttgggcgtcgacgaggcctggttctgggtaggcggggctactrcgggkcggtgcctgctgtggaaatgcctgcccgcgcgcttctgcccaggcgcatggggcatcgtactctagcctccactcctgccctgtgggcctccatcccgtgccctcgctctgagctgcgcctggacctggttctgccttctggacaatctttccggtggagggagcaaagtcctgcacactggagtggtgtactagcggatcaagtatggacactgactcagactgaggagcagctccactgcactgtgtaccgaggagacaagagccaggctagcaggcccacaccagacgagctggaggccgtgcgcaartacttccagctagatgttaccctggctcaactgtatcaccactggggttccgtggactcccacttccaagaggtggctcagaaattccaaggtgtgcgactgctgcgacaagaccccatcgaatgccttttctcttttatctgttcctccaacaacaacatcgcccgcatcactggcatggtggagcggctgtgccaggcttttggacctcggctcatccagcttgatgatgtcacctaccatggcttccccagcctgcaggccctggctgggccagaggtggaggctcatctcaggaagctgggcctgggctatcgtgcccgttacgtgagtgccagtgcccgagccatcctggaagaacagggcgggctagcctggctgcagcagctacragagtcctcatatgaggaggcccacaaggccctctgcatcctgcctggagtgggcaccaagggcctccttggcaatgcatttgatggccaccagcttctgcgtcctcttatcttctgccaggatcacctccgagaaggcccccctatcgggagaggggattcacaaggtgaagaactggaaccccagcttccctccagcctctcctccattccctatgggttctgtgaccactgctggaccaaggacgtggatgaccctcccctagtcactcatccatcccctggctccagagatggtcacatgacccaggcctggccagtcaaagtagtctctcccctggccacagtaattggtcatgtgatgcaagccagcttactagcactttgagaatgagtctcctgttgagctggtaggatgtaagcctggagctaatggcgatcatctttgccaccacctggggagagcctgcttgggaatgaaattaacacaaaggaagtccaacctgagaaatggccaaatatatttcctgataacattatgtggccctctggatccagccatgcctgaggtctacccctgggcttttggattatgtgtacagttggttcatccctttttctgctaattcgagtcatggctaatttaacaccctttagaaccttaaagaaccatcagcatcacccgggaacttttttagaaatgcaaaatctctactgctttggatcctgggtcaaaaaaaagaaaaaaaaaagaaatgcaaaactttaggccctgccccagatttactaaatcaatctgcagtttaacaaaatcctcaggtgatttgtatgctcattgaactttaagaagcagtgttttagaacaggttcttaaaaaggaacaaataaactcatttaactaaagttaactgattaaagaggatttgctagggtattctttccacatctgtttgctttctctgggagaataagaagtcataagtcaaaga

SEQ ID NO: 3946 - DNA, 3195 bp, Homo sapiens
atcgcttgaacccgggaggcggagcttgcagtgagccgagatcgcgccatcacactccagcctaggcgacagagtgagactccgtctcaaagaaaaaaaacttgcagcctgatagttaagatacagcaaccccaaatccctatgctaaaaggtgagaatggcccagataaaggtcatgtctcctagctccctgctttttcatgccatcctccagaagggaagaaattaaataatccatcctcctactccaggcgactagaaggcaggctgcctcagggccacacactgggacttggactcaacctgatgggcttctgggcccagccccagacaaacccccggcaaacgtcccattccgaggaaagcatgagcagatggagtatggaagaaatgcccaagacggcaggcagcagctgtggcggccggcgggacgacaatccgaggagaggcctctgatgtcctgaggtctcagaggacgcctaaaggccttgaatgggacaagcttagcgggcgggcgcagaagagaataatactctggagacacttcccgagggctctggggccggagctgtgttcgctccggttcttggtgaagacagggttcgtgggaggcggcccaaggagggcgaacgcctaagaytgcaaaggctcgggggagaacggctctcggagaacgggctggggaaggacgtggctctgaagacggacagccctgaggaaccgcggggcgcccagatggaactcgttagcgccccgagtgcagacaatcccggagggggaaaggcgagcagctggcagagagcccagtgccggccaaccgcgcgagcgcctcagaacggcccgcccaccctgatttctcattggcgcctcctacctcctcctcggattggctacctctaggtgaaatgagcggtggttgagccctacttccggtggtgctgtggtctgcccctggagaacccagaagaacacagctgtgcgcgcccacaggctctgggggcgggagaagataagtcgcaaggagggggcgggacctacacctcaggaaagccggagaattggggcacgaagcggggctttgatgacccgcaaagggcgaggcatgcaggaggyggaggaattaagtgaaacagggaaggttgttaaacagcaccgtgtgggcgaggccttaagggtcgtggtccttgtctgggcggggtctttgggcgtcgacgaggcctggttctgggtaggcggggctactrcgggkcggtgcctgctgtggaaatgcctgcccgcgcgcttctgcccaggcgcatggggcatcgtactctagcctccactcctgccctgtgggcctccatcccgtgccctcgctctgagctgcgcctggacctggttctgccttctggacaatctttccggtggagggagcaaagtcctgcacactggagtggtgtactagcggatcaagtatggacactgactcagactgaggagcagctccactgcactgtgtaccgaggagacaagagccaggctagcaggcccacaccagacgagctggaggccgtgcgcaartacttccagctagatgttaccctggctcaactgtatcaccactggggttccgtggactcccacttccaagaggtggctcagaaattccaaggtgtgcgactgctgcgacaagaccccatcgaatgccttttctcttttatctgttcctccaacaacaacatcgcccgcatcactggcatggtggagcggctgtgccaggcttttggacctcggctcatccagcttgatgatgtcacctaccatggcttccccagcctgcaggccctggctgggccagaggtggaggctcatctcaggaagctgggcctgggctatcgtgcccgttacgtgagtgccagtgcccgagccatcctggaagaacagggcgggctagcctggctgcagcagctacragagtcctcatatgaggaggcccacaaggccctctgcatcctgcctggagtgggcaccaaggtggctgactgcatctgcctgatggccctagacaagccccaggctgtgcccgtggatgtccatatgtggcacattgcccaacgtgactacagctggcaccctaccacgtcccaggcgaagggaccgagcccccagaccaacaaggaactgggaaactttttccggagcctgtggggaccttatgctggctgggcccaagcggctggatcagatgcctcctgaagaattacagacttcttcctctagacttggagggcctccttggcaatgcatttgatggccaccagcttctgcgtcctcttatcttctgccaggatcacctccgagaaggcccccctatcgggagaggggattcacaaggtgaagaactggaaccccagcttccctccagcctctcctccattccctatgggttctgtgaccactgctggaccaaggacgtggatgaccctcccctagtcactcatccatcccctggctccagagatggtcacatgacccaggcctggccagtcaaagtagtctctcccctggccacagtaattggtcatgtgatgcaagccagcttactagcactttgagaatgagtctcctgttgagctggtaggatgtaagcctggagctaatggcgatcatctttgccaccacctggggagagcctgcttgggaatgaaattaacacaaaggaagtccaacctgagaaatggccaaatatatttcctgataacattatgtggccctctggatccagccatgcctgaggtctacccctgggcttttggattatgtgtacagttggttcatccctttttctgctaattcgagtcatggctaatttaacaccctttagaaccttaaagaaccatcagcatcacccgggaacttttttagaaatgcaaaatctctactgctttggatcctgggtcaaaaaaaagaaaaaaaaaagaaatgcaaaactttaggccctgccccagatttactaaatcaatctgcagtttaacaaaatcctcaggtgatttgtatgctcattgaactttaagaagcagtgttttagaacaggttcttaaaaaggaacaaataaactcatttaactaaagttaactgattaaagaggatttgctagggtattctttccacatctgtttgctttctctgggagaataagaagtcataagtcaaaga

SEQ ID NO: 3947 - DNA, 183 bp, Homo sapiens
gatgatgtcacctaccatggcttccccagcctgcaggccctggctggaaactttttccggagcctgtggggaccttatgctggctgggcccaagcggtgctgttcastgccgacctgcgccaatsccgccatgctcaggagccaccagcaaagcgcagaaagggttccaaagggccggaaggc

SEQ ID NO: 3948 - DNA, 2557 bp, Homo sapiens
atcgcttgaacccgggaggcggagcttgcagtgagccgagatcgcgccatcacactccagcctaggcgacagagtgagactccgtctcaaagaaaaaaaacttgcagcctgatagttaagatacagcaaccccaaatccctatgctaaaaggtgagaatggcccagataaaggtcatgtctcctagctccctgctttttcatgccatcctccagaagggaagaaattaaataatccatcctcctactccaggcgactagaaggcaggctgcctcagggccacacactgggacttggactcaacctgatgggcttctgggcccagccccagacaaacccccggcaaacgtcccattccgaggaaagcatgagcagatggagtatggaagaaatgcccaagacggcaggcagcagctgtggcggccggcgggacgacaatccgaggagaggcctctgatgtcctgaggtctcagaggacgcctaaaggccttgaatgggacaagcttagcgggcgggcgcagaagagaataatactctggagacacttcccgagggctctggggccggagctgtgttcgctccggttcttggtgaagacagggttcgtgggaggcggcccaaggagggcgaacgcctaagaytgcaaaggctcgggggagaacggctctcggagaacgggctggggaaggacgtggctctgaagacggacagccctgaggaaccgcggggcgcccagatggaactcgttagcgccccgagtgcagacaatcccggagggggaaaggcgagcagctggcagagagcccagtgccggccaaccgcgcgagcgcctcagaacggcccgcccaccctgatttctcattggcgcctcctacctcctcctcggattggctacctctaggtgaaatgagcggtggttgagccctacttccggtggtgctgtggtctgcccctggagaacccagaagaacacagctgtgcgcgcccacaggctctgggggcgggagaagataagtcgcaaggagggggcgggacctacacctcaggaaagccggagaattggggcacgaagcggggctttgatgacccgcaaagggcgaggcatgcaggaggyggaggaattaagtgaaacagggaaggttgttaaacagcaccgtgtgggcgaggccttaagggtcgtggtccttgtctgggcggggtctttgggcgtcgacgaggcctggttctgggtaggcggggctactrcgggkcggtgcctgctgtggaaatgcctgcccgcgcgcttctgcccaggcgcatggggcatcgtactctagcctccactcctgccctgtgggcctccatcccgtgccctcgctctgagctgcgcctggacctggttctgccttctggacaatctttccggtggagggagcaaagtcctgcacactggagtggtgtactagcggatcaagtatggacactgactcagactgaggagcagctccactgcactgtgtaccgaggagacaagagccaggctagcaggcccacaccagacgagctggaggccgtgcgcaartacttccagctagatgttaccctggctcaactgtatcaccactggggttccgtggactcccacttccaagaggtggctcagaaattccaaggtgtgcgactgctgcgacaagaccccatcgaatgccttttctcttttatctgttcctccaacaacaacatcgcccgcatcactggcatggtggagcggctgtgccaggcttttggacctcggctcatccagcttgatgatgtcacctaccatggcttccccagcctgcaggccctggctgggccagaggtggaggctcatctcaggaagctgggcctgggctatcgtgcccgttacgtgagtgccagtgcccgagccatcctggaagaacagggcgggctagcctggctgcagcagctacragagtcctcatatgaggaggcccacaaggccctctgcatcctgcctggagtgggcaccaaggtggctgactgcatctgcctgatggccctagacaagccccaggctgtgcccgtggatgtccatatgtggcacattgcccaacgtgactacagctggcaccctaccacgtcccaggcgaagggaccgagcccccagaccaacaaggaactgggaaactttttccggagcctgtggggaccttatgctggctgggcccaagcggtgctgttcastgccgacctgcgccaatsccgccatgctcaggagccaccagcaaagcgcagaaagggttccaaagggccggaaggctagatggggcacccwggacaaagaaattcccyaagcaccttcccctccattccccacttctctctccccatccccacccagtctcatgttggggaggggcctccctgtgactacctcaaaggccaggcacccccaaatcaagcagtcagtttgcacaacaagatggggtgggggatattgagggagacagcgctaaggatggttttatcttccctttattacaagaaggaacaataaaatagaaacatttgtatgg

SEQ ID NO: 3949 - DNA, 2801 bp, Homo sapiens
atcgcttgaacccgggaggcggagcttgcagtgagccgagatcgcgccatcacactccagcctaggcgacagagtgagactccgtctcaaagaaaaaaaacttgcagcctgatagttaagatacagcaaccccaaatccctatgctaaaaggtgagaatggcccagataaaggtcatgtctcctagctccctgctttttcatgccatcctccagaagggaagaaattaaataatccatcctcctactccaggcgactagaaggcaggctgcctcagggccacacactgggacttggactcaacctgatgggcttctgggcccagccccagacaaacccccggcaaacgtcccattccgaggaaagcatgagcagatggagtatggaagaaatgcccaagacggcaggcagcagctgtggcggccggcgggacgacaatccgaggagaggcctctgatgtcctgaggtctcagaggacgcctaaaggccttgaatgggacaagcttagcgggcgggcgcagaagagaataatactctggagacacttcccgagggctctggggccggagctgtgttcgctccggttcttggtgaagacagggttcgtgggaggcggcccaaggagggcgaacgcctaagaytgcaaaggctcgggggagaacggctctcggagaacgggctggggaaggacgtggctctgaagacggacagccctgaggaaccgcggggcgcccagatggaactcgttagcgccccgagtgcagacaatcccggagggggaaaggcgagcagctggcagagagcccagtgccggccaaccgcgcgagcgcctcagaacggcccgcccaccctgatttctcattggcgcctcctacctcctcctcggattggctacctctaggtgaaatgagcggtggttgagccctacttccggtggtgctgtggtctgcccctggagaacccagaagaacacagctgtgcgcgcccacaggctctgggggcgggagaagataagtcgcaaggagggggcgggacctacacctcaggaaagccggagaattggggcacgaagcggggctttgatgacccgcaaagggcgaggcatgcaggaggyggaggaattaagtgaaacagggaaggttgttaaacagcaccgtgtgggcgaggccttaagggtcgtggtccttgtctgggcggggtctttgggcgtcgacgaggcctggttctgggtaggcggggctactrcgggkcggtgcctgctgtggaaatgcctgcccgcgcgcttctgcccaggcgcatggggcatcgtactctagcctccactcctgccctgtgggcctccatcccgtgccctcgctctgagctgcgcctggacctggttctgccttctggacaatctttccggtggagggagcaaagtcctgcacactggagtggtgtactagcggatcaagtatggacactgactcagactgaggagcagctccactgcactgtgtaccgaggagacaagagccaggctagcaggcccacaccagacgagctggaggccgtgcgcaartacttccagctagatgttaccctggctcaactgtatcaccactggggttccgtggactcccacttccaagaggtggctcagaaattccaaggtgtgcgactgctgcgacaagaccccatcgaatgccttttctcttttatctgttcctccaacaacaacatcgcccgcatcactggcatggtggagcggctgtgccaggcttttggacctcggctcatccagcttgatgatgtcacctaccatggcttccccagcctgcaggccctggctgggccagaggtggaggctcatctcaggaagctgggcctgggctatcgtgcccgttacgtgagtgccagtgcccgagccatcctggaagaacagggcgggctagcctggctgcagcagctacragagtcctcatatgaggaggcccacaaggccctctgcatcctgcctggagtgggcaccaaggtggctgactgcatctgcctgatggccctagacaagccccaggctgtgcccgtggatgtccatatgtggcacattgcccaacgtgactacagctggcaccctaccacgtcccaggcgaagggaccgagcccccagaccaacaaggaactgggaaactttttccggagcctgtggggaccttatgctggctgggcccaagcggtgagtgtacctaggtgtcctccctaggtttcctctcctccagcccagacccagtggactcttccaccaccgccccaggtggccctaaaggactctccagccacccctgtcccaaccccagtggattctcattgccttcggccctgttccccaaggaytcttccacctcccaacactgtcactagtctcaccagccstgaccccagtgtaccctcctccccacacagactccaccctcctacaggtgctgttcastgccgacctgcgccaatsccgccatgctcaggagccaccagcaaagcgcagaaagggttccaaagggccggaaggctagatggggcacccwggacaaagaaattcccyaagcaccttcccctccattccccacttctctctccccatccccacccagtctcatgttggggaggggcctccctgtgactacctcaaaggccaggcacccccaaatcaagcagtcagtttgcacaacaagatggggtgggggatattgagggagacagcgctaaggatggttttatcttccctttattacaagaaggaacaataaaatagaaacatttgtatgg

SEQ ID NO: 3950 - DNA, 3142 bp, Homo sapiens
atcgcttgaacccgggaggcggagcttgcagtgagccgagatcgcgccatcacactccagcctaggcgacagagtgagactccgtctcaaagaaaaaaaacttgcagcctgatagttaagatacagcaaccccaaatccctatgctaaaaggtgagaatggcccagataaaggtcatgtctcctagctccctgctttttcatgccatcctccagaagggaagaaattaaataatccatcctcctactccaggcgactagaaggcaggctgcctcagggccacacactgggacttggactcaacctgatgggcttctgggcccagccccagacaaacccccggcaaacgtcccattccgaggaaagcatgagcagatggagtatggaagaaatgcccaagacggcaggcagcagctgtggcggccggcgggacgacaatccgaggagaggcctctgatgtcctgaggtctcagaggacgcctaaaggccttgaatgggacaagcttagcgggcgggcgcagaagagaataatactctggagacacttcccgagggctctggggccggagctgtgttcgctccggttcttggtgaagacagggttcgtgggaggcggcccaaggagggcgaacgcctaagaytgcaaaggctcgggggagaacggctctcggagaacgggctggggaaggacgtggctctgaagacggacagccctgaggaaccgcggggcgcccagatggaactcgttagcgccccgagtgcagacaatcccggagggggaaaggcgagcagctggcagagagcccagtgccggccaaccgcgcgagcgcctcagaacggcccgcccaccctgatttctcattggcgcctcctacctcctcctcggattggctacctctaggtgaaatgagcggtggttgagccctacttccggtggtgctgtggtctgcccctggagaacccagaagaacacagctgtgcgcgcccacaggctctgggggcgggagaagataagtcgcaaggagggggcgggacctacacctcaggaaagccggagaattggggcacgaagcggggctttgatgacccgcaaagggcgaggcatgcaggaggyggaggaattaagtgaaacagggaaggttgttaaacagcaccgtgtgggcgaggccttaagggtcgtggtccttgtctgggcggggtctttgggcgtcgacgaggcctggttctgggtaggcggggctactrcgggkcggtgcctgctgtggaaatgcctgcccgcgcgcttctgcccaggcgcatggggcatcgtactctagcctccactcctgccctgtgggcctccatcccgtgccctcgctctgagctgcgcctggacctggttctgccttctggacaatctttccggtggagggagcaaagtcctgcacactggagtggtgtactagcggatcaagtatggacactgactcagactgaggagcagctccactgcactgtgtaccgaggagacaagagccaggctagcaggcccacaccagacgagctggaggccgtgcgcaartacttccagctagatgttaccctggctcaactgtatcaccactggggttccgtggactcccacttccaagaggtggctcagaaattccaaggtgtgcgactgctgcgacaagaccccatcgaatgccttttctcttttatctgttcctccaacaacaacatcgcccgcatcactggcatggtggagcggctgtgccaggcttttggacctcggctcatccagcttgatgatgtcacctaccatggcttccccagcctgcaggccctggctgggccagaggtggaggctcatctcaggaagctgggcctgggctatcgtgcccgttacgtgagtgccagtgcccgagccatcctggaagaacagggcgggctagcctggctgcagcagctacragagtcctcatatgaggaggcccacaaggccctctgcatcctgcctggagtgggcaccaaggtggctgactgcatctgcctgatggccctagacaagccccaggctgtgcccgtggatgtccatatgtggcacattgcccaacgtgactacagctggcaccctaccacgtcccaggcgaagggaccgagcccccagaccaacaaggaactgggaaactttttccggagcctgtggggaccttatgctggctgggcccaagcgggcctccttggcaatgcatttgatggccaccagcttctgcgtcctcttatcttctgccaggatcacctccgagaaggcccccctatcgggagaggggattcacaaggtgaagaactggaaccccagcttccctccagcctctcctccattccctatgggttctgtgaccactgctggaccaaggacgtggatgaccctcccctagtcactcatccatcccctggctccagagatggtcacatgacccaggcctggccagtcaaagtagtctctcccctggccacagtaattggtcatgtgatgcaagccagcttactagcactttgagaatgagtctcctgttgagctggtaggatgtaagcctggagctaatggcgatcatctttgccaccacctggggagagcctgcttgggaatgaaattaacacaaaggaagtccaacctgagaaatggccaaatatatttcctgataacattatgtggccctctggatccagccatgcctgaggtctacccctgggcttttggattatgtgtacagttggttcatccctttttctgctaattcgagtcatggctaatttaacaccctttagaaccttaaagaaccatcagcatcacccgggaacttttttagaaatgcaaaatctctactgctttggatcctgggtcaaaaaaaagaaaaaaaaaagaaatgcaaaactttaggccctgccccagatttactaaatcaatctgcagtttaacaaaatcctcaggtgatttgtatgctcattgaactttaagaagcagtgttttagaacaggttcttaaaaaggaacaaataaactcatttaactaaagttaactgattaaagaggatttgctagggtattctttccacatctgtttgctttctctgggagaataagaagtcataagtcaaaga

SEQ ID NO: 3951 - DNA, 1650 bp, Homo sapiens
ataagcaccatgttaaagatgcaaaggaggttgaacatgctgtgtctgaattcatcaaatatgagatctccttcaatgtatatatgttccatggtggaaccaactttggtttcatgaacggggccacatatttcgggaagcactcgggcattgtcaccagctatgactatgatgcagtgctcacggaggctggagattacacagaaaaatatctgaagcttcaaaaactctttcaatctgtctcagcaactcccctgccccgagtacccaaacttcctcccaaggctgtgtatccccccgtgagaccgtcgctgtacctcccgctgtgggacgccctatcctacttaaatgagccagtcaggtcgcgtcagcccgtcaacatggagaaccttcccataaacaatgggagcggccagtcctacgggcttgtcctgtatgagaagtccatctgctccggaggccgcctccgtgcccacgctcatgacrtggcacaggtgtttttggatgagacaatgatagggattctgaatgagaataataaggacctgcacattcctgaactcagggactgccgatacctgaggatcctggtggagaatcaaggacgagtcaatttttcatggcaaatacagaatgagcagaaaggaataactggatctgycagcatcaataactcttccctggagggctttaccatctattccctggagatgaaaatgagcttctttgagaggctccgctctgccacctggaagcctgtcccagacagccaccagggcccggccttctactgtgggaccttgaaggctggcccttctcccaaggacaccttcctgagcctgctgaactggaattatggattygtgttcatcaatggacgtaaccttgggcgatattggaatattgggcctcagaaaacactgtaccttcctggagtttggcttcatccagaagacaatgaggtcatcttgtttgagaagatgatgagtggctcagatatcaaatctacagacaagcccacgctgtaaaactgtgtctgaacattttttttttttttttgagatggagtctcactttgtcgcccaggctggagtgcagkggcacaatctctgctcactgcaagctcagcctctcgggttcacgccattctcctgcctcagcctccccagcagctgggactacaggtgcacgccaccacgcctggctaattttttgtatttttagtagagatggggtttcaccaagttagccaggatggtcccaatctcctgaccttgtgatctgctctcctcagcctcccaaagtactgggattacaggcgtgagccaccactcccggccgtgaacatattttttgggttgctggagttcatctataagtcatttttgaggaataagatttatgttaagactatcaaacacagtgttgcctacaatagcaaaaatgtgaaaataacaacaacaacaaaacagcagaggaattgttatgtattttgtagtctatctatatgatgcctatttttaggctttaaaaagtcttcaaaatctttaatgactgatttatctagttaaatgcttaatccttagcaggctcttattctttaattaaacgtgcctttgagtagatgtgaataaaataaaaacaagtttc

SEQ ID NO: 3952 - DNA, 975 bp, Homo sapiens
atgttcccctttgcagaggttgaacatgctgtgtctgaattcatcaaatatgagatctccttcaatgtatatatgttccatggtggaaccaactttggtttcatgaacggggccacatatttcgggaagcactcgggcattgtcaccagctatggcaagtgtcgctggtgtagtagcctctccagcatgggcgcaactcccctgccccgagtacccaaacttcctcccaaggctgtgtatccccccgtgagaccgtcgctgtacctcccgctgtgggacgccctatcctacttaaatgagccagtcaggtcgcgtcagcccgtcaacatggagaaccttcccataaacaatgggagcggccagtcctacgggcttgtcctgtatgagaagtccatctgctccggaggccgcctccgtgcccacgctcatgacrtggcacaggtgtttttggatgagacaatgatagggattctgaatgagaataataaggacctgcacattcctgaactcagggactgccgatacctgaggatcctggtggagaatcaaggacgagtcaatttttcatggcaaatacagaatgagcagaaaggaataactggatctgycagcatcaataactcttccctggagggctttaccatctattccctggagatgaaaatgagcttctttgagaggctccgctctgccacctggaagcctgtcccagacagccaccagggcccggccttctactgtgggaccttgaaggctggcccttctcccaaggacaccttcctgagcctgctgaactggaattatggattygtgttcatcaatggacgtaaccttgggcgatattggaatattgggcctcagaaaacactgtaccttcctggagtttggcttcatccagaagacaatgaggtcatcttgtttgagaagatgatgagtggctcagatatcaaatctacagacaagcccacgctgtaa

SEQ ID NO: 3953 - DNA, 1041 bp, Homo sapiens
ttagtgcttgagtaagggggacaggtctgcggcaatcccygtccactccggcaggaaggctgcctctggcttaaagattttgaggaaaggggagtcggggagggtgtaattggccaggtagatggtgtctccgcccgtgaggtatgcggcycagatcccgaacgtcccaatggtcatgatggtgtggttacactgtgtgagtagagcaaaatctttggcaggtgagccctcaatgccatcgccagcaaacaccacatcacygtgggaggtgtcaatgttctcccgacaccaggccatgccattactggtgaccacgaagatgagggagctgtagcgagctcrgaaccagtccagggcctgctgtaggtatcrccggtcggccaccacccccttccacacttttggcatgacatggacatagtcccctcrgcgaacatggacmcctacaaaggtgcccggccggctcccgttcacctgcaggccccgcaggaacttctgggcctcctcccgcacgtggtyrtgcagggtgaactcctggaggatctcctggcggaggtggtggtagaaggtyyaggagcaggggtagccggtgaagcggacgtactcccccgggawgtggcrgtaytcctcctccatccagtcrttcaggtggtagttctgccaggggatcctgctggccgtggcrctgtgcagcaccggcagggtgattctgaagatgggggccagggtgctgtgcatctgggccgggatgaaggcgggccgcccgttcatcttggccagggcrtacagtgtggcgtactcgcccatctggttccccaggcggcccttggagttgatagtgaacaggtcctcccggggcaggtgtctgggggccaggaccacacgggctgagtatgcccagggcgcaggcaccagagccaggtgctggtggcagtgaaagatggtggacaccacaaaaayggcaaagacgaagtagaaggtggagaaggaagggcgggtggcccagaatcccttgayggctgtggggaggagagaggacat

SEQ ID NO: 3954 - DNA, 348 bp, Homo sapiens
tctaccggaggggtaaagaaacctcaccgaatgctacaaatgccgcttgcaagtgcaccctctactggaggggtgaagaaacctcaccgcaagccttatrctgtagtgcttcatgaaattagatattatgaaaagcccattgaacttctgattcaaaaacttctttctagcatctggtgtgaaaaatttctcaagacttcaaaataggtctgggcttccagagtgcagctattggtgctttgcaagaggcaagtgaagacctatctagttaacctttttgaaggcacaatcctgtgtgttatccatgccaaaagtgtgacaattatgccaaagtgcattcaactagca

SEQ ID NO: 3955 - DNA, 2427 bp, Homo sapiens
asaarcactccgggmgtgctgccggcggcggtaggtggcgcgcgggtccggcgggcggttggcttgagcgggaccggagctgaggcaggaagagccggcgccatggtggagaaggaggaggctggcggcggcattagcgaggaggaggcggcacagtatgaccggcagatccgcctgtggggactggaggcccagaaacggctgcgggcctctcgggtgcttcttgtcggcttgaaaggacttggggctgaaattgccaagaatctcatcttggcaggagtgaaaggactgaccatgctggatcacgaacaggtaactccagaagatcccggagctcagttcttgattcgtactgggtctgttggccgaaatagggctgaagcctctttggagcgagctcagaatctcaaccccatggtggatgtgaaggtggacactgaggatatagagaagaaaccagagtcatttttcactcaattcgatgctgtgtgtctgacttgctgctccagggatgtcatagttaaagttgaccagatctgtcacaaaaatagcatcaagttctttacaggagatgtttttggctaccatggatacacatttgccaatctaggagagcatgagtttgtagaggagaaaactaaagttgccaaagttagccaaggagtagaagatgggcccgacaccaagagagcaaaacttgattcttctgagacaacgatggtcaaaaagaaggtggtcttctgccctgttaargaagccctggaggtggactggagcagtgagaaagcaaaggctgctctgaagcgcacgacctccgactactttctccttcaagtgctcttaaagttccgtacagataaaggaagagatcccagttctgatacatatgaggaagattctgagttgttgctccagatacgaaatgatgtgcttgactcactgggtattagtcctgayctgcttcctgaggactttgtcaggtactgcttctccgagatggccccagtgtgtgcggtggttggagggattttggcacaggaaattgtgaaggccctgtctcagcgggaccctcctcacaacaacttcttcttcttcgatggcatgaaggggaatgggattgtggagtgccttggccccaagtgaactcaagatttggcagccccagagatgccaactgcagcatgcccacctgtattccctgtccccttccttcatgaaggcatctccaggcaaggaaaactgaagtcattggcccgatacaaaacatttcctgcaacgaaggaggtggtgccgacgtgctgcttcccatcaccagcagctgctcgacaaggggcgcagggtggctgtctttgttccagcactgttcaggctgcctgtcatcccgggcctgccagctcccctgagtgatgagcacttccaagcacccctctgccctttctctgtccttatgctgtcccggcctcgccagccctctggggmattgtgggagatgcctgccaggaatgagcaagctctgttgctcgggagcctcttgtcaccttcttggacttattccccacctgataccttatagagaaaagtgtgaattcaggtggagagtaggcccaggccccatgaggcaccagtggaagcacagctccaagttcagacaggtgcccttagagaggaaaaccatgacaggcaaatgcatttcctctggagtttgagaccctgacaaacaacaggtggcatctggtgtgctgttcttgagttttcgtttaggattagttgagttcctggggcttcagggctaggagggaggagcctgcccttttaacagaaccccagtcacatgcggctcaagtcactcagaggctgttgcatttcagggctatgttggtcctttgtttacctcctaaaccacagctgtttgtgtttcacatatgttgtgaattttccttggttctttttaaaggaatgataataaagttacttgctttaggatttgcttgtttttcttccacttcagaagcttctgagagggaatgggatgatcctaccagttgccttttcagacctgaggctctaactcaagagattcctcctctccctcaccattcctgccaccattttttctgggtgatgcagcaagagttaaattgttcacattctagaatgtgtagaagcttctggctccagttgtctaatggataattcagctaaatagtggctattttcagtggcaagaattataataataaagggaagtcaaaagtgatgcttcatatgccccaagtgccacagccgctacgggtcagagcttttattggaagaccaggtttgccttgatgcagccaaagtgcgttccagttcaccccactcttgcttgtgtttcttctttatgtaaattgtgtgatgtttcaataaatcagtctctttcctattctg

SEQ ID NO: 3956 - DNA, 2527 bp, Homo sapiens
asaarcactccgggmgtgctgccggcggcggtaggtggcgcgcgggtccggcgggcggttggcttgagcgggaccggagctgaggcaggaagagccggcgccatggtggagaaggaggaggctggcggcggcattagcgaggaggaggcggcacagtatgaccggcagatccgcctgtggggactggaggcccagaaacggctgcgggcctctcgggtgcttcttgtcggcttgaaaggacttggggctgaaattgccaagaatctcatcttggcaggagtgaaaggactgaccatgctggatcacgaacaggtaactccagaagatcccggagctcagttcttgattcgtactgggtctgttggccgaaatagggctgaagcctctttggagcgagctcagaatctcaaccccatggtggatgtgaaggtggacactgaggatatagagaagaaaccagagtcatttttcactcaattcgatgctgtgtgtctgacttgctgctccagggatgtcatagttaaagttgaccagatctgtcacaaaaatagcatcaagttctttacaggagatgtttttggctaccatggatacacatttgccaatctaggagagcatgagtttgtagaggagaaaactaaagttgccaaagttagccaaggagtagaagatgggcccgacaccaagagagcaaaacttgattcttctgagacaacgatggtcaaaaagaaggtggtcttctgccctgttaargaagccctggaggtggactggagcagtgagaaagcaaaggctgctctgaagcgcacgacctccgactactttctccttcaagtgctcttaaagttccgtacagataaaggaagagatcccagttctgatacatatgaggaagattctgagttgttgctccagatacgaaatgatgtgcttgactcactgggtattagtcctgayctgcttcctgaggactttgtcaggtactgcttctccgagatggccccagtgtgtgcggtggttggagggattttggcacaggaaattgtgaaggccctgtctcagcgggaccctcctcacaacaacttcttcttcttcgatggcatgaaggggaatgggattgtggagtgccttggccccaagtgaactcaagatttggcagccccagagatgccaactgcagcatgcccacctgtattccctgtccccttccttcatgaaggcatctccaggcaaggaaaactgaagtcattggcccgatacaaaacatttcctgcaacgaaggaggtggtgccgacgtgctgcttcccatcaccagcagctgctcgacaaggggcgcagggtggctgtctttgttccagcactgttcaggctgcctgtcatcccgggcctgccagctcccctgagtgatgagcacttccaagcacccctctgccctttctctgtccttatgctgtcccggcctcgccagccctctggggmattgtgggagatgcctgccaggaatgagcaagctctgttgctcgggagcctcttgtcaccttcttggacttattccccacctgataccttatagagaaaagtgtgaattcaggtggagagtaggcccaggccccatgaggcaccagtggaagcacagctccaagttcagacaggtgcccttagagaggaaaaccatgacaggcaaatgcatttcctctggagtttgagaccctgacaaacaacaggtggcatctggtgtgctgttcttgagttttcgtttaggattagttgagttccagctgggttttgggagaaaggagatgctaccaagtcttggatgttagggcgagaccctgcaagttgagtattagagagcttgtctttcaaggcaggttcctggggcttcagggctaggagggaggagcctgcccttttaacagaaccccagtcacatgcggctcaagtcactcagaggctgttgcatttcagggctatgttggtcctttgtttacctcctaaaccacagctgtttgtgtttcacatatgttgtgaattttccttggttctttttaaaggaatgataataaagttacttgctttaggatttgcttgtttttcttccacttcagaagcttctgagagggaatgggatgatcctaccagttgccttttcagacctgaggctctaactcaagagattcctcctctccctcaccattcctgccaccattttttctgggtgatgcagcaagagttaaattgttcacattctagaatgtgtagaagcttctggctccagttgtctaatggataattcagctaaatagtggctattttcagtggcaagaattataataataaagggaagtcaaaagtgatgcttcatatgccccaagtgccacagccgctacgggtcagagcttttattggaagaccaggtttgccttgatgcagccaaagtgcgttccagttcaccccactcttgcttgtgtttcttctttatgtaaattgtgtgatgtttcaataaatcagtctctttcctattctg

SEQ ID NO: 3957 - DNA, 5870 bp, Homo sapiens
tagagacacgaatatgtttcagccgcaacaggctgcgtttcagccggaagagtgaaagggcaccttgaaaacgcaagtttatgaatatgtttctgtactttcagaccatcatcaaagaggggatgctgaccaaacagaacaattcattccagcgatcaaaaaggagatactttaagcttcgagggcgaacgctttactatgccaaaacggcaaagtcaatcatatttgatgaggtggatctgacagatgccagcgtagctgaatccagtaccaaaaacgtcaacaacagttttacggtcataactccatgcaggaagctcatcttgtgtgctgataacagaaaagaaatggaagattggattgcagcattaaagactgtgcagaacagggagcactttgagcccacccagtacagcatggaccacttctcagggatgcacaattggtacgcctgttcccacgcgaggccgacctactgcaatgtgtgccgtgaggctctgtctggggtcacgtcgcacgggctgtcctgcgaggtgtgcaaatttaaggcccacaagcgctgtgctgtgcgtgcaaccaataactgcaagtggaccacactggcctcgatcgggaaggacatcattgaagatgcagatgggattgcaatgccccaccagtggttggaaggaaacctacctgtgagcgccaagtgcactgtgtgcgacaagacctgtggcagtgtgctgcgcctgcaggactggcgctgcctctggtgcaaggccatggttcacacatcgtgtaaagaatccttgctgaccaagtgcccacttggcctgtgcaaagtgtcagtcatcccacccacggctctcaacagcatcgactccgatgggttctggaaggccagctgtcctccttcttgcacaagcccactgttggtcttcgtcaattcaaaaagtggggacaaccagggtgtgaagttcctcagaagattcaaacagctactaaaccccgcccaggtcttcgacctcatgaacggaggcccacacctcggcttacggttattccagaagtttgacacattccggattctggtttgtggcggggatggaagtgttggctgggtcctctccgaaatcgacagcctcaaccttcataaacagtgtcagctgggagtgctgccgctcggcacagggaacgacttggcccgagtaytgggctggggctcagcctgcgatgacgacacccagctcccccagatcttggagaagttggagagagccagcaccaagatgctggacaggtggagcgtcatggcatacgaggccaagctcccccggcaggcctcctcctctaccgtcaccgaagacttcagcgaggattccgaggtacagcagattctcttctatgaagactcggttgcagcccacctttctaaaatcctcacctcggaccagcactcrgtggtcatctcctcggccaaagtgctctgtgagacggtgaaggacttcgtggcacgggtggggaaggcctatgagaagacgaccgagagctcggaggagtcagaggtcatggccaagaagtgctctgtcctgaaagagaagctggattcccttctcaagaccttggacgatgagtcccaggcctcgtcctctctgcccaacccgcccccsaccattgccgaggaggctgaagatggagatgggtcgggcagcatctgcggttccaccggagaccgcttggtggcatcagcttgcccggcccggccgcagatattccggcctcgagaacagctcatgctgagagccaacagcctgaagaaagcaattcgtcagatcatagaacacacagaaaaagctgtcgatgagcagaatgcccagacccaggagcaggagggcttcgtcctgggcctctctgagtcagaggagaagatggaccacagagtgtgcccaccactgtcccacagcgagagcttcggggtccccaaggggaggagccagcgcaaagtgtcgaaatctccgtgtgaaaagctgatcagcaaagggagtctgtccctaggcagttctgcttcccttccgccccagccgggaagccgggacggcctgcctgcgctcaacaccaagatcctgtacccaaatgtccgggctggaatgtctggttccttacccggtggctcagtcatcagtcgcctgttaattaatgctgatcccttcaactctgaaccagaaaccctagagtattacacggagaaatgtgtcatgaacaactattttggcattggcctggatgcgaagatatccctggactttaacaacaagcgcgatgagcacccagagaagtgcaggagccgaaccaagaacatgatgtggtatggagttcttggaaccaaagagttgctgcacagaacctacaagaacctggagcaaaaggtcttgctggagtgtgacgggcgacccatcccactccccagtcttcagggaattgctgtccttaacattcccagctatgccggaggaaccaacttctgggggggtaccaaggaagatgatactttcgcagctccatcattcgatgacaagattctggaggtggtcgccgtgttcggcagcatgcagatggccgtctctcgagtcatcaggctrcagcatcatcggatcgcccagtgtcgcacggtgaagatctccatccttggggatgagggcgtgcctgtgcaggtggacggagaggcctgggtccagccgccagggtacattcggattgtccacaagaaccgggcacagacactgaccagagacagggcatttgagagcaccctgaagtcctgggaagacaagcagaagtgcgagstgccccgccctccatcctgttccctgcacccggagatgctgtccgaggaggaggccacccagatggaccagtttgggcaggcagcaggggtcctcattcacagtatccgagaaatagctcagtctcaccgggacatggagcaggaactggcccacgccgtcaatgccagctccaagtccatggaccgtgtgtatggcaagcccagaaccacagaggggctcaactgcagcttcgtcctggaaatggtgaataacttcagagctctgcgcagtgagacrgagctgctgctgtctgggaagatggccctgcagctggatccgcctcagaaggagcagctggggagtgctcttgccgagatggaccgacagctcaggaggctggcagacaccccgtggctctgccagtccgcagagcccggcgacgaagagagtgtgatgctggatcttgccaagcgcagtcgcagtggtaaattccgcctcgtgaccaagtttaaaaaggagaaaaacaacaagaacaaagaagctcacagtagcctgggagccccggttcacctctgggggacagaggaggttgctgcctggctggagcacctcagtctctgtgagtataaggacatcttcacacggcacgacatccggggctctgagctcctgcacctggagcggagggacctcaaggacctgggcgtgaccaaggtgggccacatgaagaggatcctgtgtggcatcaaggagctgagccgcagcgcccccgccgtcgaggcctagcctctgtcctctcagcctgtggcctccacatccccgccgccgaggcctagcctccgccctctcagcctgtggcctctgcgcctcctgccactgaggccctgggcagatgctgcagcccgcccccttctcatggtgctacttcctctgtcagctacagaaagcctccgtgacaccgtccaccagagctctggggtctcgaacataacaacacagctacctttgaaacaacactttctccagctcagagtcacctggggcacatgtgtcacggccactcagctctcgcccgcctgtgctgtgggccagggaatccagcggcgtctggcctcctgggcactgcttgcctggcctcgtgcttggattgtcccgggggctcctctccgtgtgtccttctgtggccgcaccgtgtggctccgcctcctggcccccagccagttctcagaaacgtggctggggcccagcacagcagcctgcaagggcccctgtttgttgatgcagcttttgttgaacaaaaatcgtgctctttcctggtttgaaagtagcatggatgtttccagtcttgttgattgtaatttgacgtgaagagaaaaaaamattcctcctgcgtgagccaaggcagcgggtgctgtttcccaggcrgggagcccctccctgggtgtcacaggkcctgtgctcctccctcctccatcctctctcctcccgctcctccctccccccactgtgggctggggacgcctgcccttctgtctccggacgctctaggcgagttcagcttggggtgtgagtgagacagctygccagctgcatccctgcagacagaggatgtgtgtccacatgagtgtttctgtgtgggaaatgcttcctggctctgggaaactttttctgcccattctgtggttcccagggagcgtggccctggtgggccaggggtggtttgacctcttcagcccgtccggtggcctggaggccggaggctstcytgagtgtctgcccctgcagtggcttcttgtcgcctgctgctgggcgtgatgtcgctggaggtgctggcagggactctgatttggtggtccgcgctgcccctgccctgcctctgtcctggctctgaactagtagatgatggtgccagagggcagggagctcgcctggggagagggctgtgccccgtagggacagtgcccaggtgaaggatgcccctggtcctccagggcactgactttgcccttttttcccgttgatagtcatggctcagaggtgcttgtaaatgtcttgggaagaggtttctgtaacccctgccctggtgtgaggaggaaatggctctggcctggctgcctggccgtggcttctctttggctcccaaagagaaggacagtgttgggagtatctgccgtggcttctctttggctcccaaagagaagsacagtgttgggagtatctgccggcgctgtccaggtcctttagtcagcgtcactccatctgatgtgcagaagctgggctgcacctgcgggggtgggcatagaccgggctgggtctgcagcagcccctggtcctgagcaggcggcagtgaacagcactggcccacctcccactcacagcccctctgtcccctctgcagtgcacccaggtgggcccctctgcgtgcctttgggtgctcccctctcgtggtcgttctggcccgaggcccttagagtatggaggctgagccaggccttgggtttccccagcacagcctcctgtcgctgcatgcgacgtgttgggatttttggatgaaagactctcccacgctctgttggtggacttagctgcctcactggaagtgatgtgggtggaaggtggttgtatgttacctttwccacctctcattgttttccccagaacattgtagatgggggttggcagagggaraaatawgccagccacggcagtcgcttggtttcccaggtggaatgggctaacacaggagatgatgggaacctgtcccgcagtccctgcatgaccattggccctgctggcctggcgrtgtgggcatcctggggttcttagggtcccagaacaagccccaggcaagctggaacttgggtggggaggggacatgaggaggataaacagctgactgtggcttctgccccggcccaggtccccttgtggtgttgccagacgggcctcatggtctgctgtgcagagagaggcaggaaggatccctgaagagtcttggagaaaaggttctgtgccctcaggtggggcttaccccctcgtatttataatcttaatttatatagt

SEQ ID NO: 3958 - DNA, 6230 bp, Homo sapiens
tagagacacgaatatgtttcagccgcaacaggctgcgtttcagccggaagagtgaaagggcaccttgaaaacgcaagtttatgaatatgtttctgtactttcagaccatcatcaaagaggggatgctgaccaaacagaacaattcattccagcgatcaaaaaggagatactttaagcttcgagggcgaacgctttactatgccaaaacggcaaagtcaatcatatttgatgaggtggatctgacagatgccagcgtagctgaatccagtaccaaaaacgtcaacaacagttttacggtcataactccatgcaggaagctcatcttgtgtgctgataacagaaaagaaatggaagattggattgcagcattaaagactgtgcagaacagggagcactttgagcccacccagtacagcatggaccacttctcagggatgcacaattggtacgcctgttcccacgcgaggccgacctactgcaatgtgtgccgtgaggctctgtctggggtcacgtcgcacgggctgtcctgcgaggtgtgcaaatttaaggcccacaagcgctgtgctgtgcgtgcaaccaataactgcaagtggaccacactggcctcgatcgggaaggacatcattgaagatgcagatgggattgcaatgccccaccagtggttggaaggaaacctacctgtgagcgccaagtgcactgtgtgcgacaagacctgtggcagtgtgctgcgcctgcaggactggcgctgcctctggtgcaaggccatggttcacacatcgtgtaaagaatccttgctgaccaagtgcccacttggcctgtgcaaagtgtcagtcatcccacccacggctctcaacagcatcgactccgatgggttctggaaggccagctgtcctccttcttgcacaagcccactgttggtcttcgtcaattcaaaaagtggggacaaccagggtgtgaagttcctcagaagattcaaacagctactaaaccccgcccaggtcttcgacctcatgaacggaggcccacacctcggcttacggttattccagaagtttgacacattccggattctggtttgtggcggggatggaagtgttggctgggtcctctccgaaatcgacagcctcaaccttcataaacagtgtcagctgggagtgctgccgctcggcacagggaacgacttggcccgagtaytgggctggggctcagcctgcgatgacgacacccagctcccccagatcttggagaagttggagagagccagcaccaagatgctggacaggtggagcgtcatggcatacgaggccaagctcccccggcaggcctcctcctctaccgtcaccgaagacttcagcgaggattccgaggtacagcagattctcttctatgaagactcggttgcagcccacctttctaaaatcctcacctcggaccagcactcrgtggtcatctcctcggccaaagtgctctgtgagacggtgaaggacttcgtggcacgggtggggaaggcctatgagaagacgaccgagagctcggaggagtcagaggtcatggccaagaagtgctctgtcctgaaagagaagctggattcccttctcaagaccttggacgatgagtcccaggcctcgtcctctctgcccaacccgcccccsaccattgccgaggaggctgaagatggagatgggtcgggcagcatctgcggttccaccggagaccgcttggtggcatcagcttgcccggcccggccgcagatattccggcctcgagaacagctcatgctgagagccaacagcctgaagaaagcaattcgtcagatcatagaacacacagaaaaagctgtcgatgagcagaatgcccagacccaggagcaggagggcttcgtcctgggcctctctgagtcagaggagaagatggaccacagagtgtgcccaccactgtcccacagcgagagcttcggggtccccaaggggaggagccagcgcaaagtgtcgaaatctccgtgtgaaaagctgatcagcaaagggagtctgtccctaggcagttctgcttcccttccgccccagccgggaagccgggacggcctgcctgcgctcaacaccaagatcctgtacccaaatgtccgggctggaatgtctggttccttacccggtggctcagtcatcagtcgcctgttaattaatgctgatcccttcaactctgaaccagaaaccctagagtattacacggagaaatgtgtcatgaacaactattttggcattggcctggatgcgaagatatccctggactttaacaacaagcgcgatgagcacccagagaagtgcaggagccgaaccaagaacatgatgtggtatggagttcttggaaccaaagagttgctgcacagaacctacaagaacctggagcaaaaggtcttgctggagtgtgacgggcgacccatcccactccccagtcttcagggaattgctgtccttaacattcccagctatgccggaggaaccaacttctgggggggtaccaaggaagatgatactttcgcagctccatcattcgatgacaagattctggaggtggtcgccgtgttcggcagcatgcagatggccgtctctcgagtcatcaggctrcagcatcatcggatcgcccagtgtcgcacggtgaagatctccatccttggggatgagggcgtgcctgtgcaggtggacggagaggcctgggtccagccgccagggtacattcggattgtccacaagaaccgggcacagacactgaccagagacagggcatttgagagcaccctgaagtcctgggaagacaagcagaagtgcgagstgccccgccctccatcctgttccctgcacccggagatgctgtccgaggaggaggccacccagatggaccagtttgggcaggcagcaggggtcctcattcacagtatccgagaaatagctcagtctcaccgggacatggagcaggaactggcccacgccgtcaatgccagctccaagtccatggaccgtgtgtatggcaagcccagaaccacagaggggctcaactgcagcttcgtcctggaaatggtgaataacttcagagctctgcgcagtgagacrgagctgctgctgtctgggaagatggccctgcagctggatccgcctcagaaggagcagctggggagtgctcttgccgagatggaccgacagctcaggaggctggcagacaccccgtggctctgccagtccgcagagcccggcgacgaagagagtgtgatgctggatcttgccaagcgcagtcgcagtggtaaattccgcctcgtgaccaagtttaaaaaggagaaaaacaacaagaacaaagaagctcacagtagcctgggagccccggttcacctctgggggacagaggaggttgctgcctggctggagcacctcagtctctgtgagtataaggacatcttcacacggcacgacatccggggctctgagctcctgcacctggagcggagggacctcaaggacctgggcgtgaccaaggtgggccacatgaagaggatcctgtgtggcatcaaggagctgagccgcagcgcccccgccgtcgaggcctagcctctgtcctctcagcctgtggcctccacatccccgccgccgaggcctagcctccgccctctcagcctgtggcctctgcgcctcctgccactgaggccctgggcagatgctgcagcccgcccccttctcatggtgctacttcctctgtcagctacagaaagcctccgtgacaccgtccaccagagctctggggtctcgaacataacaacacagctacctttgaaacaacactttctccagctcagagtcacctggggcacatgtgtcacggccactcagctctcgcccgcctgtgctgtgggccagggaatccagcggcgtctggcctcctgggcactgcttgcctggcctcgtgcttggattgtcccgggggctcctctccgtgtgtccttctgtggccgcaccgtgtggctccgcctcctggcccccagccagttctcagaaacgtggctggggcccagcacagcagcctgcaagggcccctgtttgttgatgcagcttttgttgaacaaaaatcgtgctctttcctggtttgaaagtagcatggatgtttccagtcttgttgattgtaatttgacgtgaagagaaaaaaamattcctcctgcgtgagccaaggcagcgggtgctgtttcccaggcrgggagcccctccctgggtgtcacaggkcctgtgctcctccctcctccatcctctctcctcccgctcctccctccccccactgtgggctggggacgcctgcccttctgtctccggacgctctaggcgagttcagcttggggtgtgagtgagacagctygccagctgcatccctgcagacagaggatgtgtgtccacatgagtgtttctgtgtgggaaatgcttcctggctctgggaaactttttctgcccattctgtggttcccagggagcgtggccctggtgggccaggggtggtttgacctcttcagcccgtccggtggcctggaggccggaggctstcytgagtgtctgcccctgcagtggcttcttgtcgcctgctgctgggcgtgatgtcgctggaggtgctggcagggactctgatttggtggtccgcgctgcccctgccctgcctctgtcctggctctgaactagtagatgatggtgccagagggcagggagctcgcctggggagagggctgtgccccgtagggacagtgcccaggtgaaggatgcccctggtcctccagggcactgactttgcccttttttcccgttgatagtcatggctcagaggtgcttgtaaatgtcttgggaagaggtttctgtaacccctgccctggtgtgaggaggaaatggctctggcctggctgcctggccgtggcttctctttggctcccaaagagaaggacagtgttgggagtatctgccgtggcttctctttggctcccaaagagaagsacagtgttgggagtatctgccggcgctgtccaggtcctttagtcagcgtcactccatctgatgtgcagaagctgggctgcacctgcgggggtgggcatagaccgggctgggtctgcagcagcccctggtcctgagcaggcggcagtgaacagcactggcccacctcccactcacagcccctctgtcccctctgcagtgcacccaggtgggcccctctgcgtgcctttgggtgctcccctctcgtggtcgttctggcccgaggcccttagagtatggaggctgagccaggccttgggtttccccagcacagcctcctgtcgctgcatgcgacgtgttgggatttttggatgaaagactctcccacgctctgttggtggacttagctgcctcactggaagtgatgtgggtggaaggtggttgtatgttacctttwccacctctcattgttttccccagaacattgtagatgggggttggcagagggaraaatawgccagccacggcagtcgcttggtttcccaggtggaatgggctaacacaggagatgatgggaacctgtcccgcagtccctgcatgaccattggccctgctggcctggcgrtgtgggcatcctggggttcttagggtcccagaacaagccccaggcaagctggaacttgggtggggaggggacatgaggaggataaacagctgactgtggcttcaaggacatcagggccaccccaagtcctcagtgtcctactcctggcaaggagttgggtttggatcaaaagtgtttaaaattaatatgttgtcagtgattagaacaacactgtttacataaaaaccatttttctaattctaacaagttagaatgtgaggaaggaatgaacatgagtgtttaggaacctgccctttggtgctgggctggcgtcccgcactggggtgtcctcgctgtctgggggctgctctgctgccccggcccaggtccccttgtggtgttgccagacgggcctcatggtctgctgtgcagagagaggcaggaaggatccctgaagagtcttggagaaaaggttctgtgccctcaggtggggcttaccccctcgtatttataatcttaatttatatagtgaccmccgtggaaacaaacgcctcttgtattgtyatgtacatagtccatacctgagtgctgtacataagttgttctgtgtataaataaaacaagcctgtttttgatcttcc

SEQ ID NO: 3959 - DNA, 2354 bp, Homo sapiens
cgcgctggcccggcagcatggcggcggcggcgggcgcccctccgccgggtcccccgcaaccgcctccgccgccgccgcccgaggagtcgtccgacagcgagcccgaggcggagcccggctccccacagaagctcatccgcaaggtgtccacgtcgggtcagatccgacagaagaccatcatcaaagaggggatgctgaccaaacagaacaattcattccagcgatcaaaaaggagatactttaagcttcgagggcgaacgctttactatgccaaaacggcaaagtcaatcatatttgatgaggtggatctgacagatgccagcgtagctgaatccagtaccaaaaacgtcaacaacagttttacggtcataactccatgcaggaagctcatcttgtgtgctgataacagaaaagaaatggaagattggattgcagcattaaagactgtgcagaacagggagcactttgagcccacccagtacagcatggaccacttctcagggatgcacaattggtacgcctgttcccacgcgaggccgacctactgcaatgtgtgccgtgaggctctgtctggggtcacgtcgcacgggctgtcctgcgaggtgtgcaaatttaaggcccacaagcgctgtgctgtgcgtgcaaccaataactgcaagtggaccacactggcctcgatcgggaaggacatcattgaagatgcagatgggattgcaatgccccaccagtggttggaaggaaacctacctgtgagcgccaagtgcactgtgtgcgacaagacctgtggcagtgtgctgcgcctgcaggactggcgctgcctctggtgcaaggccatggttcacacatcgtgtaaagaatccttgctgaccaagtgcccacttggcctgtgcaaagtgtcagtcatcccacccacggctctcaacagcatcgactccgatgggttctggaaggccagctgtcctccttcttgcacaagcccactgttggtcttcgtcaattcaaaaagtggggacaaccagggtgtgaagttcctcagaagattcaaacagctactaaaccccgcccaggtcttcgacctcatgaacggaggcccacacctcggcttacggttattccagaagtttgacacattccggattctggtttgtggcggggatggaagtgttggctgggtcctctccgaaatcgacagcctcaaccttcataaacagtgtcagctgggagtgctgccgctcggcacagggaacgacttggcccgagtaytgggctggggctcagcctgcgatgacgacacccagctcccccagatcttggagaagttggagagagccagcaccaagatgctggacaggtggagcgtcatggcatacgaggccaagctcccccggcaggcctcctcctctaccgtcaccgaagacttcagcgaggattccgaggtacagcagattctcttctatgaagactcggttgcagcccacctttctaaaatcctcacctcggaccagcactcrgtggtcatctcctcggccaaagtgctctgtgagacggtgaaggacttcgtggcacgggtggggaaggcctatgagaagacgaccgagagctcggaggagtcagaggtcatggccaagaagtgctctgtcctgaaagagaagctggattcccttctcaagaccttggacgatgagtcccaggcctcgtcctctctgcccaacccgcccccsaccattgccgaggaggctgaagatggagatgggtcgggcagcatctgcggttccaccggagaccgcttggtggcatcagcttgcccggcccggccgcagatattccggcctcgagaacagctcatgctgagagccaacagcctgaagaaagcaattcgtcagatcatagaacacacagaaaaagctgtcgatgagcagaatgcccagacccaggagcaggagggcttcgtcctgggcctctctgagtcagaggagaagatggaccacagagtgtgcccaccactgtcccacagcgagagcttcggggtccccaaggggaggagccagcgcaaagtgtcgaaatctccgtgtgaaaagctgatcagcaaagggagtctgtccctaggcagttctgcttcccttccgccccagccgggaagccgggacggcctgcctgcgctcaacaccaagatcctgtacccaaatgtccgggctggaatgtctggttccttacccggtggctcagtcatcagtcgcctgttaattaatgctgatcccttcaactctgaaccagaaaccctagtattacacggagaaatgtgtcatgaacaactattttggcattggcctggatgcgaagatatccctggactt

SEQ ID NO: 3960 - DNA, 3693 bp, Homo sapiens
aactaggatacgtggctgagcgcgcgcgatggggcgggaggtttggggtcaaggagcaaactctgcacaagatggcggcggtagcggcagtggcggcgcgtaggaggcggtcttgggcgtctttggtactggcttttttaggggtctgcctggggattacccttgctgtggatagaagcaactttaagacctgtgaagagagttctttctgcaagcgacagagaagcatacggccaggcctctctccataccgagccttgctggactctctacagcttggtcctgattccctcacggtccatctgatccatgaggtcaccaaggtgttgctggtgctagagcttcaggggcttcaaaagaacatgactcggttcaggattgatgagctggagcctcggcgaccccgataccgtgtaccagatgttttggtggctgatccaccaatagcccggctttctgtctctggtcgtgatgagaacagtgtggagttaaccatggctgagggaccctacaagatcatcttgacagcayggccattccgccttgacctactagaggaccgaagtcttttgcttagtgtcaatgcccraggactcttggagtttgagcatcagagggcccctagggtctctttctcggataaggttaatctcacgcttggtagcatatgggataagatcaagaaccttttctctaggcaaggatcaaaagacccagctgagggcgatggggcccagcctgaggaaacacccagggatggcgacaaggcaaaggagactcaggggaaggcagagaaagatgagccaggagcctgggaggagacattcaaaactcactctgacagcaagccgtatggccccatgtctgtgggtttggacttctctctgccaggcatggagcatgtctatgggatccctgagcatgcagacaacctgaggctgaaggtcactgagggtggggagccatatcgcctctacaatttggatgtgttccagtatgagctgtacaacccaatggccttgtatgggtctgtgcctgtgctcctggcacacaaccctcatygcgacttgggcatcttctggctcaatgctgcagagacctgggttgatatatcttccaacactgccgggaagaccctgtttgggaagatgatggactacctgcagggctctggggagaccccacagacagatgttcgctggatgtcagagactggcatcattgacgtcttcctgctgctggggccctccatctctgatgttttccggcaatatgctagtctcacaggaacccaggcgttgcccccactcttctccctcggctaccaccagagccgttggaactaccgggacgaggctgatgtgctggaagtggatcagggctttgatgatcacaacctgccctgtgatgtcatctggctagacattgaacatgctgatggcaagcggtatttcacctgggaccccagtcgcttccctcagccccgcaccatgcttgagcgcttggcttctaagaggcggaagctggtggccatcgtagacccccacatcaaggtggactccggctaccgagttcacgaggagctgcggaacctggggctgtatgttaaaacccgggatggctctgactatgagggctggtgctggccaggctcagctggttaccctgacttcactaatcccacgatgagggcctggtgggctaacatgttcagctatgacaattatgagggctcagctcccaacctctttgtctggaatgacatgaacgaaccatctgtgttcaatggtcctgaggtcaccatgctcaaggatgcccagcattatgggggctgggagcaccgggatgtgcataacatctatggcctttatgtgcacatggcgactgctgatgggctgagacagcgctctgggggcatggaacgcccctttgtcctggccagggccttcttcgctggctcccagcgctttggagccgtgtggacaggggacaacactgccgagtgggaccatttgaagatctctattcctatgtgtctcagcttggggctggtgggactttccttctgtggggcggatgtgggtggcttcttcaaaaacccagagccagagctgcttgtgcgctggtaccagatgggtgcttaccagccattcttccgggcacatgcccacttggacactgggcgacgagagccatggctgttaccatctcagcacaatgatataatccgagatgccttgggccagcgatattctttgctgcccttctggtacaccctcttatatcaggcccatcgggaaggcattcctgtcatgaggcccctgtgggtgcagtaccctcaggatgtgactaccttcaatatagatgatcagtacttgcttggggatgcgttgctggttcaccctgtatcagactctggagcccatggtgtccaggtctatctgcctggccaaggggaggtgtggtatgacattcaaagctaccagaagcatcatggtccccagaccctgtacctgcctgtaactctaagcagtatccctgtgttccagcgtggagggacaatcgtgcctcgatggatgcgagtgcggcggtcttcagaatgtatgaaggatgaccccatcactctctttgttgcacttagccctcagggtacagctcaaggagagctctttctggatgatgggcacacgttcaactatcagactcgccaagagttcctgctgcgtcgattctcattctctggcaacacccttgtctccagctcagcagaccctgaaggacactttgagacaccaatctggattgagcgggtggtgataataggggctggaaagccagcagctgtggtactccagacaaaaggatctccagaaagccgcctgtccttccagcatgaccctgagacctctgtgttggtcctgcgcaagcctggcatcaatgtggcatctgattggagtattcacctgcgataacccaagggatrttctgggttagggggagggaaggggagcattagtgctgagagatattctttcttctgccttggagttcggccctccccagacttcacttatgctagtctaagacccagattctgccaacatttgggcaggatgagagggctgaccctgggctccaaattcctcttgtgatctcctcacctctcccactccattgataccaactctttcccttcattcccccaacatcctgttgctctaactggagcacattcayttaygaasaccaggaaaccacagggcccttgtcgccccttctctttcccttatttaggagccctgaactcccccagagtctatccattcatgcctcttgtatgttgatgccacttcttggaagaagatgagggcaatgagttaggkctccttttccccttccctcccaccagattgctctcccacctttcatttcttcctccaggctttactcccctttttatgccccaccgatacactgggaccaccccttaccccggacaggatgaatggatcaaaggagtgaggttgctaaagaacatccttttccctctcattctayccytttcctctccccgattccttgtagagctgctgcattctacctcctctgtccctcggcagaaagacgtttcyacacctcttaggggatgcgcattaaacttcttttgcccccttcttgtcccctttgaggggc

SEQ ID NO: 3961 - DNA, 3896 bp, Homo sapiens
aactaggatacgtggctgagcgcgcgcgatggggcgggaggtttggggtcaaggagcaaactctgcacaagatggcggcggtagcggcagtggcggcgcgtaggaggcggtcttgggcgtctttggtactggcttttttaggggtctgcctggggattacccttgctgtggatagaagcaactttaagacctgtgaagagagttctttctgcaagcgacagagaagcatacggccaggcctctctccataccgagccttgctggactctctacagcttggtcctgattccctcacggtccatctgatccatgaggtcaccaaggtgttgctggtgctagagcttcaggggcttcaaaagaacatgactcggttcaggattgatgagctggagcctcggcgaccccgataccgtgtaccagatgttttggtggctgatccaccaatagcccggctttctgtctctggtcgtgatgagaacagtgtggagttaaccatggctgagggaccctacaagatcatcttgacagcayggccattccgccttgacctactagaggaccgaagtcttttgcttagtgtcaatgcccraggactcttggagtttgagcatcagagggcccctagggtctcgcaaggatcaaaagacccagctgagggcgatggggcccagcctgaggaaacacccagggatggcgacaaggcaaaggagactcaggggaaggcagagaaagatgagccaggagcctgggaggagacattcaaaactcactctgacagcaagccgtatggccccatgtctgtgggtttggacttctctctgccaggcatggagcatgtctatgggatccctgagcatgcagacaacctgaggctgaaggtcactgagggtggggagccatatcgcctctacaatttggatgtgttccagtatgagctgtacaacccaatggccttgtatgggtctgtgcctgtgctcctggcacacaaccctcatygcgacttgggcatcttctggctcaatgctgcagagacctgggttgatatatcttccaacactgccgggaagaccctgtttgggaagatgatggactacctgcagggctctggggagaccccacagacagatgttcgctggatgtcagagactggcatcattgacgtcttcctgctgctggggccctccatctctgatgttttccggcaatatgctagtctcacaggaacccaggcgttgcccccactcttctccctcggctaccaccagagccgttggaactaccgggacgaggctgatgtgctggaagtggatcagggctttgatgatcacaacctgccctgtgatgtcatctggctagacattgaacatgctgatggcaagcggtatttcacctgggaccccagtcgcttccctcagccccgcaccatgcttgagcgcttggcttctaagaggcggaagctggtggccatcgtagacccccacatcaaggtggactccggctaccgagttcacgaggagctgcggaacctggggctgtatgttaaaacccgggatggctctgactatgagggctggtgctggccaggctcagctggttaccctgacttcactaatcccacgatgagggcctggtgggctaacatgttcagctatgacaattatgagggctcagctcccaacctctttgtctggaatgacatgaacgaaccatctgtgttcaatggtcctgaggtcaccatgctcaaggatgcccagcattatgggggctgggagcaccgggatgtgcataacatctatggcctttatgtgcacatggcgactgctgatgggctgagacagcgctctgggggcatggaacgcccctttgtcctggccagggccttcttcgctggctcccagcgctttggagccgtgtggacaggggacaacactgccgagtgggaccatttgaagatctctattcctatgtgtctcagcttggggctggtgggactttccttctgtggggcggatgtgggtggcttcttcaaaaacccagagccagagctgcttgtgcgctggtaccagatgggtgcttaccagccattcttccgggcacatgcccacttggacactgggcgacgagagccatggctgttaccatctcagcacaatgatataatccgagatgccttgggccagcgatattctttgctgcccttctggtacaccctcttatatcaggcccatcgggaaggcattcctgtcatgaggcccctgtgggtgcagtaccctcaggatgtgactaccttcaatatagatgatcagtacttgcttggggatgcgttgctggttcaccctgtatcagactctggagcccatggtgtccaggtctatctgcctggccaaggggaggtgtggtatgacattcaaagctaccagaagcatcatggtccccagaccctgtacctgcctgtaactctaagcagtatccctgtgttccagcgtggagggacaatcgtgcctcgatggatgcgagtgcggcggtcttcagaatgtatgaaggatgaccccatcactctctttgttgcacttagccctcagggtacagctcaaggagagctctttctggatgatgggcacacgttcaactatcagactcgccaagagttcctgctgcgtcgattctcattctctggcaacacccttgtctccagctcagcagaccctgaaggacactttgagacaccaatctggattgagcgggtggtgataataggggctggaaagccagcagctgtggtactccagacaaaaggatctccagaaagccgcctgtccttccagcatgaccctgagacctctgtgttggtcctgcgcaagcctggcatcaatgtggcatctgattggagtattcacctgcgataacccaagggatrttctgggttagggggagggaaggggagcattagtgctgagagatattctttcttctgccttggagttcggccctccccagacttcacttatgctagtctaagacccagattctgccaacatttgggcaggatgagagggctgaccctgggctccaaattcctcttgtgatctcctcacctctcccactccattgataccaactctttcccttcattcccccaacatcctgttgctctaactggagcacattcayttaygaasaccaggaaaccacagggcccttgtcgccccttctctttcccttatttaggagccctgaactcccccagagtctatccattcatgcctcttgtatgttgatgccacttcttggaagaagatgagggcaatgagttaggkctccttttccccttccctcccaccagattgctctcccacctttcatttcttcctccaggctttactcccctttttatgccccaccgatacactgggaccaccccttaccccggacaggatgaatggatcaaaggagtgaggttgctaaagaacatccttttccctctcattctayccytttcctctccccgattccttgtagagctgctgcaattcttagaggggcagttctacctcctctgtccctcggcagaaagacgtttcyacacctcttaggggatgcgcattaaacttcttttgcccccttcttgtcccctttgaggggcacttaagatggagaaatcagttgtggtttcastgaatcatggtcacctgtatttattgctaggagaagcctgagggtggggggagatgatcatgtgtgctcggggttggctggaagccctgggtggggggttgggggaggactaatggggagtcggggaatatttgtgggtattttttttacttcctcttggttcccagctgtgacacgttttgatcaaaggagaaacaataaagggataaaccataaataac

SEQ ID NO: 3962 - DNA, 3544 bp, Homo sapiens
atggcggcggtagcggcagtggcggcgcgtaggaggcgtagagacagggtttcaccgtgttagccaggatggtcttgatctcctgacctcgtgatccgcccgccgcagcctcccaaagtgctgggattacaggagtgagccaccacgcccagcctactctgcctttcaaagggaaggtgtcttgggcgtctttggtactggcttttttaggggtctgcctggggattacccttgctgtggatagaagcaactttaagacctgtgaagagagttctttctgcaagcgacagagaagcatacggccaggcctctctccataccgagccttgctggactctctacagcttggtcctgattccctcacggtccatctgatccatgaggtcaccaaggtgttgctggtgctagagcttcaggggcttcaaaagaacatgactcggttcaggattgatgagctggagcctcggcgaccccgataccgtgtaccagatgttttggtggctgatccaccaatagcccggctttctgtctctggtcgtgatgagaacagtgtggagttaaccatggctgagggaccctacaagatcatcttgacagcayggccattccgccttgacctactagaggaccgaagtcttttgcttagtgtcaatgcccraggactcttggagtttgagcatcagagggcccctagggtctcgcaaggatcaaaagacccagctgagggcgatggggcccagcctgaggaaacacccagggatggcgacaaggcaaaggagactcaggggaaggcagagaaagatgagccaggagcctgggaggagacattcaaaactcactctgacagcaagccgtatggccccatgtctgtgggtttggacttctctctgccaggcatggagcatgtctatgggatccctgagcatgcagacaacctgaggctgaaggtcactgagggtggggagccatatcgcctctacaatttggatgtgttccagtatgagctgtacaacccaatggccttgtatgggtctgtgcctgtgctcctggcacacaaccctcatygcgacttgggcatcttctggctcaatgctgcagagacctgggttgatatatcttccaacactgccgggaagaccctgtttgggaagatgatggactacctgcagggctctggggagaccccacagacagatgttcgctggatgtcagagactggcatcattgacgtcttcctgctgctggggccctccatctctgatgttttccggcaatatgctagtctcacaggaacccaggcgttgcccccactcttctccctcggctaccaccagagccgttggaactaccgggacgaggctgatgtgctggaagtggatcagggctttgatgatcacaacctgccctgtgatgtcatctggctagacattgaacatgctgatggcaagcggtatttcacctgggaccccagtcgcttccctcagccccgcaccatgcttgagcgcttggcttctaagaggcggaagctggtggccatcgtagacccccacatcaaggtggactccggctaccgagttcacgaggagctgcggaacctggggctgtatgttaaaacccgggatggctctgactatgagggctggtgctggccaggctcagctggttaccctgacttcactaatcccacgatgagggcctggtgggctaacatgttcagctatgacaattatgagggctcagctcccaacctctttgtctggaatgacatgaacgaaccatctgtgttcaatggtcctgaggtcaccatgctcaaggatgcccagcattatgggggctgggagcaccgggatgtgcataacatctatggcctttatgtgcacatggcgactgctgatgggctgagacagcgctctgggggcatggaacgcccctttgtcctggccagggccttcttcgctggctcccagcgctttggagccgtgtggacaggggacaacactgccgagtgggaccatttgaagatctctattcctatgtgtctcagcttggggctggtgggactttccttctgtggggcggatgtgggtggcttcttcaaaaacccagagccagagctgcttgtgcgctggtaccagatgggtgcttaccagccattcttccgggcacatgcccacttggacactgggcgacgagagccatggctgttaccatctcagcacaatgatataatccgagatgccttgggccagcgatattctttgctgcccttctggtacaccctcttatatcaggcccatcgggaaggcattcctgtcatgaggcccctgtgggtgcagtaccctcaggatgtgactaccttcaatatagatgatcagtacttgcttgatccctgtgttccagcgtggagggacaatcgtgcctcgatggatgcgagtgcggcggtcttcagaatgtatgaaggatgaccccatcactctctttgttgcacttagccctcagggtacagctcaaggagagctctttctggatgatgggcacacgttcaactatcagactcgccaagagttcctgctgcgtcgattctcattctctggcaacacccttgtctccagctcagcagaccctgaaggacactttgagacaccaatctggattgagcgggtggtgataataggggctggaaagccagcagctgtggtactccagacaaaaggatctccagaaagccgcctgtccttccagcatgaccctgagacctctgtgttggtcctgcgcaagcctggcatcaatgtggcatctgattggagtattcacctgcgataacccaagggatrttctgggttagggggagggaaggggagcattagtgctgagagatattctttcttctgccttggagttcggccctccccagacttcacttatgctagtctaagacccagattctgccaacatttgggcaggatgagagggctgaccctgggctccaaattcctcttgtgatctcctcacctctcccactccattgataccaactctttcccttcattcccccaacatcctgttgctctaactggagcacattcayttaygaasaccaggaaaccacagggcccttgtcgccccttctctttcccttatttaggagccctgaactcccccagagtctatccattcatgcctcttgtatgttgatgccacttcttggaagaagatgagggcaatgagttaggkctccttttccccttccctcccaccagattgctctcccacctttcatttcttcctccaggctttactcccctttttatgccccaccgatacactgggaccaccccttaccccggacaggatgaatggatcaaaggagtgaggttgctaaagaacatccttttccctctcattctayccytttcctctccccgattccttgtagagctgctgcattctacctcctctgtccctcggcagaaagacgtttcyacacctcttaggggatgcgcattaaacttcttttgcccccttcttgtcccctttgaggggc

SEQ ID NO: 3963 - DNA, 3627 bp, Homo sapiens
aactaggatacgtggctgagcgcgcgcgatggggcgggaggtttggggtcaaggagcaaactctgcacaagatggcggcggtagcggcagtggcggcgcgtaggaggcggtcttgggcgtctttggtactggcttttttaggggtctgcctggggattacccttgctgtggatagaagcaactttaagacctgtgaagagagttctttctgcaagcgacagagaagcatacggccaggcctctctccataccgagccttgctggactctctacagcttggtcctgattccctcacggtccatctgatccatgaggtcaccaaggtgttgctggtgctagagcttcaggggcttcaaaagaacatgactcggttcaggattgatgagctggagcctcggcgaccccgataccgtgtaccagatgttttggtggctgatccaccaatagcccggctttctgtctctggtcgtgatgagaacagtgtggagttaaccatggctgagggaccctacaagatcatcttgacagcayggccattccgccttgacctactagaggaccgaagtcttttgcttagtgtcaatgcccraggactcttggagtttgagcatcagagggcccctagggtctcgcaaggatcaaaagacccagctgagggcgatggggcccagcctgaggaaacacccagggatggcgacaaggcaaaggagactcaggggaaggcagagaaagatgagccaggagcctgggaggagacattcaaaactcactctgacagcaagccgtatggccccatgtctgtgggtttggacttctctctgccaggcatggagcatgtctatgggatccctgagcatgcagacaacctgaggctgaaggtcactgagggtggggagccatatcgcctctacaatttggatgtgttccagtatgagctgtacaacccaatggccttgtatgggtctgtgcctgtgctcctggcacacaaccctcatygcgacttgggcatcttctggctcaatgctgcagagacctgggttgatatatcttccaacactgccgggaagaccctgtttgggaagatgatggactacctgcagggctctggggagaccccacagacagatgttcgctggatgtcagagactggcatcattgacgtcttcctgctgctggggccctccatctctgatgttttccggcaatatgctagtctcacaggaacccaggcgttgcccccactcttctccctcggctaccaccagagccgttggaactaccgggacgaggctgatgtgctggaagtggatcagggctttgatgatcacaacctgccctgtgatgtcatctggctagacattgaacatgctgatggcaagcggtatttcacctgggaccccagtcgcttccctcagccccgcaccatgcttgagcgcttggcttctaagaggcggaagctggtggccatcgtagacccccacatcaaggtggactccggctaccgagttcacgaggagctgcggaacctggggctgtatgttaaaacccgggatggctctgactatgagggctggtgctggccaggctcagctggttaccctgacttcactaatcccacgatgagggcctggtgggctaacatgttcagctatgacaattatgagggctcagctcccaacctctttgtctggaatgacatgaacgaaccatctgtgttcaatggtcctgaggtcaccatgctcaaggatgcccagcattatgggggctgggagcaccgggatgtgcataacatctatggcctttatgtgcacatggcgactgctgatgggctgagacagcgctctgggggcatggaacgcccctttgtcctggccagggccttcttcgctggctcccagcgctttggagccgtgtggacaggggacaacactgccgagtgggaccatttgaagatctctattcctatgtgtctcagcttggggctggtgggactttccttctgtggggcggatgtgggtggcttcttcaaaaacccagagccagagctgcttgtgcgctggtaccagatgggtgcttaccagccattcttccgggcacatgcccacttggacactgggcgacgagagccatggctgttaccatctcagcacaatgatataatccgagatgccttgggccagcgatattctttgctgcccttctggtacaccctcttatatcaggcccatcgggaaggcattcctgtcatgaggcccctgtgggtgcagtaccctcaggatgtgactaccttcaatatagatgatcagtacttgcttggggatgcgttgctggttcaccctgtatcagactctggagcccatggtgtccaggtctatctgcctggccaaggggaggtgtggtatgacattcaaagctaccagaagcatcatggtccccagaccctgtacctgcctgtaactctaagcagtatccctgtgttccagcgtggagggacaatcgtgcctcgatggatgcgagtgcggcggtcttcagaatgtatgaaggatgaccccatcactctctttgttgcacttagccctcagggtacagctcaaggagagctctttctggatgatgggcacacgttcaactatcagactcgccaagagttcctgctgcgtcgattctcattctctggcaacacccttgtctccagctcagcagaccctgaaggacactttgagacaccaatctggattgagcgggtggtgataataggggctggaaagccagcagctgtggtactccagacaaaaggatctccagaaagccgcctgtccttccagcatgaccctgagacctctgtgttggtcctgcgcaagcctggcatcaatgtggcatctgattggagtattcacctgcgataacccaagggatrttctgggttagggggagggaaggggagcattagtgctgagagatattctttcttctgccttggagttcggccctccccagacttcacttatgctagtctaagacccagattctgccaacatttgggcaggatgagagggctgaccctgggctccaaattcctcttgtgatctcctcacctctcccactccattgataccaactctttcccttcattcccccaacatcctgttgctctaactggagcacattcayttaygaasaccaggaaaccacagggcccttgtcgccccttctctttcccttatttaggagccctgaactcccccagagtctatccattcatgcctcttgtatgttgatgccacttcttggaagaagatgagggcaatgagttaggkctccttttccccttccctcccaccagattgctctcccacctttcatttcttcctccaggctttactcccctttttatgccccaccgatacactgggaccaccccttaccccggacaggatgaatggatcaaaggagtgaggttgctaaagaacatccttttccctctcattctayccytttcctctccccgattccttgtagagctgctgcattctacctcctctgtccctcggcagaaagacgtttcyacacctcttaggggatgcgcattaaacttcttttgcccccttcttgtcccctttgaggggc

SEQ ID NO: 3964 - DNA, 1364 bp, Homo sapiens
gccgggggaacgtgagggcgccgatggcgggggcctgggaggaagggaggaggagggaagcaggcgtcagcacgtgactcggccctgaacctgtgtccttagctggccccggctggctggtgcttaaaggcctgacctctcgggacacacccagccctgtggacccagacaccgtsgaggtgttgatgacctttgaacccgacccagctgatcttgccctatcaagcattcctggccacgagacctttgaccctcgaagacatcgcttctcagaagaggaacttaagccccagccaatcatgaagaaggcaagaaaaatccaggtgccggaggagcagaaggatgagaaatactggagccggcggtacaagaacaacgaggcagccaagcggtcccgtgacgcccggcggctcaaggagaaccagatatcggtgcgggcggccttcctggagaaggagaacgccctgctgcggcaggaagttgtggccgtgcgccaggagctgtcccactaccgcgccgtgctgtcccgataccaggcccagcacggggccctgtgaggctgccccacatccccacctggcggagctctcctccgccttgctgagacttacgccmtgttcccttcctgccctgtggcccacgggccggccagctgggtgccccagggacgtgataatgcagataaatacatttatatttttaagaaaaagcgagcctcccccctcccttgcgggggcggggagggttctctgtgtgtgtccccggcacgtcagggaccctatcctcccaccgcctccgttaacacgatcctgaataaatcttgagaaccccagagccagctgttgtggaagaagagggcagctcccwggcatactggctgcagcccgtgrgcagctccgggctgtcgtccatagagggcaggcgctgctggaagtgctggagtctgagtcctcccgcgggctgtcggatggaggaagggcagaaggtctgagaggaatgaagcgactgcctttattgcatagaccttttcaattgctttttagattggggacggaggacgcgcatgagacgaacaggggatatgaatttccccgcccccacccgcggggagaggaacattagtgcaaatcctagcgccggccccggggaacctgcccctcctgggctgattggccagctaaatggaggcaccggagtggatggggcgaggctgcgggccctgaccggccgactcactgaggcctaccccagccagtamattccaggtcctgtcattgggcgacgcgtaaaatagactccgccctcagccatcctggccgggtaggagcaggtggcaagcgtcaggactgagccctgccccgtaa

SEQ ID NO: 3965 - DNA, 2331 bp, Homo sapiens
agaggctggcggggctggacgcgccgggcggggacccggaggaggggcgcgcgctgtggcgtcgggtgttttggtttggatttttttttccgcgaaagaagtttgctttggccacgcctcaaggcggccgcctcctcctgccccctcctcsgcccctccgcgcacacctctcggtgcagattgcaaagcgccttccrttgcgagagctgcagattttgcaagagccaggctcgcccaccttgtagaaggagcgccttgagtcccctctcaccctcggttgcaaagagccgaccgcttgatctggacaccccctcgcccagattgcatgatctcccgggaccctcttgagttgcacgtttctgcaccgaggacctcaaatccccgtcgctcctaggatttgcagcgttctggatactggagggttgcaggctacactcgcccgcccctgggcagacactcgtccaaaccactggagtgtgctggtgactsgcaggccagcccttcgcctctccatgaacccgtgagcctgggggcaggtgccaggcgatggcgcggcctgtgagcgacaggaccccggcccctctgctgctgggcggcccggccgggacaccccctrgcgggggagcgctgcttgggttgcggagccttctgcaggggaccagcaagcccaaagagccggccagctgtctcctgaaggaaaaggagcgcaaggcggccctgcctgcagccacaacccctgggccaggcctggagactgcgggcccggcggatgccccggctggggcagtggtgggcggagggtccccgcgggggcgcccggggccggtgcccgccccgggtctgttggcgccactgctgtgggagcgcacgctgccgttcggcgatgtggagtacgtagacctggacgccttcctgctggagcacgggctcccgcccagcccgccgccccccggtggcccgtcgccggagccgtcgcccgcgcggacgcccgcaccctccccagggccgggttcgtgcggctcggcttccccccgctcctctcctgggcacgcccccgcccgggctgccctcgggaccgccagcggccaccgcgcaggcctgacctctcgggacacacccagccctgtggacccagacaccgtsgaggtgttgatgacctttgaacccgacccagctgatcttgccctatcaagcattcctggccacgagacctttgaccctcgaagacatcgcttctcagaagaggaacttaagccccagccaatcatgaagaaggcaagaaaaatccaggtgccggaggagcagaaggatgagaaatactggagccggcggtacaagaacaacgaggcagccaagcggtcccgtgacgcccggcggctcaaggagaaccagatatcggtgcgggcggccttcctggagaaggagaacgccctgctgcggcaggaagttgtggccgtgcgccaggagctgtcccactaccgcgccgtgctgtcccgataccaggcccagcacggggccctgtgaggctgccccacatccccacctggcggagctctcctccgccttgctgagacttacgccmtgttcccttcctgccctgtggcccacgggccggccagctgggtgccccagggacgtgataatgcagataaatacatttatatttttaagaaaaagcgagcctcccccctcccttgcgggggcggggagggttctctgtgtgtgtccccggcacgtcagggaccctatcctcccaccgcctccgttaacacgatcctgaataaatcttgagaaccccagagccagctgttgtggaagaagagggcagctcccwggcatactggctgcagcccgtgrgcagctccgggctgtcgtccatagagggcaggcgctgctggaagtgctggagtctgagtcctcccgcgggctgtcggatggaggaagggcagaaggtctgagaggaatgaagcgactgcctttattgcatagaccttttcaattgctttttagattggggacggaggacgcgcatgagacgaacaggggatatgaatttccccgcccccacccgcggggagaggaacattagtgcaaatcctagcgccggccccggggaacctgcccctcctgggctgattggccagctaaatggaggcaccggagtggatggggcgaggctgcgggccctgaccggccgactcactgaggcctaccccagccagtamattccaggtcctgtcattgggcgacgcgtaaaatagactccgccctcagccatcctggccgggtaggagcaggtggcaagcgtcaggactgagccctgccccgtaa

SEQ ID NO: 3966 - DNA, 1554 bp, Homo sapiens
cccgtcccctctttctctggatctccgccctgtgcctctcggactcggggtctcttctccatctctatctcccccacctcaccctcatcccaacccgtctttcccggcccgcaggtctcctgaaggaaaaggagcgcaaggcggccctgcctgcagccacaacccctgggccaggcctggagactgcgggcccggcggatgccccggctggggcagtggtgggcggagggtccccgcgggggcgcccggggccggtgcccgccccgggtctgttggcgccactgctgtgggagcgcacgctgccgttcggcgatgtggagcctgacctctcgggacacacccagccctgtggacccagacaccgtsgaggtgttgatgacctttgaacccgacccagctgatcttgccctatcaagcattcctggccacgagacctttgaccctcgaagacatcgcttctcagaagaggaacttaagccccagccaatcatgaagaaggcaagaaaaatccaggtgccggaggagcagaaggatgagaaatactggagccggcggtacaagaacaacgaggcagccaagcggtcccgtgacgcccggcggctcaaggagaaccagatatcggtgcgggcggccttcctggagaaggagaacgccctgctgcggcaggaagttgtggccgtgcgccaggagctgtcccactaccgcgccgtgctgtcccgataccaggcccagcacggggccctgtgaggctgccccacatccccacctggcggagctctcctccgccttgctgagacttacgccmtgttcccttcctgccctgtggcccacgggccggccagctgggtgccccagggacgtgataatgcagataaatacatttatatttttaagaaaaagcgagcctcccccctcccttgcgggggcggggagggttctctgtgtgtgtccccggcacgtcagggaccctatcctcccaccgcctccgttaacacgatcctgaataaatcttgagaaccccagagccagctgttgtggaagaagagggcagctcccwggcatactggctgcagcccgtgrgcagctccgggctgtcgtccatagagggcaggcgctgctggaagtgctggagtctgagtcctcccgcgggctgtcggatggaggaagggcagaaggtctgagaggaatgaagcgactgcctttattgcatagaccttttcaattgctttttagattggggacggaggacgcgcatgagacgaacaggggatatgaatttccccgcccccacccgcggggagaggaacattagtgcaaatcctagcgccggccccggggaacctgcccctcctgggctgattggccagctaaatggaggcaccggagtggatggggcgaggctgcgggccctgaccggccgactcactgaggcctaccccagccagtamattccaggtcctgtcattgggcgacgcgtaaaatagactccgccctcagccatcctggccgggtaggagcaggtggcaagcgtcaggactgagccctgccccgtaa

SEQ ID NO: 3967 - DNA, 1345 bp, Homo sapiens
ctcctcctctttccagcgagtagctcttagactctaacttgagagcttttcagtgcagtagattctttttctctggacagtctggggtctaagcttaggtcgtggattcggcctgacctctcgggacacacccagccctgtggacccagacaccgtsgaggtgttgatgacctttgaacccgacccagctgatcttgccctatcaagcattcctggccacgagacctttgaccctcgaagacatcgcttctcagaagaggaacttaagccccagccaatcatgaagaaggcaagaaaaatccaggtgccggaggagcagaaggatgagaaatactggagccggcggtacaagaacaacgaggcagccaagcggtcccgtgacgcccggcggctcaaggagaaccagatatcggtgcgggcggccttcctggagaaggagaacgccctgctgcggcaggaagttgtggccgtgcgccaggagctgtcccactaccgcgccgtgctgtcccgataccaggcccagcacggggccctgtgaggctgccccacatccccacctggcggagctctcctccgccttgctgagacttacgccmtgttcccttcctgccctgtggcccacgggccggccagctgggtgccccagggacgtgataatgcagataaatacatttatatttttaagaaaaagcgagcctcccccctcccttgcgggggcggggagggttctctgtgtgtgtccccggcacgtcagggaccctatcctcccaccgcctccgttaacacgatcctgaataaatcttgagaaccccagagccagctgttgtggaagaagagggcagctcccwggcatactggctgcagcccgtgrgcagctccgggctgtcgtccatagagggcaggcgctgctggaagtgctggagtctgagtcctcccgcgggctgtcggatggaggaagggcagaaggtctgagaggaatgaagcgactgcctttattgcatagaccttttcaattgctttttagattggggacggaggacgcgcatgagacgaacaggggatatgaatttccccgcccccacccgcggggagaggaacattagtgcaaatcctagcgccggccccggggaacctgcccctcctgggctgattggccagctaaatggaggcaccggagtggatggggcgaggctgcgggccctgaccggccgactcactgaggcctaccccagccagtamattccaggtcctgtcattgggcgacgcgtaaaatagactccgccctcagccatcctggccgggtaggagcaggtggcaagcgtcaggactgagccctgccccgtaa

SEQ ID NO: 3968 - DNA, 1940 bp, Homo sapiens
gggaaatcccttatttggccccacccacatgcagattggtccattttacagagagctgattggtccattttacagagtgctgattggtccgttttacagagtgctgattggtctgtttttacagagtgctgattggtgcgtttacaaacctttagctagacacagagcgctgatttgtgcatttacaatcctttrgctaggcagaaaagttctccaagtcctcacctgacccagaagcccagccagcttcacctctcattttgatcaggagccaagacwgtggtcctgccaaatacacgggtcctgttttctgtttgaactctttagtgctactcatccttcaagctatttcctatactgccaccagagtgaccctcaaaccccaaagtcgtgtcaaataaaacctctaaatcaattccccaccaatctacttatagaatcctgactccccagggtatgaattcactctctagacagtaatggttacttccagaatcccttccatctctgacccatgacctgtgctttgggccatctctcccagtggtttatatcatctgcctgctttaggaatacacaaactatgaggaaaacaagtgcaaaacaaaggagtaatggcacctgaaattttggtgtcttccgagtgctctcttgacatacactgagatcagcgaattttcctaacagacagcttaggggcagccagaggctctttttccccctcctttcttccactyatcctctgaatatctcctcatctttccagaaaccactcaatgtccattgtattctwctgctgcccaactaggaggaaatttctacttctttctctgagctcctttagttctttgcatccttgattctgctcatatctggtccagagcctaccaggtgctcaggtgctcctggggctgacccagaggttgttgggaggtcagtggggacagatttagggacagtgtcacattccgctctgccatcccatcacctcagaaagactccagctacccagttggagtctaataaatgctgatgtatccagctgaagcctggacagtgacccagttccagctgtggggaagatgactgcttgcccgcggccagctggggccatgcacaaaactgggaggccgcatctgtgcagggagcttgtgtctgagggtgttgacagctgttttctgcctcaggagaaactgaaaccagaatacctgcaggmactccctgaaawgctraagctctactcacagtttctggggaagcagccatggtttcttggggacaagatcacctttgtggatttcatcgcttatgatgtccttgagagaaaccaagtatttgagcccagctgcctggatgccttcccaaacctgaaggacttcatctcccgatttgagggcttggagaagatctctgcctacatgaagtccagccgcttcctcccaagacctgtgttcwcaaagatggctgtctggggcaacaagtagrgccttgaaggccaggaggtgggagtgaggagcccatactcagcctgctgcccaggctgtgcagcgcagctggactctgcatcccagcacctgcctcctcgttcctttctcctgtttattcccatctttactcccaagacttcattgtccctcttcactccycctaaacccctgtcccatgcaggccctttgaagcctcagctacccactatccttcgtgaamatcccctyccatcattacccttccctgcactaaagccagcctgaccttccttcctgttagtggttgtgtctgctttaaagggcctgcctggcccctcgcctgtggagctcagcccygagctgtccccgtgttgcatgaaggagcagcattgactggtttacaggccctgctcctgcagcatggtccctgccttaggcctacctgatggaagtaaagcctcaaccacatttgct

SEQ ID NO: 3969 - DNA, 1204 bp, Homo sapiens
aaggcttcccctctaccctctctgkgcctctcacaaacgctgagccccgccccgctgaggcctgtctgcagaatccacagcaaccagcaccatgcccatgacactggggtactggaacatccgcgggctggcccattccatccgcctgctcctggaatacacagactcaagctacgaggaaaagaagtacacgatgggggacgctcctgaytatgacagaagccagtggctgaatgaaaaattcaagctgggcctggactttcccaatctgccctacttgattgatgggactcacaagatcacccagagcaaygccatcctgcggtacattgcccgcaagcacaacctgtgcggggaatcagaaaaggagcagattcgcgaagacattttggagaaccagtttatggacagccgtatgcagctggccaaactctgctatgacccagattttgagaaactgaaaccagaatacctgcaggmactccctgaaawgctraagctctactcacagtttctggggaagcagccatggtttcttggggacaagatcacctttgtggatttcatcgcttatgatgtccttgagagaaaccaagtatttgagcccagctgcctggatgccttcccaaacctgaaggacttcatctcccgatttgagggcttggagaagatctctgcctacatgaagtccagccgcttcctcccaagacctgtgttcwcaaagatggctgtctggggcaacaagtagrgccttgaaggccaggaggtgggagtgaggagcccatactcagcctgctgcccaggctgtgcagcgcagctggactctgcatcccagcacctgcctcctcgttcctttctcctgtttattcccatctttactcccaagacttcattgtccctcttcactccycctaaacccctgtcccatgcaggccctttgaagcctcagctacccactatccttcgtgaamatcccctyccatcattacccttccctgcactaaagccagcctgaccttccttcctgttagtggttgtgtctgctttaaagggcctgcctggcccctcgcctgtggagctcagcccygagctgtccccgtgttgcatgaaggagcagcattgactggtttacaggccctgctcctgcagcatggtccctgccttaggcctacctgatggaagtaaagcctcaaccacatttgct

SEQ ID NO: 3970 - DNA, 1728 bp, Homo sapiens
aaggcttcccctctaccctctctgkgcctctcacaaacgctgagccccgccccgctgaggcctgtctgcagaatccacagcaaccagcaccatgcccatgacactggggtactggaacatccgcgggctggcccattccatccgcctgctcctggaatacacagactcaagctacgaggaaaagaagtacacgatgggggacgctcctgaytatgacagaagccagtggctgaatgaaaaattcaagctgggcctggactttcccaatctgccctacttgattgatgggactcacaagatcacccagagcaaygccatcctgcggtacattgcccgcaagcacaacctgtgcggggaatcagaaaaggagcagattcgcgaagacattttggagaaccagtttatggacagccgtatgcagctggccaaactctgctatgacccagattttgagaaactgaaaccagaatacctgcaggmactccctgaaawgctraagctctactcacagtttctggggaagcagccatggtttcttggggacaagatcacctttgtggatttcatcgcttatgatgtccttgagagaaaccaagtatttgagcccagctgcctggatgccttcccaaacctgaaggacttcatctcccgatttgaggaaaagtgtaatgttggttggagctcgagaaggaatctggatactgtgtgccggaccagccaaagaatcctgtgtcaaaaccgagagaacgaataagccttcatcaccatggcacatttatataaaaagaaagggagagatgttgcgggaagtcagggaccccgaatggagggactgactggagccgcggcagaggaacataaattgcaaatatttcattttaatatggacatttatcagttcccaaattattactttttacatttcttacgcctgtcttactttaatctcttaatcctgttatcttcataagctgaggatatatgtcacctcaggaccactgtgataattgtgttaactgtacaaattgattgtaaaacatgtgtgtttgcacaatatgaaatcagtgcaccttgaagaagaacagaataacagtgatttttaggcaacaagagaagacaaccataaggtctgactgcgtgcagggtcaggcaaaatagagccatatttttcttcttgcagggagcctataaatggacatggaagtagggaagatattgctaaattcttttcctagcaaggaatattactattaatactctgggaaaggaatgcattcctggggggaggtctataaacggccrctctgggaatgtctgtcctatgcagttgagacaaggactgaagtacaccctggtctcctgcagtaccctcaggcttactagggtggggaaaaacctggccctggcaaatctgtggtcagactggttctctgctcttgaaccctgtgttctgttgtttaagatgtttatcaagacaatacgtgcactgctgaacatagacccttatcaggagttctacttttgcccttgtcctgtttcctcagaagcatgtgatctctgttctgctttttgccccttaaagcatgtgatctttgtacctaccccccgttcgtacaccccctccccttttgcaatccttaataaaarcttgctggttttgaggctcgggccggcatcacggtcctactgatatgtgatgtcacccctggcggcccagctgtaaaattc

SEQ ID NO: 3971 - DNA, 1615 bp, Homo sapiens
  misc_feature (1)...(1615): n = A,T,C or G
cattaggagacagcaatcaaatatatgactgatggatgtttactgaaacatattctgggagacccaantcttaccaaattcagwgtcattattttggatgaagcccatgaaagaactctaactacagatatcttatttggtctattgaagaagctatttcaggagaagtctcctaataggaaggagcatttaaaagtggtggtaatgtcagcaactatggaattagccaagctctctgcattctttggaaattgtccaatatttgatatacctggaaggctttatccagtcagagagaaattctgcaatttgattggtccacgagacagagaaaatactgcgtatattcaagcgattgtgaaagtcaccatggatatccatttgaatgaaatggctggagacatcttggtttttctgactggccagtttgaaatagaaaaaagttgtgagttactttttcagatggcagagtctgttgattatgattatgatgttcaagataccatcctcgatggcttgttaatattgccgtgttatggatcaatgacaactgatcaacagaggaggatatttttgccaccaccacctggaattagaaaatgtgtcatatccaccaatatttctgcaacgtctttgacaatagatggaatcagatatgtggtagatggtggcttcgtgaagcagttaaatcacaaccccagattagggttggacatcctggaggtggttccaatttcaaagagcgaggcattacagcgaagtggccgagctggcaggacttcttcaggaaaatgctttcggatctatagtaaagatttttggaaccagtgtatgcctgaccatgtgatccctgaaattaagagaactagtttgacatctgtagttctgaccttaaagtgccttgccatacacgatgtcataaggtttccctatttggatccacctaatgagagacttattttagaagctcttaaacarctttaccagtgtgatgctattgacaggagtggccatgtcaccagattgggtttgtctatggtggagtttcctttgcctccacatctgacatgtgcagtaataaaagctgcttccctggattgtgaagatytactacttccaatagcagcaatgttgtctgtggaaaacgtcttcattagacctgttgatccagagtaccagaaggaagcagaacagagacatcgagaattggcagctaaagctggaggatttaatgactttgcaactttagctgtcatctttgaacaatgcaaatcaagtggagctccagcttcatggtgccaaaaacactggattcattggaggtgcttattttctgcatttcgtgtggaagctcaacttcgagaactaatcaggaagcttaaacagtggcttccggaagttcctggtccacaacgtcaaggagctggaagtgctgctgatgtgcaacaaatcttactgtgccgagatcactcaccatgtttcctccaagaaccgcaaagccatcgtggaaagagctgcccaactggccatcaaagtcaccaaccccaatgccaggctgcgcagcaaagaaaatgagtagacagctcgtgtgcatgttttctgtttaaataaaagt

SEQ ID NO: 3972 - DNA, 3034 bp, Homo sapiens
agctggttcccgtggggcctcatgggatggttgtcgtatccttctgaggtcctttaaggaccgtctcggacctgggaacccccggaggaaaggtcaccccggtcttctcccacgccctacctcagtgccgcccccaagcgccccgcagcccttagtatctagaggattaacctccaagggcgtcccgggcctcgccttggcgtccggcccggcctgggcccttagggtctgcttagctcttccccaagactcgtgccattcccgagggaatctttgtcggcatcctggtcactgtgggggtttgaggtcgtcccggaagacttcagaaccaggcgaacctagacgaaggcggctggaatgaaccaggttaacattcaagatggtacatgctgaagccttttctcgtcctttgagtcggaatgaagttgttggtttaattttccgtttgacaatatttggtgcagtgacatactttactatcaaatggatggtagatgcaattgatccaaccagaaagcaaaaagtagaagctcagaaacaggcagaaaaactaatgaagcaaattggagtgaaaaatgtgaagctctcagaatatgaaatgagtattgctgctcatcttgtagaccctcttaatatgcatgttacttggagtgatatagcaggtttagatgatgtcattacggatctgaaagacacagtcatcttacctatcaaaaagaaacatttgtttgagaattccaggcttctgcagcctccaaaaggtgttcttctctatgggcctccaggctgtggtaaaacgttgattgccaaggccacagccaaagaagcaggctgtcgatttattaaccttcagccttcgacactgaccgataagtggtatggagaatctcagaaattggctgctgctgtcttctcccttgccataaagctacaaccatccatcatctttatagatgaaatagactcctttctacgaaaccgttcaagttctgaccatgaagctacagccatgatgaaagctcagtttatgagtctctgggatggattggatactgatcacagctgccaggtcatagtaatgggagctaccaatcgtcctcaggaccttgactcggctataatgagaagaatgcctacaagatttcatatcaaccagcctgctttaaaacagagagaagcaatcctgaaactcatcttgaaaaatgaaaatgtggataggcatgtagacctgctagaagttgcccaggaaactgatgggttttcaggaagtgacctaaaagagatgtgtcgagatgctgccctcctctgtgttagagaatatgttaattctacatcagaagaaagccatgacgaagatgaaattcggcctgttcaacagcaggacctgcatcgggcaattgaaaagatgaagaaatcaaaggatgcagcatttcagaatgttttaacacatgtttgtttagattaagagtaaagatcatttgtacagttcagtgatctagtttggtgtgtcctcttatcagttagtggaaatagaacggaaagagtgctctttaaacaatgagggagctcagtgtttatggttttatactctgaattctaagttattgagatatagttgttacataggtggtattactgttggtcaaaaatcatgaggaggaacagttgaatccagcctgaacgtgggtgcttgtgtttgaccttttcagccatatattgtacagccttatagaatctaagctggtcttaaagtcataaatgattcattgggtcattagtgagaaacggggatgtggttaggtgctggttcctagacatgtgagtatgcgtttgtgtgtgtgcgtgtatgtatgtgtatattaaatgtatatatccacacattttatattgacattctgtagatatgtttgaatatagaaactttttttaccccaactactgaatccaggagtaccaaataatatatagtaaaactaagatttaaggttgtgtcaaaaaggtacagtgattcagccatttccatttgtcatttgtttcaaccttttttaagttgagtgtttttatttctgcagttattagttggatcctccacatcttgcatatatacatgggctcaattattatgtttgtcaggataatcaaatgaaaatactagttcagtgatcagcattgaatggttgttaggcagccatgtgctcaacactgatttcacctcttgagtataaactttttaaatttaaattggtttacatgaaagtggattaaaaggcctttcaaaagaatgggtttgaaaaacctcagtaccctttaatacatgtacatttctttccttttttcatttaatgtaacatgtctgttgtaactatgtttcttaaatattattttaaggttatgtgttctttaattatggtcaaatataatttggtcaccaaaaatgaaataatagtttaaaacaartagctgttactaagtgtgctaaaaatactcattttataattaattttagttttcttagtatattattataaattgtgccctaagtcaggtacaaatgtacacatcaaaatgcccatattgtatctatctgtagtcgtttaatgtgaattatatgtgaatttttttcaaaattttactaaccagaattctgttataggcacctaaccacgcagcatgaggaaaacggcacaacacaatcttgaggtgccttctgaatcatcagattaaattatgcttcatatgtttttgcttttactgtatttctttaaaaactctaaatctttattcatgtgtyactggattaatttatctgataatgtgtctcacaagaatctgttagatcgtttattcttcagttgtactttgaatggtggggtggaagtttcaggtgaacaatggataacaaaaagcaagttatggaagattgtgaagaggatggaaaaactgaatacaagataccaaaaatgaaaaaaagtgtcccatttttaataactatattctattattttataaatgtgtaataaaggggtccctcttt

SEQ ID NO: 3973 - DNA, 4793 bp, Homo sapiens
gaggaggcagctcgcctcagctgcgytgtgcacacctcgcccgggggaggacgcagacccgggcaggcggcagggatgtcggcgaaggagaggccaaagggcaaagtgatcaaggacagcgtcaccctcctgccctgcttttatttcgtcgagttgcctatattggcatcatcggtggttagcctctatttcctcgaactcacagatgtcttcaaacctgtgcactctggatttagctgctatgaccggagtcttagcatgccrtacattgaaccaacccaggaggcaattccattcctcatgttgcttagcttggcttttgctggacctgcaattacgattatggtaggagaaggaattctctactgttgcctctccaaaagaagaaatggggtcggactagagcccaacattaatgctggaggctgcaacttcaattccttcctcagacgagctgtcagattcgttggtgttcatgtatttggattatgctctacagctctcattacagatatcatacagctgtccacaggatatcaagcaccttactttctgactgtgtgcaaaccaaactatacctctctgaatgtatcttgcaaagaaaattcctacattgtggaagatatttgctcaggatctgacctcacagttatcaacagtggcagaaagtccttcccttctcaacatgcaacccttgctgcctttgcagctgtgtatgtttcgatgtacttcaattccacattaacggattcctctaagcttctgaaacctctcttggtcttcacatttatcatctgtggaataatctgcgggctaacacggataactcagtataagaaccacccagttgatgtctattgtggctttttaataggaggaggaattgcactgtacttgggcttgtatgctgtggggaatttcctgcccagtgatgagagtatgtttcagcacagagacgccctcaggtctctgacagacctcaatcaagatcccaaccgacttttatctgctaaaaatggtagcagcagtgatggaattgctcatacagaaggcatcctcaaccgaaaccacagagatgctagctctctgacaaatctcaaaagagcaaatgctgatgtggaaatcattactccacggagccccatggggaaggagaacatggttaccttcagcaataccttgccgcgagccaataccccatctgtagaagaccctgtcagaagaaatgcgagcattcatgcctctatggattccgctcgatcaaagcagctcctcacccagtggaagaataagaatgaaagtcgaaagttgtccttgcaagttatagagcctgagcctgggcagtcaccacccagatccatagaaatgaggtcaagctcagagccatcgagggtaggggtgaatggagaccaccatggtcctggcaatcagtacctcaaaatccagcctggcgctgtccccggatgtaacaacagcatgcctggagggccaagagtgtccattcagtcccgtcctgggtcctcacagttggtgcacatccctgaggagactcaggaaaacataagcacctcccccaaaagcagctctgctcgggccaagtggttaaaagctgctgaaaagactgtggcctgtaacagaagcaacagccagccccgaatcatgcaagtcatagccatgtccaagcagcagggtgtcctccaaagcagccccaagaacactgaaggcagcacggtctcctgcactggctccatccgctataaaaccttgacagaccatgagcccagtgggatagtgagggttgaggctcacccagagaacaacaggcccatcatacagatcccgtccactgaaggtgaaggcagtggctcctggaagtggaaagcccctgaaaagggcagccttcgccaaacttacgagctcaacgatctcaacagggactcagaaagctgtgagtctctgaaagacagctttggttctggagatcgcaagagaagcaacattgatagcaatgagcatcaccaccacggaattaccaccatccgcgtcaccccagtagagggcagcgaaattggctcagagacgctgtccatttcttcttcccgcgactccaccctgcggagaaagggcaatatcattctaatccctgaaagaagcaacagccccgaaaacactagaaatatcttctacaaaggaacctcccccacacgggcttataaggattgagtgatgtccattccatcattagggctactcgcaaaagaccatatgttgattctacctgtgttctgttccagcgaattgggaagtctcaccaagctagattgtctaccatcagcccagaactctgtaacttttcagaactgctatactcaaacttgcagatctcacatcaaggagagggaaaagcacaatgcaagaacctaactaacgtgatgatatgaagagttttcttaagacctgtcgtcaaacttaaaaggttttgcagagggcagtatcaaaagaaagtggttttcttcaaatgtatactattttacttcctgaatgtgccaactttggggatttttctttatagtgagctgtgggaacccagaacacacacgttttccctacagcagaggccatgcagtattatatattcattttgcagaatctgcacctacagctcaatacgggtggtgctgattattatagtacatataccatgtaaactctcaaactctatttagctgtgaaatagtggtgtgcaattccttgttaaagaaatgctactttattaagaagatgctggctgctttgtgttagaataggacaccccgcagcttctctgtagtggctctgtcacagtcaaaaaatgaaaaggtttttgtgcgtttcttcaaaattctgctttcttcaacatcaaaaattgtgtagaaatattttcagtgaaagggaataactagtacttttctgcatagtttttcttctgcttactttttatttaagtataggtactgctaatgaatctgttttcttagtgagtaaatttgcataattttataaatattattttagagaatcttttgaaattgttgtgatcatattttgctttctatggcttctccttaacttattgattaattttttgaagttatagatatgttctcctattttaaaagcaaaaataacaattgacattccttgagcaaaatatactgctgtgaatttgcaaacaagaaatctgagccaaaacttgacattgtgggttacattgccagaaatgttggtcaagtttgcccttagatgtctacaactagctggcataggttgccatcttaacaagtaatctaaaagtcccattcggttctacattattaactttttttttctatatcctgatgaccagtaaattagagccacactggttaagtttgactcgtctctaaaacgtttttgttaattggacaccaagaggaagaatctgaaaaaaaaatgcatgttggtaagtaaaagtatctcacggtacaaattaagaatgactttcttcaaaatatctgaataggtgcagttttagtttaacatgcaaacaaccattgttgctacctatcctgaatcaagccttgagcctaaatcaaagcaaaccaataccattgataagaagaagataaaaacaaaatattttggagtgttttccaacttaaagtatgaagacatactcagttcttggaacttagtattaaaccttttttatgccatttcataagaattccgatatatacttgatgattgccaaggggatgaaaggaaacaacagagatggttgatctgatcttagctcactttccaataacagaaggagttgtttacagatgaatagtatcacatcattatcaatttccacatgaaaaaggtggagctttctagaaaaaccaacctctaaggcattaggaatttagctgaaaccagcagaattgaaaactctggcaataaaacatggactcaaccatatcccttctggcaatttccttctcagagaggggagtgggaataaaatgttgccttccccacttctcaccaccaccgccatcatgacgctcatactggcttttgcctgtttgtagaggaaaaggtgggctggttttagtactctgaaggacaaaaacaagcaaacaaaaacccctgctgcagcatttcaggtgcagtatgatatttcctaatctttcctatttcttaacaaaagattttaaagtacttctctagtcattgaagtttttttttctttacataaatattgatatattctttttctactcaaagtgccaaaggctacagtttttaatgacttaacaaattgtaccacattgttaaggacatataatgatagacactagaactcagacctctgcatgtatatttgataacatgtcttttgtaaaacaaaaattacaaaaaaatttgtttacattccactggtaccttaatttaaaataaatcagactaaaaggtggtatctcttcttagtgttctatttatcttatttgctaatgggagcacttcttcctttgttaggctgtgctttactgataaamccaagtattgaataaagagagttaattatctttttaaagtaaataaaattatgaaaatatatatagtatatataaagtactgtgtttaaaaaaatgttatgcaatgttttccaaactgataaagtttgtaaagtgctataaatgtattttgttaagtacagataaaagctattgtgtgagtatattgtgctaaaatcatagaaataaagattagatttcttcatc

SEQ ID NO: 3974 - DNA, 2482 bp, Homo sapiens
atttcgcccttgtcgcagctgaaccgccgactacgagctcctgcaccgcgcacacaccccgcgcgcttcgctctcggcctcgcccggccaccgtcgctctctagaacgccgcgcccgtgacccggaagagcattctccttagcaactgcgggactgcggcggcgccggcctccggggagaaacgcgaatgacaacagagctgctcaaggcgggaactctgagctaagcagtggaggtttctctggatctggagagaagagtgaccttggagccaataatgagccatcctgactacagaatgaacctccggyccctggggacccccagaggtgtgtctgctgtggctggtccacatgacattggtgcttcgccaggtgacaaaaagtcaaagaacaggtccacacgagggaagaaaaagagcatatttgaaacttacatgtccaaggaggatgtttcagaaggcttgaagagaggaacactcatccagggtgtattgagaattaatccaaagaagtttcatgaagccttcattccttccccggatggtgatcgagacatttttattgatggggttgttgctcgtaatagagccttaaatggggatctggtggtcgtgaaactgcttcccgaggagcattggaaggtagttaaaccagagagcaatgacaaagaaacagaagctgcgtatgaatcagatatccccgaggagctctgtggacaccatctcccgcarcagtccctgaaaagctataatgacagtcctgatgtcattgtagaggctcagtttgatggcagcgactcagaagatggacatggcatcacacaaaatgtgctggttgatggtgttaagaaactctcagtttgtgtttctgagaaaggaagagaggatggtgatgcaccggttacaaaagatgagaccacctgcatttcacaagacacaagagctttatcggagaaatccctgcaaagatcagcaaaggtggtttacatcttggagaaaaaacattctcgagcagcaaccggcttcctcaaactcttggctgataagaacagcgaactgtttaggaaatacgccctgttttctccctcagaccaccgagtgcctagaatttatgtgcctctcaaggactgtccccaggactttgtggcacggcctaaagattatgccaacacactgttcatctgccgcattgtggactggaaggaggactgcaattttgccctggggcagctggctaagagtcttgggcaggctggtgaaattgagcctgaaacagaaggaatactaacagagtatggcgtggatttctctgatttctcttcagaagttctagaatgtcttcctcaaggcctgccatggacaattccaccagaggagttcagcaagagaagggatttaagaaaagactgtatcttcaccattgacccatcaaccgcccgagacctcgatgatgccctctcctgcaagccactcgctgacggcaacttcaaagtgggagttcacattgctgacgtgagttactttgttccggagggatctgatctggataaagtggctgccgagagggctacaagcgtctacttggttcaaaaggtggtccccatgcttcccaggctgctgtgtgaggagctgtgcagcctcaaccccatgtccgacaagctgaccttctctgtgatctggacactgactccagagggcaagatccttgatgaatggtttggccggaccatcatccgctcctgcaccaaacttagctacgagcatgcacagagcatgattgaaagcccaactgagaaaatccctgcgaaagagctgccccccatttccccagagcatagcagcgaggaggtacaccagcagaacgcagacaaggatggggctgcccatcttcaggcctctcacagcccctctgctgaagatgcagaagcacagccctccacagaggaacgcctgcctgagactcggggcatatgtgacagggatccagacacacgactgtttttccttcagcaacagagccgtgtattggaagcaaagccccaaaacacgataagagtagaggagcagacaacccagttgcagatttgaagaagcatgtggaattccttgtggcggagaaggaaagattatggaaagaaagtaaacaggtaaaggctgaaaaggccagacttctaaaaggtccagtagaaaaggagctggatgtgggtgctgattttgtggaaaagtcagagttacggagctcgcctctgcattcagaaactgctataccctcttcagccttgcagaggtttgcagcagatgccaggaaagccaagtacattccaatacccaatcttytccctcagattttccatctccagagcttccctttatggagctttctgaggatattctgaaaggatttatgagtaactaaaatggaaggccatagaagaagggagaagaggaaataatactaagtcatacagttaatccagcaac

SEQ ID NO: 3975 - DNA, 2127 bp, Homo sapiens
cgasaccccgcgcgtgtgggagcgggcgtgaagaggggagcaggccgtgcctgactggcgtgtgcttgcagcgggctcgcaycgacgaggtgcctgccggaggaagccgctccgaggcggaagatgaggacgacgaggactacgtgccctatgtgccgttacggcagcgccggcagctactgctccagaagctgctgcagcgaagacgcaagggagctgcggaggaagagcagcaggacagcggtagtgaaccccggggagatgaggacgacatcccgctaggccctcagtccaacgtcagcctcctggatcagcaccagcaccttaaagagaaggctgaagcgcgcaaagagtctgccaaggagaagcagctgaaggaagaagagaagatcctggagagtgttgccgagggccgagcattgatgtcagtgaaggagatggctaagggcattacgtatgatgaccccatcaaaaccagctggactccaccccgttatgttctgagcatgtctgaagagcgacatgagcgcgtgcggaagaaataccacatcctggtggagggagacggtatcccaccacccatcaagagcttcaaggaaatgaagtttcctgcagccatcctgagaggcctgaagaagaaaggcattcaccacccaacacccattcagatccagggcatccccaccattctatctggccgtgacatgataggcatcgctttcacgggttcaggcaagacactggtgttcacgttgcccgtcatcatgttctgcctggaacaagagaagaggttacccttctcaaagcgcgaggggccctatggactcatcatctgcccctcgcgggagctggcccggcagacccatggcatcctggagtactactgccgcctgctgcaggaggacagctcaccactcctgcgctgcgccctctgcattgggggcatgtccgtgaaagagcagatggagaccatccgacacggtgtacacatgatggtggccaccccggggcgcctcatggatttgctgcagaagaagatggtcagcctagacatctgtcgctacctggccctggacgaggctgaccgcatgatcgacatgggcttcgagggtgacatccgtaccatcttctcctacttcaagggccagcgacagaccctgctcttcagtgccaccatgccgaagaagattcagaactttgctaagagtgcccttgtaaagcctgtgaccatcaatgtggggcgygctggggctgccagcctggatgtcatccaggaggtagaatatgtgaaggaggaggccaagatggtgtacctgctcgagtgcctgcagaagacacccccrcctgtactcatctttgcagagaagaaggcagacgtggacgccatccacgagtacctgctgctcaagggggttgaggccgtagccatccatgggggcaaagaccaggaggaacggactaaggccatcgaggcattccgggagggcaagaaggatgtcctagtagccacagacgttgcctccaagggcctggacttccctgccatccagcacgtcatcaattatgacatgccagaggagattgagaactatgtacaccggattggccgcaccgggcgctcgggaaacacaggcatcgccactaccttcatcaacaaagcgtgtgatgagtcagtgctgatggacctcaaagcgctgctgctagaagccaagcagaaggtgccgcccgtgctgcaggtgctgcattgcggggatgagtccatgctggacattggaggagagcgcggctgtgccttctgcgggggcctgggtcatcggatcactgactgccccaaactcgaggctatgcagaccaagcaggtcagcaacatcggtcgcaaggactacctggcccacagctccatggacttytgagcygacagtcttcccttctctccaagaggcctcagtccccaagactgccaccagtctacacatacagcagccccctggacagaatcagcatttcagytcagctggcctggratgggccaggctggtcctggctgcctgttccctgtgctcttcagaattactgtttttgtttccttttaccccagctgccattaaagcccaaacctctagccca

SEQ ID NO: 3976 - DNA, 2965 bp, Homo sapiens
cgcgcatgcgtgcagcaaagaatggaggagtcggaacccgaacggaagcgggctcgcaycgacgaggtgcctgccggaggaagccgctccgaggcggaagatgaggacgacgaggactacgtgccctatgtgccgttacggcagcgccggcagctactgctccagaagctgctgcagcgaagacgcaagggagctgcggaggaagagcagcaggacagcggtagtgaaccccggggagatgaggacgacatcccgctaggccctcagtccaacgtcagcctcctggatcagcaccagcaccttaaagagaaggctgaagcgcgcaaagagtctgccaaggagaagcagctgaaggaagaagagaagatcctggagagtgttgccgagggccgaggtatggttgtagccaggatagtgagaaggtggactgagtcttctcctcccagccccaggcatgttatatctcaagggatctggcttctcagaagcaggagccagccctgagccatgtctctctcttcagcattgatgtcagtgaaggagatggctaagggcattacgtatgatgaccccatcaaaaccaggtatgtctgtacagtctgcagttgcccttgcttaggatggtacatgcagggatgctcccaggccagctattcccagggctctcttgatccctgttacccatccacagctggactccaccccgttatgttctgagcatgtctgaagagcgacatgagcgcgtgcggaagaaataccacatcctggtggagggagacggtatcccaccacccatcaagagcttcaaggaaatgaagtttcctgcaggtagtcaggggctggagagagataccacacttttataatcaaatgcctgtgaggttatgtcctggctcccactgagctcagccacatctgcattggatccagtcactggggctggagggatttgaggaggagtttctttaggttccttgttgcctcagctgtacgtgttcattgttctctgctgttacaaagcttcaggaggaaagtgccattgggcatagacactgggtacaaatcctggctgcacctagcctgtgggccttggacaagtctctttttttctttttttttttccactctctctctctctctctgagcctcagtttcatcatctgcaacttgtaggggtagtgccagttttacaggctttggggctctgagaaagtacctgtgagtcatgaagacgatgtcggttggttttcatagccatcctgagaggcctgaagaagaaaggcattcaccacccaacacccattcagatccagggcatccccaccattctatctggccgtgacatgataggcatcgctttcacgggttcaggcaagacactggtgttcacgttgcccgtcatcatgttctgcctggaacaagagaagaggttacccttctcaaagcgcgaggggccctatggactcatcatctgcccctcgcgggagctggcccggcagacccatggcatcctggagtactactgccgcctgctgcaggaggacagctcaccactcctgcgctgcgccctctgcattgggggcatgtccgtgaaagagcagatggagaccatccgacacggtgtacacatgatggtggccaccccggggcgcctcatggatttgctgcagaagaagatggtcagcctagacatctgtcgctacctggccctggacgaggctgaccgcatgatcgacatgggcttcgagggtgacatccgtaccatcttctcctacttcaaggtgccgcccccgcccggccagggcaccctgcaccgccccccactgcacgccacatcagactgcagggaccccatgcccctggccaccccaacccactgctcatactttgtgggctgtgtctcagttgctcagcttccccagaccccatgcccctcagcccagccctgtgtgcccttggtcgcagcccccctcttcctcagggccagcgacagaccctgctcttcagtgccaccatgccgaagaagattcagaactttgctaagagtgcccttgtaaagcctgtgaccatcaatgtggggcgygctggggctgccagcctggatgtcatccaggaggtagaatatgtgaaggaggaggccaagatggtgtacctgctcgagtgcctgcagaagacacccccrcctgtactcatctttgcagagaagaaggcagacgtggacgccatccacgagtacctgctgctcaagggggttgaggccgtagccatccatgggggcaaagaccaggaggaacggactaaggccatcgaggcattccgggagggcaagaaggatgtcctagtagccacagacgttgcctccaagggcctggacttccctgccatccagcacgtcatcaattatgacatgccagaggagattgagaactatgtacaccggattggccgcaccgggcgctcgggaaacacaggcatcgccactaccttcatcaacaaagcgtgtgatgagtcagtgctgatggacctcaaagcgctgctgctagaagccaagcagaaggtgccgcccgtgctgcaggtgctgcattgcggggatgagtccatgctggacattggaggagagcgcggctgtgccttctgcgggggcctgggtcatcggatcactgactgccccaaactcgaggctatgcagaccaagcaggtcagcaacatcggtcgcaaggactacctggcccacagctccatggacttytgagcygacagtcttcccttctctccaagaggcctcagtccccaagactgccaccagtctacacatacagcagccccctggacagaatcagcatttcagytcagctggcctggratgggccaggctggtcctggctgcctgttccctgtgctcttcagaattactgtttttgtttccttttaccccagctgccattaaagcccaaacctctagccc

SEQ ID NO: 3977 - DNA, 2380 bp, Homo sapiens
cgcgcatgcgtgcagcaaagaatggaggagtcggaacccgaacggaagcgggctcgcaycgacgaggtgcctgccggaggaagccgctccgaggcggaagatgaggacgacgaggactacgtgccctatgtgccgttacggcagcgccggcagctactggtgaggggcacgcgtccggggagggatggggccgtgaccgcggggtcgcakgrggcgggcgtggcctcggcctccgtggggaggagggcagtctgaggagtgagcttcagtacaccagggcgcggcccccagacaaacgagggaccgacggcttgatctgaggggtagggcagctttgcgcctcgggcacaggatcctcgccccaaagccaggatcctgacgctgaccttgtggactccatgcccatcctatctgtggatcccgggtggaacctcagctccagaagctgctgcagcgaagacgcaagggagctgcggaggaagagcagcaggacagcggtagtgaaccccggggagatgaggacgacatcccgctaggccctcagtccaacgtcagcctcctggatcagcaccagcaccttaaagagaaggctgaagcgcgcaaagagtctgccaaggagaagcagctgaaggaagaagagaagatcctggagagtgttgccgagggccgagcattgatgtcagtgaaggagatggctaagggcattacgtatgatgaccccatcaaaaccagctggactccaccccgttatgttctgagcatgtctgaagagcgacatgagcgcgtgcggaagaaataccacatcctggtggagggagacggtatcccaccacccatcaagagcttcaaggaaatgaagtttcctgcagccatcctgagaggcctgaagaagaaaggcattcaccacccaacacccattcagatccagggcatccccaccattctatctggccgtgacatgataggcatcgctttcacgggttcaggcaagacactggtgttcacgttgcccgtcatcatgttctgcctggaacaagagaagaggttacccttctcaaagcgcgaggggccctatggactcatcatctgcccctcgcgggagctggcccggcagacccatggcatcctggagtactactgccgcctgctgcaggaggacagctcaccactcctgcgctgcgccctctgcattgggggcatgtccgtgaaagagcagatggagaccatccgacacggtgtacacatgatggtggccaccccggggcgcctcatggatttgctgcagaagaagatggtcagcctagacatctgtcgctacctggccctggacgaggctgaccgcatgatcgacatgggcttcgagggtgacatccgtaccatcttctcctacttcaagggccagcgacagaccctgctcttcagtgccaccatgccgaagaagattcagaactttgctaagagtgcccttgtaaagcctgtgaccatcaatgtggggcgygctggggctgccagcctggatgtcatccaggaggtagaatatgtgaaggaggaggccaagatggtgtacctgctcgagtgcctgcagaagacacccccrcctgtactcatctttgcagagaagaaggcagacgtggacgccatccacgagtacctgctgctcaagggggttgaggccgtagccatccatgggggcaaagaccaggaggaacggactaaggccatcgaggcattccgggagggcaagaaggatgtcctagtagccacagacgttgcctccaagggcctggacttccctgccatccagcacgtcatcaattatgacatgccagaggagattgagaactatgtacaccggattggccgcaccgggcgctcgggaaacacaggcatcgccactaccttcatcaacaaagcgtgtgatgagtcagtgctgatggacctcaaagcgctgctgctagaagccaagcagaaggtgccgcccgtgctgcaggtgctgcattgcggggatgagtccatgctggacattggaggagagcgcggctgtgccttctgcgggggcctgggtcatcggatcactgactgccccaaactcgaggctatgcagaccaagcaggtcagcaacatcggtcgcaaggactacctggcccacagctccatggacttytgagcygacagtcttcccttctctccaagaggcctcagtccccaagactgccaccagtctacacatacagcagccccctggacagaatcagcatttcagytcagctggcctggratgggccaggctggtcctggctgcctgttccctgtgctcttcagaattactgtttttgtttccttttaccccagctgccattaaagcccaaacctctagccc

SEQ ID NO: 3978 - DNA, 2104 bp, Homo sapiens
cgcgcatgcgtgcagcaaagaatggaggagtcggaacccgaacggaagcgggctcgcaycgacgaggtgcctgccggaggaagccgctccgaggcggaagatgaggacgacgaggactacgtgccctatgtgccgttacggcagcgccggcagctactgctccagaagctgctgcagcgaagacgcaagggagctgcggaggaagagcagcaggacagcggtagtgaaccccggggagatgaggacgacatcccgctaggccctcagtccaacgtcagcctcctggatcagcaccagcaccttaaagagaaggctgaagcgcgcaaagagtctgccaaggagaagcagctgaaggaagaagagaagatcctggagagtgttgccgagggccgagcattgatgtcagtgaaggagatggctaagggcattacgtatgatgaccccatcaaaaccagctggactccaccccgttatgttctgagcatgtctgaagagcgacatgagcgcgtgcggaagaaataccacatcctggtggagggagacggtatcccaccacccatcaagagcttcaaggaaatgaagtttcctgcagccatcctgagaggcctgaagaagaaaggcattcaccacccaacacccattcagatccagggcatccccaccattctatctggccgtgacatgataggcatcgctttcacgggttcaggcaagacactggtgttcacgttgcccgtcatcatgttctgcctggaacaagagaagaggttacccttctcaaagcgcgaggggccctatggactcatcatctgcccctcgcgggagctggcccggcagacccatggcatcctggagtactactgccgcctgctgcaggaggacagctcaccactcctgcgctgcgccctctgcattgggggcatgtccgtgaaagagcagatggagaccatccgacacggtgtacacatgatggtggccaccccggggcgcctcatggatttgctgcagaagaagatggtcagcctagacatctgtcgctacctggccctggacgaggctgaccgcatgatcgacatgggcttcgagggtgacatccgtaccatcttctcctacttcaagggccagcgacagaccctgctcttcagtgccaccatgccgaagaagattcagaactttgctaagagtgcccttgtaaagcctgtgaccatcaatgtggggcgygctggggctgccagcctggatgtcatccaggaggtagaatatgtgaaggaggaggccaagatggtgtacctgctcgagtgcctgcagaagacacccccrcctgtactcatctttgcagagaagaaggcagacgtggacgccatccacgagtacctgctgctcaagggggttgaggccgtagccatccatgggggcaaagaccaggaggaacggactaaggccatcgaggcattccgggagggcaagaaggatgtcctagtagccacagacgttgcctccaagggcctggacttccctgccatccagcacgtcatcaattatgacatgccagaggagattgagaactatgtacaccggattggccgcaccgggcgctcgggaaacacaggcatcgccactaccttcatcaacaaagcgtgtgatgagtcagtgctgatggacctcaaagcgctgctgctagaagccaagcagaaggtgccgcccgtgctgcaggtgctgcattgcggggatgagtccatgctggacattggaggagagcgcggctgtgccttctgcgggggcctgggtcatcggatcactgactgccccaaactcgaggctatgcagaccaagcaggtcagcaacatcggtcgcaaggactacctggcccacagctccatggacttytgagcygacagtcttcccttctctccaagaggcctcagtccccaagactgccaccagtctacacatacagcagccccctggacagaatcagcatttcagytcagctggcctggratgggccaggctggtcctggctgcctgttccctgtgctcttcagaattactgtttttgtttccttttaccccagctgccattaaagcccaaacctctagccca

SEQ ID NO: 3979 - DNA, 2219 bp, Homo sapiens
cgcgcatgcgtgcagcaaagaatggaggagtcggaacccgaacggaagcgggctcgcaycgacgaggtgcctgccggaggaagccgctccgaggcggaagatgaggacgacgaggactacgtgccctatgtgccgttacggcagcgccggcagctactgctccagaagctgctgcagcgaagacgcaagggagctgcggaggaagagcagcaggacagcggtagtgaaccccggggagatgaggacgacatcccgctaggccctcagtccaacgtcagcctcctggatcagcaccagcaccttaaagagaaggctgaagcgcgcaaagagtctgccaaggagaagcagctgaaggaagaagagaagatcctggagagtgttgccgagggccgagcattgatgtcagtgaaggagatggctaagggcattacgtatgatgaccccatcaaaaccagctggactccaccccgttatgttctgagcatgtctgaagagcgacatgagcgcgtgcggaagaaataccacatcctggtggagggagacggtatcccaccacccatcaagagcttcaaggaaatgaagtttcctgcagccatcctgagaggcctgaagaagaaaggcattcaccacccaacacccattcagatccagggcatccccaccattctatctggccgtgacatgataggcatcgctttcacgggttcaggcaagacactggtgttcacgttgcccgtcatcatgttctgcctggaacaagagaagaggttacccttctcaaagcgcgaggggccctatggactcatcatctgcccctcgcgggagctggcccggcagacccatggcatcctggagtactactgccgcctgctgcaggaggacagctcaccactcctgcgctgcgccctctgcattgggggcatgtccgtgaaagagcagatggagaccatccgacatgctgtgcagtcctctgcagaccaccagaggccctggaccaggccctctgttcacagatgggccagaccccatcccggaggccttcctccacggacttctgagtattagggagatgcggtgtacacatgatggtggccaccccggggcgcctcatggatttgctgcagaagaagatggtcagcctagacatctgtcgctacctggccctggacgaggctgaccgcatgatcgacatgggcttcgagggtgacatccgtaccatcttctcctacttcaagggccagcgacagaccctgctcttcagtgccaccatgccgaagaagattcagaactttgctaagagtgcccttgtaaagcctgtgaccatcaatgtggggcgygctggggctgccagcctggatgtcatccaggaggtagaatatgtgaaggaggaggccaagatggtgtacctgctcgagtgcctgcagaagacacccccrcctgtactcatctttgcagagaagaaggcagacgtggacgccatccacgagtacctgctgctcaagggggttgaggccgtagccatccatgggggcaaagaccaggaggaacggactaaggccatcgaggcattccgggagggcaagaaggatgtcctagtagccacagacgttgcctccaagggcctggacttccctgccatccagcacgtcatcaattatgacatgccagaggagattgagaactatgtacaccggattggccgcaccgggcgctcgggaaacacaggcatcgccactaccttcatcaacaaagcgtgtgatgagtcagtgctgatggacctcaaagcgctgctgctagaagccaagcagaaggtgccgcccgtgctgcaggtgctgcattgcggggatgagtccatgctggacattggaggagagcgcggctgtgccttctgcgggggcctgggtcatcggatcactgactgccccaaactcgaggctatgcagaccaagcaggtcagcaacatcggtcgcaaggactacctggcccacagctccatggacttytgagcygacagtcttcccttctctccaagaggcctcagtccccaagactgccaccagtctacacatacagcagccccctggacagaatcagcatttcagytcagctggcctggratgggccaggctggtcctggctgcctgttccctgtgctcttcagaattactgtttttgtttccttttaccccagctgccattaaagcccaaacctctagccc

SEQ ID NO: 3980 - DNA, 803 bp, Homo sapiens
gagcagacacccagcgctgccggaactcggggcgcgcatcccgcaagtcggaacccggcggatcggatcccgcagatcggagacggggcctggagggtggcagcacgcaaagggtgtccctgtccctcaaggggtcatggcctccatgttgctcgcccagcgcctrgcctgcagcttccagcacagctaccgcctgctggtgcctggatccagacacattagtcaagctgcagccaaagtcgacgttgaatttgattatgatggrcctctgatgaagacggaagtcccagggcctagatctcrggagttaatgaaacagctgaatataattcagaatgcagaggctgtgcattttttctgcaattacgaagagagccgaggcaattacctggttgatgtggacggcaaccgaatgctggatctttattcccagatctcctctgtycccataggttacagccaccccgccctgctgaaactcatccaacagcctcaaaatgcgacacgaagcttggagtagaactgctggccatgtacagctcctgcagatcctgccagacagttctccaaatcgatcgcaccaactccactcccacagccgggggagggttccagtcttgccacatcctcgccaacacggggtatcactggaagatttttctttgactcagagagtaacatacttatccacacatgacaaggaacttgatcccagaaagaaatctaagaaaggcagaaggaacaaagacccaatcctggtcagaaaaggggtccctagccctaaaacgtacttcactttaaat

SEQ ID NO: 3981 - DNA, 4776 bp, Homo sapiens
gagcagacacccagcgctgccggaactcggggcgcgcatcccgcaagtcggaacccggcggatcggatcccgcagatcggagacggggcctggagggtggcagcacgcaaagggtgtccctgtccctcaaggggtcatggcctccatgttgctcgcccagcgcctrgcctgcagcttccagcacagctaccgcctgctggtgcctggatccagacacattagtcaagctgcagccaaagtcgacgttgaatttgattatgatggrcctctgatgaagacggaagtcccagggcctagatctcrggagttaatgaaacagctgaatataattcagaatgcagaggctgtgcattttttctgcaattacgaagagagccgaggcaattacctggttgatgtggacggcaaccgaatgctggatctttattcccagatctcctctgtycccataggttacagccaccccgccctgctgaaactcatccaacagcctcaaaatgcgagcatgtttgtcaacagacccgccctcggaatcctgcctccggagaactttgtggagaagctccggcagtccttgctctcggtggctcccaaagggatgtcccagctcatcaccatggcctgcggctcctgctccaatgaaaacgccttaaagaccatcttcatgtggtaccggagcaaggaaagagggcagaggggcttctcccaggaggagctggagacgtgcatgattaaccaggcccctggctgccccgactacagcatcctctccttcatgggcgcgttccatgggargaccatgggttgcttagcgaccacgcactctaaagccattcacaagatcgayatcccttcctttgactggcccatcgcaccgttcccacggctgaaataccctctggaagagtttgtgaaagagaaccaacaggaggaggcccgctgtctggaagaggtggaggatctgattgtgaaatatcggaaaaagaagaagacggtggccgggatcatcgtggagcccatccagtccgagggtggagacaaccacgcatccgatgacttctttcggaagctgagagacatcgccaggaagcatggctgcgccttcttggtggacgaggtmcagaccggaggaggctgcacgggcaagttctgggcccatgagcactggggcctggatgacccagcagacgtgatgaccttcagcaagaagatgatgactgggggcttcttccacaaggaggagttcaggcctaatgctccctaccggatcttcaacacctggctgggggacccgtccaagaacctgttgctggctgaggtcatcaacatcatcwagcgggaggacctgctaaataatgcagcccatgccgggaaggccctgctcacaggactgctggacctccaggcccggtacccccagttcatcagcagggtgagaggacgaggcaccttttgctccttcgatactcccgatgattccatacggaataagctcattttaattgccagaaacaaaggtgtggtgttgggtggctgtggtgacaaatccattcgtttccgtcccacgctggtsttcagggatcaccaygctcacctgttcctcaatattttcagtgacatcttagcagacttcaagtaaagaagccatttccactacagtgagaaagcccrgatcccaacagttgtcaaattgattagtttgcctaattcatgttttcacttaaaagtatcagaggtgaatgcacagtgaagggtgatttgtggggagggagcatttttggtggtcttgggggaggggaggggagggaagggctggtgttgattttcctccctgcagagccaatggtgcacattggtttaagcccagagatcctgcttgakcmctggactcatcttsggaagggccatgggaggtcctggctagagttctgcccaaycttgaccaaccccagcaatttttccaaaagccagtcaagggcattacatttgttcctgggactggcagctgggcctcctgggtgccagtccatctcaagtgccatattctgtgatcacggatgttggctccccctcgccctatgcaagcaaacacactctcacctcctctcccagccycccggagctctgagcacgccccacgcatggtgcagragggactggacagatctgaggaaggccgtaaaatggggacaggaggattcagctcaggmgtragggaagaggtcctctggccccctgaagatgagaatcacccctctcagtgcacctggggatccccctaaactgtgaattctgccctggacagggctttgcccttggaggatccccaggtggccttacccgtgattcttactcggcatcctccattccccaaactccctcctccctgttaaatgtcaacctagacctggacctgggtgggaggaaactgtagcctgagtgtccacagggacacacgtgagccacagggctagaagcacaggcccgtcaccccaggaggaaaagcccagggtctggggcagcagagccatcgcatcatgtttcccagggcaasttgaggtctgacttttggctccctcgccctaagaggctcttcctctcttttgctcatccaccttcacaccacttstgagctgacccccaggaacagcttggctgttccaccagagcagagggaatcattgctggactggatttcttctggagggaagcaccatgaattaaaggtgccagagctccatgcatggaaaagtggcctgttggttcaacrtggtttccttgtacttgatcctcctgaaatgagagattttcctgagatgactgagtatggagattaccaggcagatgataccgaaatgcttaaaggggctgtggctgaggctgtagcatctctgctggaggtgagacactctgggaactgatttgacctcgaatgctcctaaaagagaacttgatagcctgacagcagagaagtattatttggtggggagtctgagaaagcctggcttgtattatctgtccaaaaggaagcctcttcatctcccggtgccttggttgactattttggaaataggcatatcaaggttcctgattcagcactttgctcttttaataacaaatcgtccaaagatctcaaagtaagggtttttttttttagcttccactcttccgcagacttggtcatcgacctatttttrttgaagaatgaaaggcratgacaagtttaacatawacaaattcgtgaattcttgttcattttgcattcctgcagtcagtgctaatccgtcgttcttaatcaggagttctgccaggtttaaggtcacctgcactcccagccaagtggtgatgtatgcctcccactctctgcaaggttttcctcatttttatattcatttattcatcattcattcattcacctaactttcattaaatagctgcaccatcccaggccctgtgcggagcatcgggaatacaaagatgagataaaacattgtccctgcccccgggggctcacatgccactggaaacaacagactcttaaactaacaattcaagcaggcgccaagtgctaygacagaggtgtgaataaaagcatcaggaaatcggatggagaaccaccattcacccaagggtcagaggaggtttcaaagaaaaggtgtcattggagcagtgttttgcagaatgagccagagttcaccaagcaggcaaggcaaggaagggtgttgcagagagggaacagcatatgcaaaggcrtatcagttcatggcatcacatctttcactggggaagccagtttccacaggcagcatcccaaggttcaataaggccttatttaacaagcaagcaaaatgcaaaccaaaccattattcatttattggcttaagtatgctttctcctgaaaactttagcattgggtgcaaatattcagtatggttctcggagwccaaagggttttaagccagggcacaaccagaaaagtggctctctttggtagggagaggggctccaatatttcgttctctccccatggggcactgacagagaaatgaaatagttttatctggaaaattccagagctattatttactccttaccaagggaagttacttcttgtaaaaacttttaagccatttatcaacaagttcttgttgactcagggcataatgagttcctgagacatgctyttttgggggctggggctttagstagaagaatttcaaggaaaagaattctcagcagagctcaagattgtagaaactcagcagaagctggtaaaaacatggggagcccggaggacaggctgctgtccagggcagaggccatgaagaagtgcttccgtggccgacagtctggaaatgaatccatcatacattagtgccatagagtttagtaaccgtccagcaagtgtcatcacttttacagaaaacaaggtccagtaatagcaagtcttagtacatcctcacttttattataaatgggtgttttttcataatttttactgacgctcagtaaccatgcaaaaytgtgtatagcattaatgtatctacatacctacacctatctatatataagctcatggtagaaaaccatagctaagtagcatcgcagacttaagcgtacaaagtgatcttgttcacaagtaatctgttgacagtgccaataaatgataaaaaaaaaattaacatgtcacaatgtaacggatgaccatatgcacaattccatgaattaaatctgtttcctgtgttagtcagtattcttaaataaaatttataattg

SEQ ID NO: 3982 - DNA, 1747 bp, Homo sapiens
gcggggcgtccggggagtggggcggggctcccggttccaggcgagttcgcagctgcgcgccgggtcctggaggccgaggccgctcccgcccgttgtccccgcagtccccgacgggagcgccatggcccagccgccgcccgacgtggagggggacgactgtctccccgcgtaccgccacctcttctgcccggacctgctgcgggacaaagtggccttcatcacaggaggcggctctgggattgggttccggattgctgagattttcatgcggcacggctgccatacggtgattgccagtaggagcctgccgcgagtgctgacggctgtgcttccccagagtggggtccagcagcaaacccagggtccccgaggaacccggaagcatcgtcctctgcagattccaaaggccttttctccaggccgaggctgcagggctgctgtctgcctctttacctggcttctaggccgccaggaagctggctggggccaccggccggcgctgcctccctctctctatggacgtccgagcgcccccagctgtcatggccgccgtggaccaggctctgaaggagtttggcagaatcgacattctcattaactgtgcggccgggaacttcctgtgccccgctggcgccttgtccttcaacgccttcaagaccgtgatggacatcgataccagcggcaccttcaatgtgtctcgtgtgctctatgagaagttcttccgggaccacggaggggtgatcgtgaacatcactgccaccctggggaaccgggggcaggcgctccaggtgcatgcaggctccgccaaggccgctgtggacgcgatgacgcggcacttggctgtggagtggggtccccaaaacatccgcgtcaacagcctcgcccctggccccatcagtggcacagaggggctccggcgactgggtggccctcaggccagcctgagcaccaaggtcactgccagcccgctgcagaggctggggaacaagaccgagatcgcccacagcgtgctctacctggccagccctctggcttcctacgtgacgggggccgtgctggtggccgatggcggggcatggttgacgttcccaaacggtgtcaaagggctgccggatttcgcatccttctctgctaagctctaggaatcttccggccgctgcttcctgccgcctcactcagccaggtggagagcaccaatctgaaccagcaatgcctgcagcccagcccctcctctgaacactcagctattactgcgctttccctccccacggccccaactccagggcaggagcaactggacagtgggcctggcccgtggagctgccacgcaggtgcctgagggccaggtgccacgcaggtgtctgaggaccaggtgccacgcaggtggtgggggtacagacaagatgctgggatgtcccctgccccatggtcaagggtgtcctgcctgcctgggtccagggcctgagggagccacatggatcccgagacttgtgttctcttggctgaaaacactgaggtgctcccatctgtgcgtggcccatgagctgggatggtcctccagctgcccmcaaggtccgcccctctgtctctgcaccmcctgtttgcataaacacmctttgctacaatcttgctagtgcgttttcttaaaagataatctatttactgtaaaaataaattggactttgcaaaagcttttagaaggaaaagaaagaggattaaagagaattgctggtgatcctatcgttta

SEQ ID NO: 3983 - DNA, 1817 bp, Homo sapiens
gcggggcgtccggggagtggggcggggctcccggttccaggcgagttcgcagctgcgcgccgggtcctggaggccgaggccgctcccgcccgttgtccccgcagtccccgacgggagcgccatggcccagccgccgcccgacgtggagggggacgactgtctccccgcgtaccgccacctcttctgcccggacctgctgcgggacaaagtggccttcatcacaggaggcggctctgggattgggttccggattgctgagattttcatgcggcacggctgccatacggtgattgccagtaggagcctgccgcgagtgctgacgagatgggttttcaccaygttgaccaggctggtctcgaattcctgacctcaggtgatccgcccacctcagcctcccaaagtgccaggattacaggtgtgaaccactgtgcccggccggcacctcagcctcccaaagtgccaggattacaggtgtgaaccactgtgcccagccggcaccaaaacttgcacctatcctaaatatggagcttcagtgccgccaggaagctggctggggccaccggccggcgctgcctccctctctctatggacgtccgagcgcccccagctgtcatggccgccgtggaccaggctctgaaggagtttggcagaatcgacattctcattaactgtgcggccgggaacttcctgtgccccgctggcgccttgtccttcaacgccttcaagaccgtgatggacatcgataccagcggcaccttcaatgtgtctcgtgtgctctatgagaagttcttccgggaccacggaggggtgatcgtgaacatcactgccaccctggggaaccgggggcaggcgctccaggtgcatgcaggctccgccaaggccgctgtggacgcgatgacgcggcacttggctgtggagtggggtccccaaaacatccgcgtcaacagcctcgcccctggccccatcagtggcacagaggggctccggcgactgggtggccctcaggccagcctgagcaccaaggtcactgccagcccgctgcagaggctggggaacaagaccgagatcgcccacagcgtgctctacctggccagccctctggcttcctacgtgacgggggccgtgctggtggccgatggcggggcatggttgacgttcccaaacggtgtcaaagggctgccggatttcgcatccttctctgctaagctctaggaatcttccggccgctgcttcctgccgcctcactcagccaggtggagagcaccaatctgaaccagcaatgcctgcagcccagcccctcctctgaacactcagctattactgcgctttccctccccacggccccaactccagggcaggagcaactggacagtgggcctggcccgtggagctgccacgcaggtgcctgagggccaggtgccacgcaggtgtctgaggaccaggtgccacgcaggtggtgggggtacagacaagatgctgggatgtcccctgccccatggtcaagggtgtcctgcctgcctgggtccagggcctgagggagccacatggatcccgagacttgtgttctcttggctgaaaacactgaggtgctcccatctgtgcgtggcccatgagctgggatggtcctccagctgcccmcaaggtccgcccctctgtctctgcaccmcctgtttgcataaacacmctttgctacaatcttgctagtgcgttttcttaaaagataatctatttactgtaaaaataaattggactttgcaaaagcttttagaaggaaaagaaagaggattaaagagaattgctggtgatcctatcgttta

SEQ ID NO: 3984 - DNA, 1605 bp, Homo sapiens
gcggggcgtccggggagtggggcggggctcccggttccaggcgagttcgcagctgcgcgccgggtcctggaggccgaggccgctcccgcccgttgtccccgcagtccccgacgggagcgccatggcccagccgccgcccgacgtggagggggacgactgtctccccgcgtaccgccacctcttctgcccggacctgctgcgggacaaagtggccttcatcacaggaggcggctctgggattgggttccggattgctgagattttcatgcggcacggctgccatacggtgattgccagtaggagcctgccgcgagtgctgacggccgccaggaagctggctggggccaccggccggcgctgcctccctctctctatggacgtccgagcgcccccagctgtcatggccgccgtggaccaggctctgaaggagtttggcagaatcgacattctcattaactgtgcggccgggaacttcctgtgccccgctggcgccttgtccttcaacgccttcaagaccgtgatggacatcgataccagcggcaccttcaatgtgtctcgtgtgctctatgagaagttcttccgggaccacggaggggtgatcgtgaacatcactgccaccctggggaaccgggggcaggcgctccaggtgcatgcaggctccgccaaggccgctgtggacgcgatgacgcggcacttggctgtggagtggggtccccaaaacatccgcgtcaacagcctcgcccctggccccatcagtggcacagaggggctccggcgactgggtggccctcaggccagcctgagcaccaaggtcactgccagcccgctgcagaggctggggaacaagaccgagatcgcccacagcgtgctctacctggccagccctctggcttcctacgtgacgggggccgtgctggtggccgatggcggggcatggttgacgttcccaaacggtgtcaaagggctgccggatttcgcatccttctctgctaagctctaggaatcttccggccgctgcttcctgccgcctcactcagccaggtggagagcaccaatctgaaccagcaatgcctgcagcccagcccctcctctgaacactcagctattactgcgctttccctccccacggccccaactccagggcaggagcaactggacagtgggcctggcccgtggagctgccacgcaggtgcctgagggccaggtgccacgcaggtgtctgaggaccaggtgccacgcaggtggtgggggtacagacaagatgctgggatgtcccctgccccatggtcaagggtgtcctgcctgcctgggtccagggcctgagggagccacatggatcccgagacttgtgttctcttggctgaaaacactgaggtgctcccatctgtgcgtggcccatgagctgggatggtcctccagctgcccmcaaggtccgcccctctgtctctgcaccmcctgtttgcataaacacmctttgctacaatcttgctagtgcgttttcttaaaagataatctatttactgtaaaaataaattggactttgcaaaagcttttagaaggaaaagaaagaggattaaagagaattgctggtgatcctatcgttta

SEQ ID NO: 3985 - DNA, 1285 bp, Homo sapiens
gcggccgcggagggaaggggtgggtcggtgggtctgacagcgggtctgcgtaggcggcagcgtctgtccctcccagcctctcgctccgcgccatgggcgggccccgggctctgctggccgcactctgggcgctggaagccgccgggaccgccgcgcttcgcatcggagccttcaacattcagagcttcggtgacagcaaagtgtcggaccccgcttgcggcagcatcatcgcgaagatcctggctggctatgacctcgcgctggtgcaggaggtgcgagacccagacctcagcgccgtgtccgcgctcatggagcagatcaacagcgtgtccgagcacgagtacagctttgtgagcagccagcccctgggccgggaccagtacaaggagatgtacctgttcgtgtacaggaaagacgcggtgtcggtcgtggacacctacctgtacccagaccccgaggacgtcttcagccgcgagcccttcgtggtcaagttctcggcccccggcaccggtgagcgggccccgcccctcccctcccgccgagctctgacgcccccaccccttcccgcagcagcacagaacctggtgctgatcccgctgcacgcggcgccgcatcaagccgtggcggagatcgacgcgctctacgacgtgtacctggacgtgatcgacaagtggggcaccgmcgacatgctgttcctgggcgacttcaacgccgactgcagctatgtgcgggcgcaggactgggccgccatccgtctgaggagcagtgaggtcttcaagtggctcatccctgacagcgccgacaccacggtgggcaactcagactgcgcctacgaccgcattgtggcctgtggcgcccgcctgcgccggagcctgaagccccagtcggccaccgtgcacgacttccaggaggaattcggcctggaccagactcaggctcttgccatcagcgaccactttccagtggaggtgaccctcaagttccaccgatgactcgaggcctggctggggcatgccacctgcagaccctggctctgaggaatggcccaacagtggccccttcagggtggcagccacccttcagtgaggccccaaggcagagtcggctgggcgtggaccaggggccatggacacgtgatgtgctgctctgtacctccgttccccatctgtgggacgggctgcatccagcgacctcatggggtgttgtgagccccatgaggggtgcagggggcactgcccggcagatgtctgctcaataaatgagctgctcccggtcgggccccaca

SEQ ID NO: 3986 - DNA, 1303 bp, Homo sapiens
gtgcagtcctgtgtcggacacgcccgcagcctggacccgggatccccatccccctaggatctctgagcctcgggcctctgcacccacatccaagcctctcgctccgcgccatgggcgggccccgggctctgctggccgcactctgggcgctggaagccgccgggaccgccgcgcttcgcatcggagccttcaacattcagagcttcggtgacagcaaagtgtcggaccccgcttgcggcagcatcatcgcgaagatcctggctggctatgacctcgcgctggtgcaggaggtgcgagacccagacctcagcgccgtgtccgcgctcatggagcagatcaacagcgtgtccgagcacgagtacagctttgtgagcagccagcccctgggccgggaccagtacaaggagatgtacctgttcgtgtacaggaaagacgcggtgtcggtcgtggacacctacctgtacccagaccccgaggacgtcttcagccgcgagcccttcgtggtcaagttctcggcccccggcaccggtgagcgggccccgcccctcccctcccgccgagctctgacgcccccaccccttcccgcagcagcacagaacctggtgctgatcccgctgcacgcggcgccgcatcaagccgtggcggagatcgacgcgctctacgacgtgtacctggacgtgatcgacaagtggggcaccgmcgacatgctgttcctgggcgacttcaacgccgactgcagctatgtgcgggcgcaggactgggccgccatccgtctgaggagcagtgaggtcttcaagtggctcatccctgacagcgccgacaccacggtgggcaactcagactgcgcctacgaccgcattgtggcctgtggcgcccgcctgcgccggagcctgaagccccagtcggccaccgtgcacgacttccaggaggaattcggcctggaccagactcaggctcttgccatcagcgaccactttccagtggaggtgaccctcaagttccaccgatgactcgaggcctggctggggcatgccacctgcagaccctggctctgaggaatggcccaacagtggccccttcagggtggcagccacccttcagtgaggccccaaggcagagtcggctgggcgtggaccaggggccatggacacgtgatgtgctgctctgtacctccgttccccatctgtgggacgggctgcatccagcgacctcatggggtgttgtgagccccatgaggggtgcagggggcactgcccggcagatgtctgctcaataaatgagctgctcccggtcgggccccaca

SEQ ID NO: 3987 - DNA, 1326 bp, Homo sapiens
gtgcagtcctgtgtcggacacgcccgcagcctggacccgggatccccatccccctaggatctctgagcctcgggcctctgcacccacatccaaggcggcagcgtctgtccctcccagcctctcgctccgcgccatgggcgggccccgggctctgctggccgcactctgggcgctggaagccgccgggaccgccgcgcttcgcatcggagccttcaacattcagagcttcggtgacagcaaagtgtcggaccccgcttgcggcagcatcatcgcgaagatcctggctggctatgacctcgcgctggtgcaggaggtgcgagacccagacctcagcgccgtgtccgcgctcatggagcagatcaacagcgtgtccgagcacgagtacagctttgtgagcagccagcccctgggccgggaccagtacaaggagatgtacctgttcgtgtacaggaaagacgcggtgtcggtcgtggacacctacctgtacccagaccccgaggacgtcttcagccgcgagcccttcgtggtcaagttctcggcccccggcaccggtgagcgggccccgcccctcccctcccgccgagctctgacgcccccaccccttcccgcagcagcacagaacctggtgctgatcccgctgcacgcggcgccgcatcaagccgtggcggagatcgacgcgctctacgacgtgtacctggacgtgatcgacaagtggggcaccgmcgacatgctgttcctgggcgacttcaacgccgactgcagctatgtgcgggcgcaggactgggccgccatccgtctgaggagcagtgaggtcttcaagtggctcatccctgacagcgccgacaccacggtgggcaactcagactgcgcctacgaccgcattgtggcctgtggcgcccgcctgcgccggagcctgaagccccagtcggccaccgtgcacgacttccaggaggaattcggcctggaccagactcaggctcttgccatcagcgaccactttccagtggaggtgaccctcaagttccaccgatgactcgaggcctggctggggcatgccacctgcagaccctggctctgaggaatggcccaacagtggccccttcagggtggcagccacccttcagtgaggccccaaggcagagtcggctgggcgtggaccaggggccatggacacgtgatgtgctgctctgtacctccgttccccatctgtgggacgggctgcatccagcgacctcatggggtgttgtgagccccatgaggggtgcagggggcactgcccggcagatgtctgctcaataaatgagctgctcccggtcgggccccaca

SEQ ID NO: 3988 - DNA, 3116 bp, Homo sapiens
ttccgctcgccggctgcggcgcctgggacggttgcggtgggtctgggcgctgggaagtcgtccaagatgattaaaaaattcgacaagaaggacgaggagtctggtagtggctccaatcctttccagcatctggagaagagtgctgttttacaggaggctcgtatattcaatgaaactccaatcaatccaagaagatgtttgcatattcttacaaagattctttacttactgaaccagggtgaacactttggaacaacggaagctacagaagccttctttgcaatgacgcgattgtttcaatctaatgatcaaacattgaggagaatgtgctaccttaccatcaaagaaatggctaccatctctgaggatgtgataattgtcacaagcagtctgactaaagacatgactggaaaagaagatgtataccgaggcccggccatcagagctctctgcaggatcaccgatggaacaatgttgcaagccattgaaagatacatgaagcaggccattgtggataaagtttccagtgtatccagttcagcactggtatcttccctgcacatgatgaagataagctatgatgtggttaagcgctggatcaatgaagcccaagaagctgcatcaagtgataatattatggtccagtaccatgcattgggagtcctgtatcaccttagaaagaatgatcgacttgctgtttccaagatgttgaataagtttactaaatctggtctcaagtcacagtttgcttactgcatgctgatccgaattgccagtcgcttactaaaagaaactgaggatggccatgaaagtccactgtttgatttcattgagagctgcttgcgaaataaacatgaaatggttatttatgaagctgcttcagctatcatccatcttcctaactgcactgcaagagagttggcacctgctgtttcagttcttcaacttttctgtagttctcctaagccagccttgagatatgcagctgtgaggaccttgaacaaggtggcaatgaagcacccctctgctgttactgcctgcaatctggacttagaaaacttaatcacagactcaaacagaagcattgctaccttagccattactacactcctcaaaacaggaagtgagagcagtgtggaccggctcatgaagcagatatcttcttttgtgtctgaaatctcagatgagttcaaggtggtggttgtacaggcaattagtgctctctgtcagaaataccctcgaaagcacagtgtcatgatgactttcctctccaacatgctccgagatgatggaggctttgagtacaagcgggccattgtggactgtataatcagcattgtggaagagaaccctgagagtaaagaagcaggcctagcccacctttgtgaattcattgaggactgtgaacacactgttctggctactaagattctacacttgttgggcaaagagggccctagaacgcctgtcccctccaaatatatccgttttatttttaatagggttgtcctggagaatgaggctgtcagagctgctgctgtgagtgctttggctaaatttggggctcagaatgagagtcttctcccaagcatccttgtactcttacagaggtgtatgatggatactgatgacgaggtacgagacagagctaccttctatctgaatgtgctgcagcagaggcagatggcactaaatgccacatatatctttaatggtttgacggtctctgtaccagggatggaaaaagccttacaccagtacacgttggagccttcagaaaaaccgtttgacatgaaatcaattcctcttgctatggctcctgtctttgaacagaaagcagaaatcacacttgtggctactaagccagagaagttggctccttccaggcaagacattttccaagaacaattggctgccattcctgagtttctgaatataggacccttgttcaagtcttctgagcctgttcaacttacagaagcagagacagaatattttgttcgatgtatcaagcacatgtttaccaatcacatcgtgttccagtttgactgcaccaacactctcaatgaccagctgctggaaaaagtgacagtgcagatggagccatcagattcctatgaagtgctgtcttgtatcccagcccccagccttccttataaccaaccaggaatatgttacactcttgttcgtttgcctgatgatgaccctacagcagttgcaggctcctttagctgcaccatgaagtttacagtccgggactgtgaccctaacactggagttccagatgaggatgggtatgatgatgagtatgtgctggaagatctcgaagtgactgtgtctgaccatattcagaaagtactgaagcctaactttgctgctgcttgggaagaggtgggagatacctttgagaaagaggaaacctttgccctcagttctaccaaaacccttgaagaggctgtcaacaatatcatcacatttctgggcatgcagccatgtgagaggtccgataaagtacctgagaacaagaattcccattcgctctatctggcaggtatattcagaggtggctatgatttattggtgaggtccaggctggccttagccgatggagtgaccatgcaggtgactgtcagaagtaaagagagaacacctgtagatgttatcttagcttctgttggataaatgcttactggacaagaggaaactgatgcacactacatggtcagtgggcttttaggctagtggcatcagtttcccagaatcagacttttgaagatgaatgactttggagaagcaaattaaacatttggccctgagccagcagatcaagcaaatgtctatctttgcgcatgggttgktttttttttttttytttttattctacttggtcagctttgggacgatagtgcagctttgggtgatcttgaaaatcaaatactatcctatactccagctgcttaacttcattttattctttaatgtgtacctgaaagctcctggcaatgctggaaaatttttatcccagaggggtgggggggaggggggaggggaagccagagtccacttttgtcacaattcatttttattaatagaaaataaacacttattccagtttc

SEQ ID NO: 3989 - DNA, 2458 bp, Homo sapiens
aatcgccggggatggggatggatgcgggtcccccggcggcacccctagaccccttcccccttggtagccgcgccccgaggttccggtcctcgcgcccagggtctgtcgcggggtccgctgggcctcttgccgccgactaccccgtcagcgatgaggaaactgaggctcagagaggtcacatggcttgctcgaggccccccagccagtgtgaacccacatccctgcccccagggccacctgcaggacgccgacacctacccctcagcagacgccggagagaaatgagtagcaacaaagagcagcggtcagcagtrttcgtgatcctctttgccctcatcaccatcctcatcctctacagctccaacagtgccaatgaggtcttccattacggctccctgcggggccgtagccgccgacctgtcaacctcaagaagtggagcatcactgacggctatgtccccattctcggcaacaagacactgccctctcggtgccaccagtgtgtgattgtcagcagctccagccacctgctgggcaccaagctgggccctgagatygagcgggctgagtgtacaatccgcatgartgatgcacccaccactggctactcagctgatgtgggcaacaagaccacctaccgcgtcgtggcccattccagtgtgttccgygtgctgaggaggccccaggagtttgtcaaccggacccctgaaaccgtgttcatcttctggggrcccccgagcaagatgcagaagccccagggcagcctcgtgcgtgtgatccagcgagcgggcctggtgttccccaacatggaagcatatgccgtctctcccggccgcatgcggcaatttgacgacctcttccggggtgagacgggcaaggacagggagaagtctcattcgtggttgagcacaggctggtttaccatggtgatcgcggtggagttgtgtgaccacgtgcatgtctatggcatggtcccccccaactactgcagccagcggccccgcctccagcgcatgccctaccactactacgagcccaaggggccggacgaatgtgtcacctacatccagaatgagcacagtcgcaagggcaaccaccaccgcttcatcaccgagaaaagggtcttctcatcgtgggcccagctgtatggcatcaccttctcccacccctcctggacctaggccacccagcctgtgggacctcaggagggtcagaggagaagcagcctccgcccagccgctaggccagggaccatcttctggccaatcaaggcttgctggagtgtctcccagccaatcagggccttgaggaggatgtatcctccagccaatcagggcctggggaatctgttggcgaatcagggatttgggagtctatgyggttaatcaggggtgtctttcttgtgcagtcagggtctgcgcacagtcaatcagggtagagggggtatttctgagtcaatctgaggctaaggacatgtcctttcccatgaggccttggttcagagccccaggaatggaccccccaatcactccccactctsctgggataatggggtcctgtcccaaggagctgggaacttggtgttgccccctcaatttccagcaccagaaagagagattgtgtgggggtagaagctgtctggaggcccggccagagaatttgtggggttgtggaggttgtgggggcggtggggaggtcccagaggtgggaggcyggcatccaggtcttggctctgccctgagaccttggacaaacccttccccctctctgggcacccttctgcccacaccagtttccagtgcggagtctgagaccctttccacctcccctacaagtgccctcgggtctgtcctccccgtctggaccctcccagccactatcccttgctggaaggctcagctctttggggggtctggggtgacctccccacctcctggaaaactttagggtatttttgcgcaaactccttcagggttgggggactctgaaggaaacgggacaaaaccttaagctgttttcttagcccctcagccagctgccattagcttggctcttaaaggrccaggcctccttttctgccctctagcagggaggttttccaactgttggaggcgcctttggggctgcccctttgtctggagtcactgggggcttccgagggtctccctcgaccctctgtcgtcctgggatggctgtcgggagctgtatcacctgggttctgtcccctggctctgtatcaggcactttattaaagctgggcctcagtggggtgtgtttgtctcctgctcttctggagcctggaaggaaagggcttcaggaggaggctgtgaggctggarggaccaratggaggaggccagcagctagccattgcacactggggtgatgggtgggggcggtgactgccccagacttggttttgtaatgatttgtacaggaataaacacacctacgctccg

SEQ ID NO: 3990 - DNA, 2466 bp, Homo sapiens
caggcctgggccgggccgtgacggcggcgctaggacccggcgggccgcgggtgcggcgaggcctgggcggcctgaggagcgcggaccccggcgctcggctcccggcgccatgtgagggggctcgggggccgcggggggccgggcgctccccgccggagatgaggaaactgaggctcagagaggtcacatggcttgctcgaggccccccagccagtgtgaacccacatccctgcccccagggccacctgcaggacgccgacacctacccctcagcagacgccggagagaaatgagtagcaacaaagagcagcggtcagcagtrttcgtgatcctctttgccctcatcaccatcctcatcctctacagctccaacagtgccaatgaggtcttccattacggctccctgcggggccgtagccgccgacctgtcaacctcaagaagtggagcatcactgacggctatgtccccattctcggcaacaagacactgccctctcggtgccaccagtgtgtgattgtcagcagctccagccacctgctgggcaccaagctgggccctgagatygagcgggctgagtgtacaatccgcatgartgatgcacccaccactggctactcagctgatgtgggcaacaagaccacctaccgcgtcgtggcccattccagtgtgttccgygtgctgaggaggccccaggagtttgtcaaccggacccctgaaaccgtgttcatcttctggggrcccccgagcaagatgcagaagccccagggcagcctcgtgcgtgtgatccagcgagcgggcctggtgttccccaacatggaagcatatgccgtctctcccggccgcatgcggcaatttgacgacctcttccggggtgagacgggcaaggacagggagaagtctcattcgtggttgagcacaggctggtttaccatggtgatcgcggtggagttgtgtgaccacgtgcatgtctatggcatggtcccccccaactactgcagccagcggccccgcctccagcgcatgccctaccactactacgagcccaaggggccggacgaatgtgtcacctacatccagaatgagcacagtcgcaagggcaaccaccaccgcttcatcaccgagaaaagggtcttctcatcgtgggcccagctgtatggcatcaccttctcccacccctcctggacctaggccacccagcctgtgggacctcaggagggtcagaggagaagcagcctccgcccagccgctaggccagggaccatcttctggccaatcaaggcttgctggagtgtctcccagccaatcagggccttgaggaggatgtatcctccagccaatcagggcctggggaatctgttggcgaatcagggatttgggagtctatgyggttaatcaggggtgtctttcttgtgcagtcagggtctgcgcacagtcaatcagggtagagggggtatttctgagtcaatctgaggctaaggacatgtcctttcccatgaggccttggttcagagccccaggaatggaccccccaatcactccccactctsctgggataatggggtcctgtcccaaggagctgggaacttggtgttgccccctcaatttccagcaccagaaagagagattgtgtgggggtagaagctgtctggaggcccggccagagaatttgtggggttgtggaggttgtgggggcggtggggaggtcccagaggtgggaggcyggcatccaggtcttggctctgccctgagaccttggacaaacccttccccctctctgggcacccttctgcccacaccagtttccagtgcggagtctgagaccctttccacctcccctacaagtgccctcgggtctgtcctccccgtctggaccctcccagccactatcccttgctggaaggctcagctctttggggggtctggggtgacctccccacctcctggaaaactttagggtatttttgcgcaaactccttcagggttgggggactctgaaggaaacgggacaaaaccttaagctgttttcttagcccctcagccagctgccattagcttggctcttaaaggrccaggcctccttttctgccctctagcagggaggttttccaactgttggaggcgcctttggggctgcccctttgtctggagtcactgggggcttccgagggtctccctcgaccctctgtcgtcctgggatggctgtcgggagctgtatcacctgggttctgtcccctggctctgtatcaggcactttattaaagctgggcctcagtggggtgtgtttgtctcctgctcttctggagcctggaaggaaagggcttcaggaggaggctgtgaggctggarggaccaratggaggaggccagcagctagccattgcacactggggtgatgggtgggggcggtgactgccccagacttggttttgtaatgatttgtacaggaataaacacacctacgctccg

SEQ ID NO: 3991 - DNA, 2424 bp, Homo sapiens
ggctattcctggtggccgtgtaggagtaaacagcggctaggtcaaagggctcagagaatacaggaactgagaggcccctggagcaggggacggagctgaggagggccccctaagccccagtttcttccctctgcactcctgcccgccctgcccccggcctgtctgctggaggtgtgaacccacatccctgcccccagggccacctgcaggacgccgacacctacccctcagcagacgccggagagaaatgagtagcaacaaagagcagcggtcagcagtrttcgtgatcctctttgccctcatcaccatcctcatcctctacagctccaacagtgccaatgaggtcttccattacggctccctgcggggccgtagccgccgacctgtcaacctcaagaagtggagcatcactgacggctatgtccccattctcggcaacaagacactgccctctcggtgccaccagtgtgtgattgtcagcagctccagccacctgctgggcaccaagctgggccctgagatygagcgggctgagtgtacaatccgcatgartgatgcacccaccactggctactcagctgatgtgggcaacaagaccacctaccgcgtcgtggcccattccagtgtgttccgygtgctgaggaggccccaggagtttgtcaaccggacccctgaaaccgtgttcatcttctggggrcccccgagcaagatgcagaagccccagggcagcctcgtgcgtgtgatccagcgagcgggcctggtgttccccaacatggaagcatatgccgtctctcccggccgcatgcggcaatttgacgacctcttccggggtgagacgggcaaggacagggagaagtctcattcgtggttgagcacaggctggtttaccatggtgatcgcggtggagttgtgtgaccacgtgcatgtctatggcatggtcccccccaactactgcagccagcggccccgcctccagcgcatgccctaccactactacgagcccaaggggccggacgaatgtgtcacctacatccagaatgagcacagtcgcaagggcaaccaccaccgcttcatcaccgagaaaagggtcttctcatcgtgggcccagctgtatggcatcaccttctcccacccctcctggacctaggccacccagcctgtgggacctcaggagggtcagaggagaagcagcctccgcccagccgctaggccagggaccatcttctggccaatcaaggcttgctggagtgtctcccagccaatcagggccttgaggaggatgtatcctccagccaatcagggcctggggaatctgttggcgaatcagggatttgggagtctatgyggttaatcaggggtgtctttcttgtgcagtcagggtctgcgcacagtcaatcagggtagagggggtatttctgagtcaatctgaggctaaggacatgtcctttcccatgaggccttggttcagagccccaggaatggaccccccaatcactccccactctsctgggataatggggtcctgtcccaaggagctgggaacttggtgttgccccctcaatttccagcaccagaaagagagattgtgtgggggtagaagctgtctggaggcccggccagagaatttgtggggttgtggaggttgtgggggcggtggggaggtcccagaggtgggaggcyggcatccaggtcttggctctgccctgagaccttggacaaacccttccccctctctgggcacccttctgcccacaccagtttccagtgcggagtctgagaccctttccacctcccctacaagtgccctcgggtctgtcctccccgtctggaccctcccagccactatcccttgctggaaggctcagctctttggggggtctggggtgacctccccacctcctggaaaactttagggtatttttgcgcaaactccttcagggttgggggactctgaaggaaacgggacaaaaccttaagctgttttcttagcccctcagccagctgccattagcttggctcttaaaggrccaggcctccttttctgccctctagcagggaggttttccaactgttggaggcgcctttggggctgcccctttgtctggagtcactgggggcttccgagggtctccctcgaccctctgtcgtcctgggatggctgtcgggagctgtatcacctgggttctgtcccctggctctgtatcaggcactttattaaagctgggcctcagtggggtgtgtttgtctcctgctcttctggagcctggaaggaaagggcttcaggaggaggctgtgaggctggarggaccaratggaggaggccagcagctagccattgcacactggggtgatgggtgggggcggtgactgccccagacttggttttgtaatgatttgtacaggaataaacacacctacgctccg

SEQ ID NO: 3992 - DNA, 2411 bp, Homo sapiens
caggcctgggccgggccgtgacggcggcgctaggacccggcgggccgcgggtgcggcgaggcctgggcggcctgaggagcgcggaccccggcgctcggctcccggcgccatgtgagggggctcgggggccgcggggggccgggcgctccccgccggaggtgtgaacccacatccctgcccccagggccacctgcaggacgccgacacctacccctcagcagacgccggagagaaatgagtagcaacaaagagcagcggtcagcagtrttcgtgatcctctttgccctcatcaccatcctcatcctctacagctccaacagtgccaatgaggtcttccattacggctccctgcggggccgtagccgccgacctgtcaacctcaagaagtggagcatcactgacggctatgtccccattctcggcaacaagacactgccctctcggtgccaccagtgtgtgattgtcagcagctccagccacctgctgggcaccaagctgggccctgagatygagcgggctgagtgtacaatccgcatgartgatgcacccaccactggctactcagctgatgtgggcaacaagaccacctaccgcgtcgtggcccattccagtgtgttccgygtgctgaggaggccccaggagtttgtcaaccggacccctgaaaccgtgttcatcttctggggrcccccgagcaagatgcagaagccccagggcagcctcgtgcgtgtgatccagcgagcgggcctggtgttccccaacatggaagcatatgccgtctctcccggccgcatgcggcaatttgacgacctcttccggggtgagacgggcaaggacagggagaagtctcattcgtggttgagcacaggctggtttaccatggtgatcgcggtggagttgtgtgaccacgtgcatgtctatggcatggtcccccccaactactgcagccagcggccccgcctccagcgcatgccctaccactactacgagcccaaggggccggacgaatgtgtcacctacatccagaatgagcacagtcgcaagggcaaccaccaccgcttcatcaccgagaaaagggtcttctcatcgtgggcccagctgtatggcatcaccttctcccacccctcctggacctaggccacccagcctgtgggacctcaggagggtcagaggagaagcagcctccgcccagccgctaggccagggaccatcttctggccaatcaaggcttgctggagtgtctcccagccaatcagggccttgaggaggatgtatcctccagccaatcagggcctggggaatctgttggcgaatcagggatttgggagtctatgyggttaatcaggggtgtctttcttgtgcagtcagggtctgcgcacagtcaatcagggtagagggggtatttctgagtcaatctgaggctaaggacatgtcctttcccatgaggccttggttcagagccccaggaatggaccccccaatcactccccactctsctgggataatggggtcctgtcccaaggagctgggaacttggtgttgccccctcaatttccagcaccagaaagagagattgtgtgggggtagaagctgtctggaggcccggccagagaatttgtggggttgtggaggttgtgggggcggtggggaggtcccagaggtgggaggcyggcatccaggtcttggctctgccctgagaccttggacaaacccttccccctctctgggcacccttctgcccacaccagtttccagtgcggagtctgagaccctttccacctcccctacaagtgccctcgggtctgtcctccccgtctggaccctcccagccactatcccttgctggaaggctcagctctttggggggtctggggtgacctccccacctcctggaaaactttagggtatttttgcgcaaactccttcagggttgggggactctgaaggaaacgggacaaaaccttaagctgttttcttagcccctcagccagctgccattagcttggctcttaaaggrccaggcctccttttctgccctctagcagggaggttttccaactgttggaggcgcctttggggctgcccctttgtctggagtcactgggggcttccgagggtctccctcgaccctctgtcgtcctgggatggctgtcgggagctgtatcacctgggttctgtcccctggctctgtatcaggcactttattaaagctgggcctcagtggggtgtgtttgtctcctgctcttctggagcctggaaggaaagggcttcaggaggaggctgtgaggctggarggaccaratggaggaggccagcagctagccattgcacactggggtgatgggtgggggcggtgactgccccagacttggttttgtaatgatttgtacaggaataaacacacctacgctccg

SEQ ID NO: 3993 - DNA, 907 bp, Homo sapiens
ttcgggaacgccggctcccggcatgccgcgcgctgacagccttataaatagtcgcctttgccggccgccgcgaggacgggcagggcacgcactggccccggcgcccacccgcacccctccccagagcactgacacggctcccgggacctcggcaggatggaagagaagctgaagaaaaccaagatcatctttgtggtgggtgggcctggctcagggaagggcacccagtgtgagaagatcgtgcagaagtatggctayacccacctctccaccggggacctcctgcggtccgaggtcagctcaggctcrgccaggggcaagaagctgtcggaaatcatggaraaggggcagctggttccactggagacagtgttggacatgctccgggatgccatggtggccaaagtcaatacttccaaaggcttcctgattgatggctacccgcgggaggtgcagcaaggagaagagtttgagygacggattggacagcccacactgctgctgtatgtggacgcaggccctsagaccatgacccagyggctcttgaaacgtggagagaccagcgggcgtgtggacgacaatgaggagaccatcaaaaagcggctggagacctattacaaggccacagaaccygtcatcrccttctatgagaaacgtggcattgtgcgcaaggtcaacgctgagggctccgtggacagtgtcttctcccaggtctgcacccacctggacgccctaaagtagcaacgctggagccgcttccccagctcagagccccgccccaccccgtcctgattmgaggtcctcctggcctgagcgcagcgcctccaccctgccctgctgagcacagacggaggaagccgcttatcctgttttcatggacagctgagcactaaaggaatttctaagg

SEQ ID NO: 3994 - DNA, 917 bp, Homo sapiens
ttctgggagtttcgaggggagcagctctgcagttgtgtggccgctgtttatgtccctcgtgccatcctcactgtcccagcccctccagcgggaacccaggtggatgggagggggctactgcccttctgtgacagagcactgacacggctcccgggacctcggcaggatggaagagaagctgaagaaaaccaagatcatctttgtggtgggtgggcctggctcagggaagggcacccagtgtgagaagatcgtgcagaagtatggctayacccacctctccaccggggacctcctgcggtccgaggtcagctcaggctcrgccaggggcaagaagctgtcggaaatcatggaraaggggcagctggttccactggagacagtgttggacatgctccgggatgccatggtggccaaagtcaatacttccaaaggcttcctgattgatggctacccgcgggaggtgcagcaaggagaagagtttgagygacggattggacagcccacactgctgctgtatgtggacgcaggccctsagaccatgacccagyggctcttgaaacgtggagagaccagcgggcgtgtggacgacaatgaggagaccatcaaaaagcggctggagacctattacaaggccacagaaccygtcatcrccttctatgagaaacgtggcattgtgcgcaaggtcaacgctgagggctccgtggacagtgtcttctcccaggtctgcacccacctggacgccctaaagtagcaacgctggagccgcttccccagctcagagccccgccccaccccgtcctgattmgaggtcctcctggcctgagcgcagcgcctccaccctgccctgctgagcacagacggaggaagccgcttatcctgttttcatggacagctgagcactaaaggaatttctaagg

SEQ ID NO: 3995 - DNA, 916 bp, Homo sapiens
atggcaacatatgttgtggttgctaagcccccactgccgggggaggcgggtgatgggccggcccagggcctgagaggggaagggcagggtgcayaggagacayggcaggacgggaccatgggctgctgctcctcgagtgacccccgcagagaagacgatctgagagccagagagaagctgaagaaaaccaagatcatctttgtggtgggtgggcctggctcagggaagggcacccagtgtgagaagatcgtgcagaagtatggctayacccacctctccaccggggacctcctgcggtccgaggtcagctcaggctcrgccaggggcaagaagctgtcggaaatcatggaraaggggcagctggttccactggagacagtgttggacatgctccgggatgccatggtggccaaagtcaatacttccaaaggcttcctgattgatggctacccgcgggaggtgcagcaaggagaagagtttgagygacggattggacagcccacactgctgctgtatgtggacgcaggccctsagaccatgacccagyggctcttgaaacgtggagagaccagcgggcgtgtggacgacaatgaggagaccatcaaaaagcggctggagacctattacaaggccacagaaccygtcatcrccttctatgagaaacgtggcattgtgcgcaaggtcaacgctgagggctccgtggacagtgtcttctcccaggtctgcacccacctggacgccctaaagtagcaacgctggagccgcttccccagctcagagccccgccccaccccgtcctgattmgaggtcctcctggcctgagcgcagcgcctccaccctgccctgctgagcacagacggaggaagccgcttatcctgttttcatggacagctgagcactaaaggaatttctaagg

SEQ ID NO: 3996 - DNA, 2495 bp, Homo sapiens
ctgacttggcaggactgtgcaattgtcagaaggccgtggggagtgggggccagtgcctgcakcctrccctgcctctctcacaggcccttagagcatcgccaggtgcagagctccacagctctctttcccaaggagtaatcagagggtgagaacrtggagcctggtggacaggtgaaagcactgggatctttctgcccagaaaggggaaagttgcacatttatatcctagagggaagcgacagcagtgcttctccctgtgctgaggtacaggagccatgtggctagaaatcctcctcacttcagtgctgggctttgccatctactggttcatctcccgggacaaagaggaaactttgccacttgaagatgggtggtgggggccaggcacgaggtccgcagccasggaggacgacagcatcygccctttcaaggtggaaacgtcagatgaggagatccacgacttacaccagaggatcgayaagttccgtttcaccccacctttggaggacagctgcttccactatggcttcaactccaactacctgaagaaagtcatctcctactrgcggaatgaattygactggaagaagcaggtggagattctcaacagayaccctcacttcaagactaarattgaagggctggacatccacttcatccacgtgaagcccccccagctgcccgcaggccrtaccccgaagcccttgctgatggtgcacggctggcccggctctttctacgagttttataagatcatcccactcctgactgaccccaagaaccatggcctgagcgatgagcacgtttttgaagtcatctgcccttccatccctggctatggcttctcagaggcatcctccaagaaggggttcaactcggtggccaccgccaggatcttttacaagctgatgctgcggctgggcttccaggaattctacattcaaggaggggactgggggtccctgatctgcactaatatggcccagctggtgcccagccacgtgaaaggcctgcayttgaacatggctttggttttragcaacttctctaccctgaccctcctcctgggacagcgtttcgggaggtttcttggcctcactgagagggatgtggagctgctgtacccygtcaaggagaaggtattytacagcctgatgagggagagcggctacatgcacatccagtgcaccaagcctgacaccgtaggctctgctctgaatgactctcctgtgggtctggctgcctatattctagagaagttttccacctggaccaatacggaattccgatacctggaggatggaggcctggaaaggaagttctccctggacgacctgctgaccaaygtcatgctctactggacaacaggcaccatcatctcctcccagcgcttctmcaaggagaacctgggacagggctggatgacccagaagcawgagcggatgaaggtctatgtgcccactggcttctctgccttcccttttgagctaytgcacacgcctgaaaagtgggtgaggttcaagtacccaaagctcatctcctattcctacatggttcgtgggggccactttgcggcctttgaggagccggagctgctcgcccaggacatccgcaagttcctgtcggtgctggagcrgcaatgacccacccctctccccccgcctgccacctccccccacaagtgccctccaggcttttcttggggaagataccccttttctgaggaatgagtttgcctccgtcccctgcccatgctgggagcccacgctcaccccctcacccctccaagctcactccccaacccccaactccgtgtggtaagcaacatggctttgatgataaacgactttactctaaaagcggctggaactcagtgacatgagcgtgcgctgaccccacatggggccccctgtgcaagcagagctggccggcccctccttgctggcagaggcacgggaggcctgctggggatgaggccactggccagggctatgctgcaccagaccaatggcaccgcccccacccctcccagcgcaggggcagcttggagcagaggcagcactggccaccrctgcgggggcaagtcagcgtcaagagagtccctgagtgagaaggcccagataagcccaggccccccaggccagcggacaggcacaggcagggcctacagaggtgccaaggccccaggccagttgtgctaggagcctggacctgctcttccacacccccatcccgccccwactgcacaggcttgtgccttggtgccccctggaggcagcagggaggaggcttctcaggcagaagtcttaagttgcatcccattccccagaatccccaggagggagaagagggatgggctgcccctccttcctgccagagccacagctcamgggcagtgggatggccctgcacccagcccaggtaccccttcctctgtgccgaccatgctgtcctttggctccgaggaggccctgagcactgcccacccccacacc

SEQ ID NO: 3997 - DNA, 2242 bp, Homo sapiens
gcctgcgagccgagaccgagccatgtggctagaaatcctcctcacttcagtgctgggctttgccatctactggttcatctcccgggacaaagaggaaactttgccacttgaagatgggtggtgggggccaggcacgaggtccgcagccasggaggacgacagcatcygccctttcaaggtggaaacgtcagatgaggagatccacgacttacaccagaggatcgayaagttccgtttcaccccacctttggaggacagctgcttccactatggcttcaactccaactacctgaagaaagtcatctcctactrgcggaatgaattygactggaagaagcaggtggagattctcaacagayaccctcacttcaagactaarattgaagggctggacatccacttcatccacgtgaagcccccccagctgcccgcaggccrtaccccgaagcccttgctgatggtgcacggctggcccggctctttctacgagttttataagatcatcccactcctgactgaccccaagaaccatggcctgagcgatgagcacgtttttgaagtcatctgcccttccatccctggctatggcttctcagaggcatcctccaagaaggggttcaactcggtggccaccgccaggatcttttacaagctgatgctgcggctgggcttccaggaattctacattcaaggaggggactgggggtccctgatctgcactaatatggcccagctggtgcccagccacgtgaaaggcctgcayttgaacatggctttggttttragcaacttctctaccctgaccctcctcctgggacagcgtttcgggaggtttcttggcctcactgagagggatgtggagctgctgtacccygtcaaggagaaggtattytacagcctgatgagggagagcggctacatgcacatccagtgcaccaagcctgacaccgtaggctctgctctgaatgactctcctgtgggtctggctgcctatattctagagaagttttccacctggaccaatacggaattccgatacctggaggatggaggcctggaaaggaagttctccctggacgacctgctgaccaaygtcatgctctactggacaacaggcaccatcatctcctcccagcgcttctmcaaggagaacctgggacagggctggatgacccagaagcawgagcggatgaaggtctatgtgcccactggcttctctgccttcccttttgagctaytgcacacgcctgaaaagtgggtgaggttcaagtacccaaagctcatctcctattcctacatggttcgtgggggccactttgcggcctttgaggagccggagctgctcgcccaggacatccgcaagttcctgtcggtgctggagcrgcaatgacccacccctctccccccgcctgccacctccccccacaagtgccctccaggcttttcttggggaagataccccttttctgaggaatgagtttgcctccgtcccctgcccatgctgggagcccacgctcaccccctcacccctccaagctcactccccaacccccaactccgtgtggtaagcaacatggctttgatgataaacgactttactctaaaagcggctggaactcagtgacatgagcgtgcgctgaccccacatggggccccctgtgcaagcagagctggccggcccctccttgctggcagaggcacgggaggcctgctggggatgaggccactggccagggctatgctgcaccagaccaatggcaccgcccccacccctcccagcgcaggggcagcttggagcagaggcagcactggccaccrctgcgggggcaagtcagcgtcaagagagtccctgagtgagaaggcccagataagcccaggccccccaggccagcggacaggcacaggcagggcctacagaggtgccaaggccccaggccagttgtgctaggagcctggacctgctcttccacacccccatcccgccccwactgcacaggcttgtgccttggtgccccctggaggcagcagggaggaggcttctcaggcagaagtcttaagttgcatcccattccccagaatccccaggagggagaagagggatgggctgcccctccttcctgccagagccacagctcamgggcagtgggatggccctgcacccagcccaggtaccccttcctctgtgccgaccatgctgtcctttggctccgaggaggccctgagcactgcccacccccacacc

SEQ ID NO: 3998 - DNA, 2721 bp, Homo sapiens
agccggagagatcgcgcgcctgccgccgccggagcctgcgagccgagaccgtaagcgcccggggccggccgggcccgcactccccggacgcagacgcggttcgggctccgcgcgggctcggccgccggggtgggcggcgggccggggcgccgaggggtcggggctgcggtcggcccgcaggggtgcagagggacttgtagttggtccgcccccagctcctgccccggccaggagactgcgcgtgccgcctactgggggaaggagcctgcaggcgaccgcggacttctcgcagggaattccgcgtcccagactgtgggcggacgccgcagggagggaggctcgcgaccccgagagcgcaccgcgtcccctggcctgggcgagctctgcttccagggccgtggctcgctcggcggtgaaatgcacttaatttgtcacccaagtcggaacactgattttcatgcgcgtccgtgtgaagagaccaccaaacaggctttgtgagccatgtggctagaaatcctcctcacttcagtgctgggctttgccatctactggttcatctcccgggacaaagaggaaactttgccacttgaagatgggtggtgggggccaggcacgaggtccgcagccasggaggacgacagcatcygccctttcaaggtggaaacgtcagatgaggagatccacgacttacaccagaggatcgayaagttccgtttcaccccacctttggaggacagctgcttccactatggcttcaactccaactacctgaagaaagtcatctcctactrgcggaatgaattygactggaagaagcaggtggagattctcaacagayaccctcacttcaagactaarattgaagggctggacatccacttcatccacgtgaagcccccccagctgcccgcaggccrtaccccgaagcccttgctgatggtgcacggctggcccggctctttctacgagttttataagatcatcccactcctgactgaccccaagaaccatggcctgagcgatgagcacgtttttgaagtcatctgcccttccatccctggctatggcttctcagaggcatcctccaagaaggggttcaactcggtggccaccgccaggatcttttacaagctgatgctgcggctgggcttccaggaattctacattcaaggaggggactgggggtccctgatctgcactaatatggcccagctggtgcccagccacgtgaaaggcctgcayttgaacatggctttggttttragcaacttctctaccctgaccctcctcctgggacagcgtttcgggaggtttcttggcctcactgagagggatgtggagctgctgtacccygtcaaggagaaggtattytacagcctgatgagggagagcggctacatgcacatccagtgcaccaagcctgacaccgtaggctctgctctgaatgactctcctgtgggtctggctgcctatattctagagaagttttccacctggaccaatacggaattccgatacctggaggatggaggcctggaaaggaagttctccctggacgacctgctgaccaaygtcatgctctactggacaacaggcaccatcatctcctcccagcgcttctmcaaggagaacctgggacagggctggatgacccagaagcawgagcggatgaaggtctatgtgcccactggcttctctgccttcccttttgagctaytgcacacgcctgaaaagtgggtgaggttcaagtacccaaagctcatctcctattcctacatggttcgtgggggccactttgcggcctttgaggagccggagctgctcgcccaggacatccgcaagttcctgtcggtgctggagcrgcaatgacccacccctctccccccgcctgccacctccccccacaagtgccctccaggcttttcttggggaagataccccttttctgaggaatgagtttgcctccgtcccctgcccatgctgggagcccacgctcaccccctcacccctccaagctcactccccaacccccaactccgtgtggtaagcaacatggctttgatgataaacgactttactctaaaagcggctggaactcagtgacatgagcgtgcgctgaccccacatggggccccctgtgcaagcagagctggccggcccctccttgctggcagaggcacgggaggcctgctggggatgaggccactggccagggctatgctgcaccagaccaatggcaccgcccccacccctcccagcgcaggggcagcttggagcagaggcagcactggccaccrctgcgggggcaagtcagcgtcaagagagtccctgagtgagaaggcccagataagcccaggccccccaggccagcggacaggcacaggcagggcctacagaggtgccaaggccccaggccagttgtgctaggagcctggacctgctcttccacacccccatcccgccccwactgcacaggcttgtgccttggtgccccctggaggcagcagggaggaggcttctcaggcagaagtcttaagttgcatcccattccccagaatccccaggagggagaagagggatgggctgcccctccttcctgccagagccacagctcamgggcagtgggatggccctgcacccagcccaggtaccccttcctctgtgccgaccatgctgtcctttggctccgaggaggccctgagcactgcccacccccacacc

SEQ ID NO: 3999 - DNA, 2059 bp, Homo sapiens
cgcctgccgccgccggagcctgcgagccgagaccggaattccgcgtcccagactgtgggcggacgccgcagggagggaggctcgcgaccccgagagcgcaccgcgtcccctggcctgggcgagctctgcttccagggccgtggctcgctcggcggtgaaatgcacttaatttgtcacccaagtcggaacactgattttcatgcgcgtccgtgtgaagagaccaccaaacaggctttgtgagccatgtggctagaaatcctcctcacttcagtgctgggctttgccatctactggttcatctcccgggacaaagaggaaactttgccacttgaagatgggtggtgggggccaggcacgaggtccgcagccasggaggacgacagcatcygccctttcaaggtggaaacgtcagatgaggagatccacgacttacaccagaggatcgayaagttccgtttcaccccacctttggaggacagctgcttccactatggcttcaactccaactacctgaagaaagtcatctcctactrgcggaatgaattygactggaagaagcaggtggagattctcaacagayaccctcacttcaagactaarattgaagggctggacatccacttcatccacgtgaagcccccccagctgcccgcaggccrtaccccgaagcccttgctgatggtgcacggctggcccggctctttctacgagttttataagatcatcccactcctgactgaccccaagaaccatggcctgagcgatgagcacgtttttgaagtcatctgcccttccatccctggctatggcttctcagaggcatcctccaagaaggggttcaactcggtggccaccgccaggatcttttacaagctgatgctgcggctgggcttccaggaattctacattcaaggaggggactgggggtccctgatctgcactaatatggcccagctggtgcccagccacgtgaaaggcctgcayttgaacatggctttggttttragcaacttctctaccctgaccctcctcctgggacagcgtttcgggaggtttcttggcctcactgagagggatgtggagctgctgtacccygtcaaggagaaggtattytacagcctgatgagggagagcggctacatgcacatccagtgcaccaagcctgacaccgtaggctctgctctgaatgactctcctgtgggtctggctgcctatattctagagaagttttccacctggaccaatacggaattccgatacctggaggatggaggcctggaaaggaagttctccctggacgacctgctgaccaaygtcatgctctactggacaacaggcaccatcatctcctcccagcgcttctmcaaggagaacctgggacagggctggatgacccagaagcawgagcggatgaaggtctatgtgcccactggcttctctgccttcccttttgagctaytgcacacgcctgaaaagtgggtgaggttcaagtacccaaagctcatctcctattcctacatggttcgtgggggccactttgcggcctttgaggagccggagctgctcgcccaggacatccgcaagttcctgtcggtgctggagcrgcaatgacccacccctctccccccgcctgccacctccccccacaagtgccctccaggcttttcttggggaagataccccttttctgaggaatgagtttgcctccgtcccctgcccatgctgggagcccacgctcaccccctcacccctccaagctcactccccaacccccaactccgtgtggtaagcaacatggctttgatgataaacgactttactctaaaagcggctggaactcagtgacatgagcgtgcgctgaccccacatggggccccctgtgcaagcagagctggccggcccctccttgctggcagaggcacgggaggcctgctggggatgaggccactggccagggctatgctgcaccagaccaatggcaccgcccccacccctcccagcgcaggggcagcttggagcagaggcagcactggccaccrctgcgggggcaagtcagcgt

SEQ ID NO: 4000 - DNA, 2263 bp, Homo sapiens
tcagaaggacagattttattacagcataatcacacctcatttctttcatcagcagttgtcaccagacgctgttacttcctaaaatggcggacaatcttcccacagagtttgaygtggttataatagggacaggtttgcccgaatccatccttgcagctgcatgttcaagaagtggtcagagggttctgcatattgattcaagaagctactatggaggaaactgggctagtttcagcttttcaggattgctatcctggttgaaggagtatcagcaaaacaatgacattggggaagaaagtactgttgtatggcaggacctgatccatgaaacagaagaagccatcactcttcgcaagaaggatgaaactattcaacacacagaagctttttgctacgccagtcaggatatggaggacaacgttgaagagattggtgctctgcagaaaaatccttctttgggggtgtctaataccttcactgaagttctggattctgcattacctgaagaaagccagttatcrtattttaatagcgacgaaatgcctgcaaaacacactcagaaaagtgatacagagatttcactagaagtaactgatgtagaggaatcagtggagaaggaaaagtattgtggagataaaacttgtatgcacacagtttcagataaagatggagataaagatgaaagcaaatctacagtagaagataaggycgatgaaccaattagaaataggattacttactctcaaatagttaaagaaggcaggaggtttaatattgatttggtgtcaaaactgctgtattctcaaggattgctaattgatcttttaatcaaatcagatgttagtcgttmtgtagaatttaaaaatgtcactaggattcttgcatttcgggaaggaaaggtagaacaagttccttgttccagagcagatgtctttaatagcaaggaactcaccatggttgaaaagaggatgctaatgaaatttctcacattttgtttagagtatgaacaacatcctgatgaataccaagctttcaggcagtgttcattttcagaatacttaaaaactaaaaaactaactcccaaccttcaacattttgtactgcactcaattgcaatgacatcagaatcatcttgcactacaatagatggtcttaacgcaactaaaaacttccttcagtgtctcggacggtttggcaacaccccctttttatttcccttgtatggccaaggagaaattccccagggtttctgtaggatgtgtgcagtttttggtggaatctattgtcttcgtcataaagtacaatgctttgtagtcgacaaagaatctggacgatgtaaagcaattatagatcactttggtcaaagaataaatgctaaatattttattgtggaagacagttacctttctgaggaaacatgctcaaatgtgcagtataagcagatctctagggcagtactcattacagatcagtctatactaaagacagatttagatcagcagacttccattctgatagttcctccagcagagccaggagcttgtgctgtacgggtcacagaattatgttcttcaaccatgacatgcatgaaggacacctatctggtacatttgacatgttcatcttctaaaacagcaagagaagacttagaatcagtggtgaagaaattattcactccgtatactgaaacagaaataaacgaggaagaacttacaaagccaagactcttgtgggctctttattttaatatgagagattcctcgggaatcagcagaagctcgtataatggcttgccttccaatgtttatgtctgctctgggcctgactgtggcctgggaaatgagcatgctgtcaagcaagctgaaacacttttccaggagatctttccaactgaagaattctgccctccacctccaaatccagaagacattatctttgatggtgatgataagcagccagaggctcctggaaccaataatgtagtaatggccaaactagaatcctctgaggaaagcaaaaacctagaaagcccagagaagcaccttcaaaattagaaaagagcaatctcgaaatgctgttttggacctccttcatggcatcagaattttctcatttaaaggacagtttcccatatgagtaattagaagtggttatatatgatgaatgctatgcagatgttgtctttaactctcagacattcagcattgaatatctttgttaacctatcaatgagtgatttattgattattgaacattttgttta

SEQ ID NO: 4001 - DNA, 3294 bp, Homo sapiens
aatccgctgctgccggcgtcgggtgcgctcggcctcgcccgcggccctccttccccggcttccgctcgccgctcgttcactccacgcgccgctgccgccgccgccgccgtcgtgccgtgccgcacctccgtagctgactcggtactctctgaagatggcagaagctcaccaagctgtggcctttcagttcacggtcactccggacgggattgacctgcggctgagccatgaagctcttagacaaatctatctctctggacttcattcctggaaaaagaagttcatcagattcaagaacggcatcatcactggcgtgtacccggcaagcccctccagttggcttatcgtggtggtgggcgtgatgacaacgatgtacgccaagatcgacccctcrttaggaataattgcaaaaatcaatcggactctggaaacggccaactgcatgtccagcyagaygaagaacgtggtcagcggcgtgctgtttggcacyggcctgtgggtggccctcatcgtcaccatgygctactccctgaaagtgctgctctcctaccacgggtggatgttcactgagcacggcaagatgagtcgtgccaccaagatctggatgggtatggtcaagatcttttcaggccgaaaacccatgttgtacagcttccagacatcgctgcctcgcctgccggtcccggctgtcaaagacactgtgaacaggtatctacagtcggtgaggcctcttatgaaggaagaagacttcaaacggatgacagcacttgctcaagattttgctgtcggtcttggaccaagattacagtggtatttgaagttaaaatcctggtgggctacaaattacgtgagcgactggtgggaggagtacatctacctccgaggacgagggccgctcatggtgaacagcaactattatgccatggatctgctgtatatccttccaactcacattcaggcagcaagagccggcaacrccatccatgccatcctgctttacaggcgcaaactggaccgggaggaaatcaaaccaattcgtcttttgggatccacgattccactctgctccgctcagtgggagcggatgtttaatacttcccggatcccaggagaggagacagacaccatccagcacatgagagacagcaagcacatcgtcgtgtaccatcgaggacgctacttcaaggtctggctctaccatgatgggcggctgctgaagcccygggagatggagcagcagatgcagaggatcctggacaatacctcggagcctcagcccggggaggccaggctggcagccctcaccgcaggagacagagttccctgggccaggtgtcgtcaggcctattttggacgtgggaaaaataagcagtctcttgatgctgtggagaaagyagcgttcttygtgacgttagatgaaactgaagaaggatacagaagtgaagacccggatacgtcaatggacagctacgccaaatctctactacacggccgatgttacgacaggtggtttgrcaagtcgttcacgtttgttgtcttcaaaaacgggaagatgggcctcaacgctgaacactcctgggcagatgcgccgatcgtggcccaccyttgggagtacgtcatgtccattgacagcctccagctgggctatgcggaggatgggcactgcaaaggcgacatcaatcygaacattccgtaccccaccaggctgcagtgggacatcccgggggaatgtcaagaggttatagagacctccctgaacaccgcaaatcttctggcaaacgacgtggatttccattccttcccattcgtagcctttggtaaaggaatcatcaagaaatgtcgcacgagcccagacgcctttgtgcagctggccctccagctggcgcactacaaggacatgggcaagttttgcctcacatacgargcctccatgacccggctcttccgagaggggaggacggagaccgtgcgctcctgcaccactgagtcatgcgacttcgtgcgggccatggtggacccggcccagacggtggaacagaggctgaagttgttcaagttggcgtctgagaagcatcagcatatgtatcgcctcgccatgaccggctctgggatcgatcgtcacctcttctgcctttacgtggtgtctaaatatctcgctgtggagtcccctttccttaaggaagttttatctgagccttggagattatcaacaagccagacccctcagcagcaagtggagctgtttgacttggagaataacccagagtacgtgtccagcggagrgggctttggaccggttgctgatgacggctatggtgtgtcgtacatccttgtgggagagaacctcatcaatttccacatttcttccaagttctcttgccctgagacggattctcatcgctttggaaggcacctgaaagaagcaatgactgacatcatcactttgtttggtctcagttctaattccaaaaagtaattccactggagctgctgggaaggaaaacgagctcttctgatgcaaaccaaatgaaaaataggcattaatcctgaccttagctcgggatgaaacactgctcttaaaaaaactcagttttccttccagaaaatgtgggtgtttttttttcctagaacagtatctctcccctgtgaagcataaccccactacttccagacttgccctcccttgggggacatctgataaagtctcccctgatgtctccgcatcggcttggatttattaagggatgcaaatcttgttgagttaatgaaggaattagtagggttgtggcttcacacacagtggaatggaaatggtgtgctttctcagtggcaaccgaaggcctagtgcttaagggcatttagcatcatccaagcagggtaaacttttgttttgttaaaagaaaaatgtgttattcaagttggtgtccccagttgtagctaacacatctggaatgcactaaccaaaatgctgtgctttggagacctgcttttgtcaccgtgggtaaccgttcccgtctggtccagtagcctgtgtttgcctctccacatttgaagcaagcaggatgcaaggtcttcagttttactgaccttgtatgtcttcaagtcttcacaacccagtgccttaaaaatgaaaggccctaaatgtaagggagatggagagaaagatttattttgtagagtctttgggtggaattgtgggtatactgttcccttcacaattgactgagtatggataaccgtacataagcatttgctacaccccaccagccccctccccctcagaaacaccagttc

SEQ ID NO: 4002 - DNA, 3237 bp, Homo sapiens
ctcacctgcctcacctggctgctgtctgtttccaggaagagggcatcagtgggcgaaaacaggaaaatcatcctgtgcttccaggtactctctgaagatggcagaagctcaccaagctgtggcctttcagttcacggtcactccggacgggattgacctgcggctgagccatgaagctcttagacaaatctatctctctggacttcattcctggaaaaagaagttcatcagattcaagaacggcatcatcactggcgtgtacccggcaagcccctccagttggcttatcgtggtggtgggcgtgatgacaacgatgtacgccaagatcgacccctcrttaggaataattgcaaaaatcaatcggactctggaaacggccaactgcatgtccagcyagaygaagaacgtggtcagcggcgtgctgtttggcacyggcctgtgggtggccctcatcgtcaccatgygctactccctgaaagtgctgctctcctaccacgggtggatgttcactgagcacggcaagatgagtcgtgccaccaagatctggatgggtatggtcaagatcttttcaggccgaaaacccatgttgtacagcttccagacatcgctgcctcgcctgccggtcccggctgtcaaagacactgtgaacaggtatctacagtcggtgaggcctcttatgaaggaagaagacttcaaacggatgacagcacttgctcaagattttgctgtcggtcttggaccaagattacagtggtatttgaagttaaaatcctggtgggctacaaattacgtgagcgactggtgggaggagtacatctacctccgaggacgagggccgctcatggtgaacagcaactattatgccatggatctgctgtatatccttccaactcacattcaggcagcaagagccggcaacrccatccatgccatcctgctttacaggcgcaaactggaccgggaggaaatcaaaccaattcgtcttttgggatccacgattccactctgctccgctcagtgggagcggatgtttaatacttcccggatcccaggagaggagacagacaccatccagcacatgagagacagcaagcacatcgtcgtgtaccatcgaggacgctacttcaaggtctggctctaccatgatgggcggctgctgaagcccygggagatggagcagcagatgcagaggatcctggacaatacctcggagcctcagcccggggaggccaggctggcagccctcaccgcaggagacagagttccctgggccaggtgtcgtcaggcctattttggacgtgggaaaaataagcagtctcttgatgctgtggagaaagyagcgttcttygtgacgttagatgaaactgaagaaggatacagaagtgaagacccggatacgtcaatggacagctacgccaaatctctactacacggccgatgttacgacaggtggtttgrcaagtcgttcacgtttgttgtcttcaaaaacgggaagatgggcctcaacgctgaacactcctgggcagatgcgccgatcgtggcccaccyttgggagtacgtcatgtccattgacagcctccagctgggctatgcggaggatgggcactgcaaaggcgacatcaatcygaacattccgtaccccaccaggctgcagtgggacatcccgggggaatgtcaagaggttatagagacctccctgaacaccgcaaatcttctggcaaacgacgtggatttccattccttcccattcgtagcctttggtaaaggaatcatcaagaaatgtcgcacgagcccagacgcctttgtgcagctggccctccagctggcgcactacaaggacatgggcaagttttgcctcacatacgargcctccatgacccggctcttccgagaggggaggacggagaccgtgcgctcctgcaccactgagtcatgcgacttcgtgcgggccatggtggacccggcccagacggtggaacagaggctgaagttgttcaagttggcgtctgagaagcatcagcatatgtatcgcctcgccatgaccggctctgggatcgatcgtcacctcttctgcctttacgtggtgtctaaatatctcgctgtggagtcccctttccttaaggaagttttatctgagccttggagattatcaacaagccagacccctcagcagcaagtggagctgtttgacttggagaataacccagagtacgtgtccagcggagrgggctttggaccggttgctgatgacggctatggtgtgtcgtacatccttgtgggagagaacctcatcaatttccacatttcttccaagttctcttgccctgagacggattctcatcgctttggaaggcacctgaaagaagcaatgactgacatcatcactttgtttggtctcagttctaattccaaaaagtaattccactggagctgctgggaaggaaaacgagctcttctgatgcaaaccaaatgaaaaataggcattaatcctgaccttagctcgggatgaaacactgctcttaaaaaaactcagttttccttccagaaaatgtgggtgtttttttttcctagaacagtatctctcccctgtgaagcataaccccactacttccagacttgccctcccttgggggacatctgataaagtctcccctgatgtctccgcatcggcttggatttattaagggatgcaaatcttgttgagttaatgaaggaattagtagggttgtggcttcacacacagtggaatggaaatggtgtgctttctcagtggcaaccgaaggcctagtgcttaagggcatttagcatcatccaagcagggtaaacttttgttttgttaaaagaaaaatgtgttattcaagttggtgtccccagttgtagctaacacatctggaatgcactaaccaaaatgctgtgctttggagacctgcttttgtcaccgtgggtaaccgttcccgtctggtccagtagcctgtgtttgcctctccacatttgaagcaagcaggatgcaaggtcttcagttttactgaccttgtatgtcttcaagtcttcacaacccagtgccttaaaaatgaaaggccctaaatgtaagggagatggagagaaagatttattttgtagagtctttgggtggaattgtgggtatactgttcccttcacaattgactgagtatggataaccgtacataagcatttgctacaccccaccagccccctccccctcagaaacaccagttc

SEQ ID NO: 4003 - DNA, 3058 bp, Homo sapiens
atgcacggcagggaggcgggaccctttgtttgtgtgtgcgtgttgttggcctccatccccactccccagactccacttctccaggcctctctcccgccttttcatcccgcatccgcaggacacccaatcaccgggcaacaggatgccttccgcgccttccaccctgacctggaattcgtgggcaagttcttgaaacccctgctgattggtgaactggccccggaggagcccagccaggaccacggcaagaactcaaagatcactgaggacttccgggccctgaggaagacggctgaggacatgaacctgttcaagaccaaccacgtgttcttcctcctcctcctggcccacatcatcgccctggagagcattgcatggttcactgtcttttactttggcaatggctggattcctaccctcatcacggcctttgtccttgctacctctcaggcccaagctggatggctgcaacatgattatggccacctgtctgtctacagaaaacccaagtggaaccaccttgtccacaaattcgtcattggccacttaaagggtgcctctgccaactggtggaatcatcgccacttccagcaccacgccaagcctaacatcttccacaaggatcccgatgtgaacatgctgcacgtgtttgttctgggcgaatggcagcccatcgagtacggcaagaagaagctgaaatacctgccctacaatcaccagcacgaatacttcttcctgattgggccgccgctgctcatccccatgtatttccagtaccagatcatcatgaccatgatcgtccataaraactgggtggacctggcctgggccgtcagctactacatccggttcttcatcacctacatccctttctacggcatcctgggagccctccttttcctcaacttcatcaggttcctggagagccactggtttgtgtgggtcacacagatgaatcacatcgtcatggagattgaccaggaggcctaccgtgactggttcagtagccagctgacagccacctgcaacgtggagcagtccttcttcaacgactggttcagtggacaccttaacttccagattgagcaccacctcttccccaccatgccccggcacaacttacacaagatcgccccgctggtgaagtctctatgtgccaagcatggcattgaataccaggagaagccgctactgagggccctgctggacatcatcaggtccctraagaagtctgggaagctgtggctggacgcctaccttcacaaatgaagccacagcccccgggacacygtggggaaggggtgcaggtggggtgatggccagaggaatgatgggcttttgttctgaggggtgtccgagaggctggtgtatgcactgctcacggaccccatgttggatctttctccctttctcctctcctttttctcttcacatctcccccatagcaccctgccctcatgggacctgccctccctcagccgtcagccatcagccatggccctcccagtgcctcctagccccttcttccaaggagcagagaggtggccaccgggggtggctctgtcctacctccactctctgcccctaaagatgggaggagaccagcggtccatgggtctggcctgtgagtctccccttgcagcctggtcactaggcatcacccccgctttggttcttcagatgctcttggggttcataggggcaggtcctagtcgggcagggcccctgaccctcccggcctggcttcactctccctgacggctgccattggtccaccctttcatagagaggcctgctttgttacaaagctcgggtctccctcctgcagctcggttaagtacccgaggcctctcttaagatgtccagggccccaggcccgcgggcacagccagcccaaaccttgggccctggaagagtcctccaccccatcactagagtgctctgaccctgggctttcacgggccccattccaccgcctccccaacttgagcctgtgaccttgggaccaaagggggagtccctcgtctcttgtgactcagcagaggcagtggccacgttcagggaggggccggctggcctggaggctcagcccaccctccagcttttcctcagggtgtcctgaggtccaagattctggagcaatctgacccttctccaaaggctctgttatcagctgggcagtgccagccaatccctggccatttggccccaggggacgtgggccctgcaggctgcaggagggcactggagctgggaggtctcgtcccagccctccccatctcggggctgctgtgtggacggcgctgcctcaggcactctcctgtctgaacctgcccttactgtgtttaacctgttgctccaggatgcattctgataggagggggcggcagggctgggccttgtgacaatctgcctttcaccacatggccttgcctcggtggccctgactgtcagggagggccagggaggcagagcgggagggagtctcaggaggaggctgccctgaggggctggggagggggtacctcatgaggaccagggtggagctgagaagaggaggaggtgggggctggaggtgctggtagctgaggggacgggcaagtgagaggggagggagggaagtcctgggaggatcctgagctgctgttgcagtctaacccactaatcagttcttagattcaggggaagggcaggcaccaacaactcagaatgggggctttcggggagggcgcctagtccccccagctytaagcagccaggagggacctgcatytaagcatytgggttgccatggcaatggcatgccccccagctactgtatgcccccgacccccgcagaggcagaatgaacccatagggagctgatcgtaatgtttatcatgttacttccccmcccctacattttttgaaataaaataaggaattttattctcacttcctgtgtttcctgcacgccaatgccaggccatggtattgggtgatagatgaggcccttctagctgggcctgggcaccaggaggggtccccatgcttgcatctctctgtatcccctccctcc

SEQ ID NO: 4004 - DNA, 3357 bp, Homo sapiens
gaaggcagggacactcccgagcgcaggcgagaaggctgggggagggggcgcggtgggaggagtaggagaagacaaaagccgaaagcgaagagggcccgggctgcacacaccggctgggaggcagccgtctgtgcagcgagcagccggcgcggggaggccgcagtgcacggggcgtcacagtcggcaggcagcatggggaagggagggaaccagggcgagggggccgccgagcgcgaggtgtcggtgcccaccttcagctgggaggagattcagaagcataacctgcgcaccgacaggtggctggtcattgaccgcaaggtttacaacatcaccaaatggtccatccagcacccggggggccagcgggtcatcgggcactacgctggagaagatgcaacggatgccttccgcgccttccaccctgacctggaattcgtgggcaagttcttgaaacccctgctgattggtgaactggccccggaggagcccagccaggaccacggcaagaactcaaagatcactgaggacttccgggccctgaggaagacggctgaggacatgaacctgttcaagaccaaccacgtgttcttcctcctcctcctggcccacatcatcgccctggagagcattgcatggttcactgtcttttactttggcaatggctggattcctaccctcatcacggcctttgtccttgctacctctcaggcccaagctggatggctgcaacatgattatggccacctgtctgtctacagaaaacccaagtggaaccaccttgtccacaaattcgtcattggccacttaaagggtgcctctgccaactggtggaatcatcgccacttccagcaccacgccaagcctaacatcttccacaaggatcccgatgtgaacatgctgcacgtgtttgttctgggcgaatggcagcccatcgagtacggcaagaagaagctgaaatacctgccctacaatcaccagcacgaatacttcttcctgattgggccgccgctgctcatccccatgtatttccagtaccagatcatcatgaccatgatcgtccataaraactgggtggacctggcctgggccgtcagctactacatccggttcttcatcacctacatccctttctacggcatcctgggagccctccttttcctcaacttcatcaggttcctggagagccactggtttgtgtgggtcacacagatgaatcacatcgtcatggagattgaccaggaggcctaccgtgactggttcagtagccagctgacagccacctgcaacgtggagcagtccttcttcaacgactggttcagtggacaccttaacttccagattgagcaccacctcttccccaccatgccccggcacaacttacacaagatcgccccgctggtgaagtctctatgtgccaagcatggcattgaataccaggagaagccgctactgagggccctgctggacatcatcaggtccctraagaagtctgggaagctgtggctggacgcctaccttcacaaatgaagccacagcccccgggacacygtggggaaggggtgcaggtggggtgatggccagaggaatgatgggcttttgttctgaggggtgtccgagaggctggtgtatgcactgctcacggaccccatgttggatctttctccctttctcctctcctttttctcttcacatctcccccatagcaccctgccctcatgggacctgccctccctcagccgtcagccatcagccatggccctcccagtgcctcctagccccttcttccaaggagcagagaggtggccaccgggggtggctctgtcctacctccactctctgcccctaaagatgggaggagaccagcggtccatgggtctggcctgtgagtctccccttgcagcctggtcactaggcatcacccccgctttggttcttcagatgctcttggggttcataggggcaggtcctagtcgggcagggcccctgaccctcccggcctggcttcactctccctgacggctgccattggtccaccctttcatagagaggcctgctttgttacaaagctcgggtctccctcctgcagctcggttaagtacccgaggcctctcttaagatgtccagggccccaggcccgcgggcacagccagcccaaaccttgggccctggaagagtcctccaccccatcactagagtgctctgaccctgggctttcacgggccccattccaccgcctccccaacttgagcctgtgaccttgggaccaaagggggagtccctcgtctcttgtgactcagcagaggcagtggccacgttcagggaggggccggctggcctggaggctcagcccaccctccagcttttcctcagggtgtcctgaggtccaagattctggagcaatctgacccttctccaaaggctctgttatcagctgggcagtgccagccaatccctggccatttggccccaggggacgtgggccctgcaggctgcaggagggcactggagctgggaggtctcgtcccagccctccccatctcggggctgctgtgtggacggcgctgcctcaggcactctcctgtctgaacctgcccttactgtgtttaacctgttgctccaggatgcattctgataggagggggcggcagggctgggccttgtgacaatctgcctttcaccacatggccttgcctcggtggccctgactgtcagggagggccagggaggcagagcgggagggagtctcaggaggaggctgccctgaggggctggggagggggtacctcatgaggaccagggtggagctgagaagaggaggaggtgggggctggaggtgctggtagctgaggggacgggcaagtgagaggggagggagggaagtcctgggaggatcctgagctgctgttgcagtctaacccactaatcagttcttagattcaggggaagggcaggcaccaacaactcagaatgggggctttcggggagggcgcctagtccccccagctytaagcagccaggagggacctgcatytaagcatytgggttgccatggcaatggcatgccccccagctactgtatgcccccgacccccgcagaggcagaatgaacccatagggagctgatcgtaatgtttatcatgttacttccccmcccctacattttttgaaataaaataaggaattttattctcacttcctgtgtttcctgcacgccaatgccaggccatggtattgggtgatagatgaggcccttctagctgggcctgggcaccaggaggggtccccatgcttgcatctctctgtatcccctccctcccctgtggccatcccacccgcctctccctgctgcctctgaaa

SEQ ID NO: 4005 - DNA, 3387 bp, Homo sapiens
gcctctttcctgaaggttgctgggagcttctgaagctttgtgtcctgtgtggctcagatgagatagcaattccgcagagtcctggaagttaaagaaggctgagttaggattgtttcctcatggtcagggaaacagccttcacatttgtatattttatgcaatatttaaggcaggattcagggacttggtattctttgggatttgcaataagaagaatattcaatatttaggcttttctaaattgaaaaatcactgccacacgttctaatgtaattgtttggtttctctatttgcattttgcggggactgccttaaaactcatttatgttttatagccttctattatagttaccattgttacatgattttatgtatagaaattggctgatctagagctttcagaaatcatactaatatgcactataaattttaaaattacttaatgtagtaatttaatgtttgcagtatgcaagggaatgtattacgtactggaaggagagaggagacaaacaccagaccctgtactcaaggagtactggtagtatcatttatcatacaagacagataagataaggtccatatgagagctataaacagatgctgtgagttcagactaaggagaatcagttcttgctgtaggtaaggggaatgctgtgtttataaagcaaatgacatggcaactggatcttgaaggatgagttagttttcaaaaggtacatgggaaatactcctcagaaaaaagccgtctttgggcagtgtsggggtctgccatgtgttgcaccgctgctgaccacagtggaagaggctccacggggcatctctgctcgagtctggggacattttcctaagtggctcaatggctctctacttcgaattggacctgggaaattcgagtttgggaaggataagtacaatcattggtttgatgggatggcgctgcttcaccagttcagaatggcaaagggcacagtgacatacaggagcaagtttctacagagtgatacatataaggccaacagtgctaaaaaccgaattgtgatctcagaatttggcacactggctctcccggatccatgcaagaatgtttttgaacgtttcatgtccaggtttgagctgcctggtaaagctgcagccatgactgayaatactaatgtcaactatgtgcggtacaagggtgattactacctctgcactgagaccaactttatgaataaagtggacattgaaactctggaaaaaacagaaaaggtagattggagcaaatttattgctgtgaatggagcaactgcacatcctcattatgaccyggatggaacagcatacaatatggggaactcctttgggccatatggtttctcctataaggttattcgggttcctccagagaaggtggaccttggggagacaatccatggagtccaggtgatatgttctattgcttctacagagaaagggaaaccttcttactaccatagctttggaatgacaaggaactatataattttcattgaacaacctctaaagatgaacctgtggaaaattgccacttctaaaattcggggaaaggccttttcagatgggataagctgggaaccccagtgtaatacgcggtttcatgtggtggaaaaacgcactggacagctccttccagggagatactacagcaaaccttttgttacatttcatcaaatcaatgcctttgaggaccagggctgtgttataattgatttgtgctgtcaagataatggaagaaccctagaagtttaccagttacagaatctcaggaaggctggggaagggcttgatcaggtccataattcagcagccaaatctttccctcgaaggtttgttttgcctttaaatgtcagtttgaatgcccctgagggagacaacctgagtccattgtcctatacttcagccagtgctgtgaaacaggctgatggaacgatctggtgctctcatgaaaatctacatcaggaggacctagaaaaggaaggaggcattgaatttcctcagatctactatgatcgattcagtggcaaaaagtatcatttcttttatggctgtggctttcggcatttagtgggggattctctgatcaaggttgatgtggtttggagagaagatggcttttatccctcagaacctgtttttgttccagcaccaggaaccaatgaagaagatggtggggttattctttctgtggtgatcactcccaaccagaatgaaagcaattttmtcctagttttggatgccaagaactttgaagagctgggccgagcagaggtacctgtgcagatgccttatgggttccatggtaccttcatacccatctgatgggacaaccacaaggtctggaaactaggtttaaaataagtgtgcacttggacataaagactggagaaataaacactgaggactccaaaaggggggcaaggaggaagaggggcaggggttaaaaagctacctattgaatactatgttccctatttgggtgatgggttcrttagaagtccaaacctcagcagcacacaatatactcatgtaacaagcctgcacatgtaccccagaatctaaaataaaaataaaaagaaaaacaaagaatgtactctatacaaaagacagagcataaagggcaccgtacctcccaaaccaatgtcccaaatagacatttagtttaaaaatttctgttaaaaacagaattcactatttccttgccactgccaagtcacgccatggcagaggctcgagtgcatacaagcttcggttttacccttaatacaccatcatgaccaatggaggcattgctgctggaggtgtcatggccattaacactactttataagaggtgcggaagactgccctcactcatcatggcctagcatgtgcaatttgtgaagctgccaaagcgttagacaagcaccaagcccacttttgtctgcctgcacccaactgcartgagcctatgtatgtcaagttggtggagtcccatggtgctgaacaccaactcaccctaattaaggttgatgacaacaagaaaccagaggaatgggtaggcctctgtaaaactgagagggaaaccccygaaaagtggttggctgcagttgtgcagtagttaaggactaggtcaaagaatcttaagtcaaggatgtcatcgaagagtatttcaaatgtaagaaatgaacaaataaaactttggcactcatgtttcttaagaaaaaacaccacaaagcagaattcataatataactatggttatagatatttattttttagggctcttacttgaaataattaagaaagtattgatacaaccttttgaagagggttttaaatttcatttattggatatatcttcctctaggtaataataagaatacacgaaat

SEQ ID NO: 4006 - DNA, 2870 bp, Homo sapiens
gtgcgtgttcactgtttagtagtactcaaaactgccagtgtgagaggatttggaaatcactggatctgctcaatacaaaaatgttttttcgagtctttctccattttatcaggagtcattctgccactgcagtggatttccttcctgtgatggtgcaccggctcccagttttcaaaaggtacatgggaaatactcctcagaaaaaagccgtctttgggcagtgtsggggtctgccatgtgttgcaccgctgctgaccacagtggaagaggctccacggggcatctctgctcgagtctggggacattttcctaagtggctcaatggctctctacttcgaattggacctgggaaattcgagtttgggaaggataagtacaatcattggtttgatgggatggcgctgcttcaccagttcagaatggcaaagggcacagtgacatacaggagcaagtttctacagagtgatacatataaggccaacagtgctaaaaaccgaattgtgatctcagaatttggcacactggctctcccggatccatgcaagaatgtttttgaacgtttcatgtccaggtttgagctgcctggtaaagctgcagccatgactgayaatactaatgtcaactatgtgcggtacaagggtgattactacctctgcactgagaccaactttatgaataaagtggacattgaaactctggaaaaaacagaaaaggtagattggagcaaatttattgctgtgaatggagcaactgcacatcctcattatgaccyggatggaacagcatacaatatggggaactcctttgggccatatggtttctcctataaggttattcgggttcctccagagaaggtggaccttggggagacaatccatggagtccaggtgatatgttctattgcttctacagagaaagggaaaccttcttactaccatagctttggaatgacaaggaactatataattttcattgaacaacctctaaagatgaacctgtggaaaattgccacttctaaaattcggggaaaggccttttcagatgggataagctgggaaccccagtgtaatacgcggtttcatgtggtggaaaaacgcactggacagctccttccagggagatactacagcaaaccttttgttacatttcatcaaatcaatgcctttgaggaccagggctgtgttataattgatttgtgctgtcaagataatggaagaaccctagaagtttaccagttacagaatctcaggaaggctggggaagggcttgatcaggtccataattcagcagccaaatctttccctcgaaggtttgttttgcctttaaatgtcagtttgaatgcccctgagggagacaacctgagtccattgtcctatacttcagccagtgctgtgaaacaggctgatggaacgatctggtgctctcatgaaaatctacatcaggaggacctagaaaaggaaggaggcattgaatttcctcagatctactatgatcgattcagtggcaaaaagtatcatttcttttatggctgtggctttcggcatttagtgggggattctctgatcaaggttgatgtggtgaataagacactgaaggtttggagagaagatggcttttatccctcagaacctgtttttgttccagcaccaggaaccaatgaagaagatggtggggttattctttctgtggtgatcactcccaaccagaatgaaagcaattttmtcctagttttggatgccaagaactttgaagagctgggccgagcagaggtacctgtgcagatgccttatgggttccatggtaccttcatacccatctgatgggacaaccacaaggtctggaaactaggtttaaaataagtgtgcacttggacataaagactggagaaataaacactgaggactccaaaaggggggcaaggaggaagaggggcaggggttaaaaagctacctattgaatactatgttccctatttgggtgatgggttcrttagaagtccaaacctcagcagcacacaatatactcatgtaacaagcctgcacatgtaccccagaatctaaaataaaaataaaaagaaaaacaaagaatgtactctatacaaaagacagagcataaagggcaccgtacctcccaaaccaatgtcccaaatagacatttagtttaaaaatttctgttaaaaacagaattcactatttccttgccactgccaagtcacgccatggcagaggctcgagtgcatacaagcttcggttttacccttaatacaccatcatgaccaatggaggcattgctgctggaggtgtcatggccattaacactactttataagaggtgcggaagactgccctcactcatcatggcctagcatgtgcaatttgtgaagctgccaaagcgttagacaagcaccaagcccacttttgtctgcctgcacccaactgcartgagcctatgtatgtcaagttggtggagtcccatggtgctgaacaccaactcaccctaattaaggttgatgacaacaagaaaccagaggaatgggtaggcctctgtaaaactgagagggaaaccccygaaaagtggttggctgcagttgtgcagtagttaaggactaggtcaaagaatcttaagtcaaggatgtcatcgaagagtatttcaaatgtaagaaatgaacaaataaaactttggcactcatgtttcttaagaaaaaacaccacaaagcagaattcataatataactatggttatagatatttattttttagggctcttacttgaaataattaagaaagtattgatacaaccttttgaagagggttttaaatttcatttattggatatatcttcctctaggtaataataagaatacacgaaat

SEQ ID NO: 4007 - DNA, 3405 bp, Homo sapiens
gcctctttcctgaaggttgctgggagcttctgaagctttgtgtcctgtgtggctcagatgagatagcaattccgcagagtcctggaagttaaagaaggctgagttaggattgtttcctcatggtcagggaaacagccttcacatttgtatattttatgcaatatttaaggcaggattcagggacttggtattctttgggatttgcaataagaagaatattcaatatttaggcttttctaaattgaaaaatcactgccacacgttctaatgtaattgtttggtttctctatttgcattttgcggggactgccttaaaactcatttatgttttatagccttctattatagttaccattgttacatgattttatgtatagaaattggctgatctagagctttcagaaatcatactaatatgcactataaattttaaaattacttaatgtagtaatttaatgtttgcagtatgcaagggaatgtattacgtactggaaggagagaggagacaaacaccagaccctgtactcaaggagtactggtagtatcatttatcatacaagacagataagataaggtccatatgagagctataaacagatgctgtgagttcagactaaggagaatcagttcttgctgtaggtaaggggaatgctgtgtttataaagcaaatgacatggcaactggatcttgaaggatgagttagttttcaaaaggtacatgggaaatactcctcagaaaaaagccgtctttgggcagtgtsggggtctgccatgtgttgcaccgctgctgaccacagtggaagaggctccacggggcatctctgctcgagtctggggacattttcctaagtggctcaatggctctctacttcgaattggacctgggaaattcgagtttgggaaggataagtacaatcattggtttgatgggatggcgctgcttcaccagttcagaatggcaaagggcacagtgacatacaggagcaagtttctacagagtgatacatataaggccaacagtgctaaaaaccgaattgtgatctcagaatttggcacactggctctcccggatccatgcaagaatgtttttgaacgtttcatgtccaggtttgagctgcctggtaaagctgcagccatgactgayaatactaatgtcaactatgtgcggtacaagggtgattactacctctgcactgagaccaactttatgaataaagtggacattgaaactctggaaaaaacagaaaaggtagattggagcaaatttattgctgtgaatggagcaactgcacatcctcattatgaccyggatggaacagcatacaatatggggaactcctttgggccatatggtttctcctataaggttattcgggttcctccagagaaggtggaccttggggagacaatccatggagtccaggtgatatgttctattgcttctacagagaaagggaaaccttcttactaccatagctttggaatgacaaggaactatataattttcattgaacaacctctaaagatgaacctgtggaaaattgccacttctaaaattcggggaaaggccttttcagatgggataagctgggaaccccagtgtaatacgcggtttcatgtggtggaaaaacgcactggacagctccttccagggagatactacagcaaaccttttgttacatttcatcaaatcaatgcctttgaggaccagggctgtgttataattgatttgtgctgtcaagataatggaagaaccctagaagtttaccagttacagaatctcaggaaggctggggaagggcttgatcaggtccataattcagcagccaaatctttccctcgaaggtttgttttgcctttaaatgtcagtttgaatgcccctgagggagacaacctgagtccattgtcctatacttcagccagtgctgtgaaacaggctgatggaacgatctggtgctctcatgaaaatctacatcaggaggacctagaaaaggaaggaggcattgaatttcctcagatctactatgatcgattcagtggcaaaaagtatcatttcttttatggctgtggctttcggcatttagtgggggattctctgatcaaggttgatgtggtgaataagacactgaaggtttggagagaagatggcttttatccctcagaacctgtttttgttccagcaccaggaaccaatgaagaagatggtggggttattctttctgtggtgatcactcccaaccagaatgaaagcaattttmtcctagttttggatgccaagaactttgaagagctgggccgagcagaggtacctgtgcagatgccttatgggttccatggtaccttcatacccatctgatgggacaaccacaaggtctggaaactaggtttaaaataagtgtgcacttggacataaagactggagaaataaacactgaggactccaaaaggggggcaaggaggaagaggggcaggggttaaaaagctacctattgaatactatgttccctatttgggtgatgggttcrttagaagtccaaacctcagcagcacacaatatactcatgtaacaagcctgcacatgtaccccagaatctaaaataaaaataaaaagaaaaacaaagaatgtactctatacaaaagacagagcataaagggcaccgtacctcccaaaccaatgtcccaaatagacatttagtttaaaaatttctgttaaaaacagaattcactatttccttgccactgccaagtcacgccatggcagaggctcgagtgcatacaagcttcggttttacccttaatacaccatcatgaccaatggaggcattgctgctggaggtgtcatggccattaacactactttataagaggtgcggaagactgccctcactcatcatggcctagcatgtgcaatttgtgaagctgccaaagcgttagacaagcaccaagcccacttttgtctgcctgcacccaactgcartgagcctatgtatgtcaagttggtggagtcccatggtgctgaacaccaactcaccctaattaaggttgatgacaacaagaaaccagaggaatgggtaggcctctgtaaaactgagagggaaaccccygaaaagtggttggctgcagttgtgcagtagttaaggactaggtcaaagaatcttaagtcaaggatgtcatcgaagagtatttcaaatgtaagaaatgaacaaataaaactttggcactcatgtttcttaagaaaaaacaccacaaagcagaattcataatataactatggttatagatatttattttttagggctcttacttgaaataattaagaaagtattgatacaaccttttgaagagggttttaaatttcatttattggatatatcttcctctaggtaataataagaatacacgaaat

SEQ ID NO: 4008 - DNA, 3163 bp, Homo sapiens
gaggagctgagctcggttccctgggcagaggtgcagtcccgcctcttggcactgcagcggagcgggggcctgtgcgtgcagccgcggcccctgacggagctggacatccaccaccgcatcctgcgctacaccaactaccaggtggcgctggccaacaaaggcctgctgccggcccgctgcccgctgccctggggaggcagtgcggctttcctcagccgcggcctggcgctcaatgtcgacctgctgctcttccgcggtcccttctcgctcttccgcgggggctgggagctgccgcacgcctacaagcgcagcgaccagcggggcgccctagcagcgcgctgggggcgcacagtgctgctgctggccgccctgaacctggcgctgagcccgctggtgctggcctggcaggttctgcacgtcttctatagccacgtggagctgctgcggcgcgagcctggcgcgctgggggcgcgcggctggtcccgcctggcgcgcttgcagctgcgccacttcaacgagctgccgcacgagctgcgcgcgcgcctggcccgcgcctaccgccccgccgccgccttcctgcgcaccgctgcgccccccgcgcccctgcgcacgctgctggcccgccagctcgttttcttcgcgggygcactcttcgccgcgctgcttgtgctcaccgtctacgacgaggacgtgctagccgtggagcacgtgctcaccgccatgaccgcgctcggggtcaccgccaccgtcgccaggtctttcattccggaagagcagtgccagggtcgtgcgccgcagctcctgctgcagacagccctggcccacatgcactacctcccggaggagcccggccccggcggcagggaccgcgcctaccggcagatggcgcagctgctgcagtaccgagcggtctccctcctggaggagctcctgtccccgctcctcaccccgctgtttctgcttttctggttccgccctcgtgccctggagattatcgacttttttcatcacttcactgtggatgtggctggggttggggacatctgttcctttgcccttatggatgtgaagcgccacggacaccctcagtggctctcggcgggacagactgaggcctcgctgtctcagcgtgcggaggacggcaagactgagctttctttgatgcggttctccctggcgcatccactctggcgccccccagggcacagctctaagtttcttgggcacctctggggccgagtacaacaagatgcagctgcctggggtgccacctcggctcgcrgcccctccaccccgggggtgctcagcaactgcacctcgcccctgcctgaggccttcctggccaacctcttcgtgcaccctctcctgcctccgagagatctgagcccgacagccccctgtccagctgyggccacagccagcctccttgcctccatttcccgaattgcccaggaccccagctctgtgtccccaggaggcactgggggccagaagctggcccagctcccagaacttgcttctgccgagatgagtctccatgtcatctacctgcaccagcttcaccagcagcagcagcagcaggagccgtggggtgaggctgcagcctccatsctgtccaggccctgctccagcccctcacagccaccctcrcctgatgaggagaagccatcctggtcaagtgacggctccagtcctgcctctagccccagacaacagtggggaacccagaaggcccggaatctgttccccggagggtttcaggtgaccacagacacccagaaggagcctgaccgggcctcttgcackgactgagaygactcctcagggccccactcctggcagctgagtgctgcacctgccttctcgatyacgagcctgagaactgcacgggggagcagcccagactggctggaaaccatgttttcagagtgcagggtcaagtggcgtcctctggacagatgtgagaaggcaccacctcaagaggggaggagcggggctgatcctggtcgggcggacctgagtcgggcagccgctctcccggaactggaagggaaagccaggyggctctcaggggctgttggtgtctgagccgggagggtcgaacgcccagggcactgcgccccgcaactgacgctcctgcaaggaaaagctctggcacgccgatgacgtcgccggcctcgtccagctccatgtcgccctccgtcgccaggatgcgctgcacggtctgcaggacgttggttgccatggtracatcgccgcagacaaacatgtggccccgctcgaggcacagcacgcggtgcacctccgcagccagctccgtcctcaggatgtcctgcacgttaccattgcgccctcagggtctcacaccttggggttgtcaggttcccgggagaaggcggtgaggactcggccaaacaccccgcgctgctgggcgttctgcacytcgtcgcggtagagatggtcaagttgggagcatcggcagccgaacaccaaagtcatgggagtgggctgcagccctgcaagcaaccccgcgcttgggaaggctcttctccggggcacagtgctagtggggcctccccacaggccaccgtcgcccagcctggcagcccagcgttttgggctgaaaccacyattactttggctgtttcatctctaagagagtgtagaatgctttcacagagaccctgcacagccctgatttacagagggaagggaagcgcgggtgaggtggtggcccctggtggagctgcgctagaatgcgcggcttcggactcagaattccatgccctttgcattgtgtgacatcgcagtccccttccccgctcccacttcatattctcccatacttataactctcctcccagtcacagccctcttcttttgattgacagaccaccctgggcaccccatgctcaatatgaacaccttgtagcatccttaggtcttggacagacctcggtcagctctggcacagtcaagaatccaccttgggcagttcttctttgagtcttagccctaatcccttygaaaattctattttcctttstcctcaatccagtcaacacctactatgtaccaggcaccaggaagccagaagctcagggcccagcccttgcctttggtacctgccctccccttggtctcatgagcgtcttttcagctt

SEQ ID NO: 4009 - DNA, 1478 bp, Homo sapiens
gtgccctgcagcgcgtggacaggctaggggtcgcgggagcgggagggaggcgctgccgggcctgtcgcgcaaggacgtcggtcctcccaggtttgagggcggtcaggcggggtcaaggccaggcagcggggcgcgtctgcgttgcgcccgactctccgcggttacctgtgcctagaggtgatttgaagggcaggggccgagagattcgtagccctgctgcggcgccgtcccggagttccccggcccagaccagacccgcggggcgccctcagcagcccgcccgtcttgcactcggagagcggtcctggcaggaaggccggccagtgtgcacccggttcgggcccctgcgcccgggctggcaagatggccacgcccccagcagagacggcgcctctaggacaccatcggggaccgaggaccagctttatccagggactctaccattcccacccctttggccccactccacgacaaccacttccccatcttctcctctattctggtctcccctgcccccacgccttcccacccagcgtcttccccaggttcccccactacctctccctcagatccaggccctcagctcagcatgggtggttctccctccaggaaagggggaggagggaccaggacctgagttgcatagcggctgcctggatgggcttagaagcctttttgagggacctccctgcccctatcctggggcttggatacctttccaagtccctggaactgcccacccttcccctgccaccccgtcaggagatcctagtatggaggaacatctgtctgtcatgtatgagagactgagacaagagcttcccaagctcttccttcagtcccacgactacagtctgtattccttggatgtggaattcatcaatgagatcctcaacatacgtaccaagggccggacatggtacattctttcactgaccctctgccgtttcctggcctggaattattttgcacaccttcgtttggaggttttacagctgacccgccaccckgagaactggaccctgcaagcccggtggcggcttgtggggctgcccgtccacttgctctttttgcggttctacaagcgtgacaaagacgagcattaccggacctatgatgcctactccactttctacctgaattccagtggcctcatttgtcgccatcgtctagataakctgatgccttcacactcacctccaacgcctgtgaagaagctgctagtgggagccctggtggccctggggctgtcagagccagaacctgacttaaacctgtgttccaagccctgatccttgaccttggagtggaggcagcactgaagactgctacgcccaagagaaggaggtggaggcagccaagaatctcaggagccagcttcctctcctcgtttctctccttccttcctttccatctcatgctgtgtaaagctgctgtgtaatttaacttgtaaataataaagtttaactgactatatg

SEQ ID NO: 4010 - DNA, 871 bp, Homo sapiens
attttcataaacaatgaatggcacgatgccgtcagcaggaaaacattccccaccgtcaatccgtccactggagaggtcatctgtcaggtagctgaaggggacaaggaagatgtggacaaggcagtgaaggccgcccgggccgccttccagctgggctcaccttggcgccgcatggacgcatcacacaggggccggctgctgaaccgcctggccgatctgatcgagcgggaccggacctacctggcggccttggagaccctggacaatggcaagccctatgtcatctcctacctggtggatttggacatgctatgatgagtttgtggwgcggagcgttgcccgggccaagtctcgggtggtcgggaacccctttgatagcaagaccgagcaggggccgcaggtggatgaaactcagtttaagaagatcctcggctacatcaacacggggaagcaagagggggcgaagctgctgtgtggtgggggcattgctgctgaccgtggttacttcatccagcccactgtgtttggagatgtgcaggatggcatgaccatcgccaaggaggagatcttcgggccagtgatgcagatcctgaagttcaagaccatagaggaggttgttgggagagccaacaattccacgtacgggctggccgcagctgtcttcacaaaggatttggacaaggccaattacctgtcccaggccctccaggcgggcactgtgtgggtcaactgctatgatgtgtttggagcccagtcaccctttggtggctacaagatgtcgggragtggccgggagttgggcgagtacgggctgcaggcatacactraagtgaaaactgtcacagtcaaagtgcctcagaagaactcataa

SEQ ID NO: 4011 - DNA, 2280 bp, Homo sapiens
cagggggcagccacgggccgggggtacctagcgccacccgcttcgcttgcatcagctgcgcgccccatcccgaggaatggtagaggcagccccgcccccggcccgcccccgcctttccattggctgccgcgcggggcggggagcggggtcggctcagtggccctgagaccctagctctgctctcggtccgctcgctgtccgctagcccgctgcgatgttgcgcgctgccgcccgcttcgggccccgcctggsccgccgcctcttgtcagccgccgccacccaggccgtgcctgcccccaaccagcagcccgaggtcttctgcaaccagtctagattgaaaatgtcaactccagacatcactgtgcttctggaaactataaagaggaagtgggagctaggacatccccccaccacgccccgcccaagagcgtttacgtgtgttatattttcataaacaatgaatggcacgatgccgtcagcaggaaaacattccccaccgtcaatccgtccactggagaggtcatctgtcaggtagctgaaggggacaaggaagatgtggacaaggcagtgaaggccgcccgggccgccttccagctgggctcaccttggcgccgcatggacgcatcacacaggggccggctgctgaaccgcctggccgatctgatcgagcgggaccggacctacctggcggccttggagaccctggacaatggcaagccctatgtcatctcctacctggtggatttggacatggtcctcaaatgtctccggtattatgccggctgggctgataagtaccacgggaaaaccatccccattgacggagacttcttcagctacacacgccatgaacctgtgggggtgtgcgggcagatcattccgtggaatttcccrctcctgatgcaagcatggaagctgggcccagccttggcaactggaaacgtggttgtgatgaaggtagctgagcagacacccctcaccgccctctatgtggccaacctgatcaaggaggctggctttccccctggtgtggtcaacattgtgcctggatttggccccacggctggggccgccattgcctcccatgaggatgtggacaaagtggcattcacaggctccactgagattggccgcgtaatccaggttgctgctgggagcagcaacctcaagagagtgaccttggagctgggggggaagagccccaacatcatcatgtcagatgccgatatggattgggccgtggaacaggcccacttcgccctgttcttcaaccagggccagtgctgctgtgccggctcccggaccttcgtgcaggaggacatctatgatgagtttgtggwgcggagcgttgcccgggccaagtctcgggtggtcgggaacccctttgatagcaagaccgagcaggggccgcaggtggatgaaactcagtttaagaagatcctcggctacatcaacacggggaagcaagagggggcgaagctgctgtgtggtgggggcattgctgctgaccgtggttacttcatccagcccactgtgtttggagatgtgcaggatggcatgaccatcgccaaggaggagatcttcgggccagtgatgcagatcctgaagttcaagaccatagaggaggttgttgggagagccaacaattccacgtacgggctggccgcagctgtcttcacaaaggatttggacaaggccaattacctgtcccaggccctccaggcgggcactgtgtgggtcaactgctatgatgtgtttggagcccagtcaccctttggtggctacaagatgtcgggragtggccgggagttgggcgagtacgggctgcaggcatacactraagtcacagtcaaagtgcctcagaagaactcataagaatcatgcaagcttcctccctcagccattgatggaaagttcagcaagatcagcaacaaaaccaagaaaaatgatccttgcgtgctgaatatctgaaaagagaaatttttcctacaaaatctcttgggtcaagaaagttctagaatttgaatygataaacatggtgggttggctgagggtaagagtatatgaggaaccttttaaacgacaacaatactgctagctttcaggatgatttttaaaaaatagattcaaatgtgttatcctctctctgaaacgcttcctataactcgagtttataggggaagaaaaagctattgtttacaattatatcaccattaaggcaactgctacaccctgctttgtattctgggctaagattcattaaaaactagctgctcttaa

SEQ ID NO: 4012 - DNA, 682 bp, Homo sapiens
gccgcctcttgtcagccgccgccacccaggccgtgcctgctgtgtggtgggggcattgctgctgaccgtggttacttcatccagcccactgtgtttggagatgtgcaggatggcatgaccatcgccaaggaggagatcttcgggccagtgatgcagatcctgaagttcaagaccatagaggaggttgttgggagagccaacaattccacgtacgggctggccgcagctgtcttcacaaaggatttggacaaggccaattacctgtcccaggccctccaggcgggcactgtgtgggtcaactgctatgatgtgtttggagcccagtcaccctttggtggctacaagatgtcgggragtggccgggagttgggcgagtacgggctgcaggcatacactraagtgaaaactgtcacagtcaaagtgcctcagaagaactcataagaatcatgcaagcttcctccctcagccattgatggaaagttcagcaagatcagcaacaaaaccaagaaaaatgatccttgcgtgctgaatatctgaaaagagaaatttttcctacaaaatctcttgggtcaagaaagttctagaatttgaatygataaacatggtgggttggctgagggtaagagtatatgaggaaccttttaaacgacaacaatactgctagctttcaggatgattttta

SEQ ID NO: 4013 - DNA, 2173 bp, Homo sapiens
cagggggcagccacgggccgggggtacctagcgccacccgcttcgcttgcatcagctgcgcgccccatcccgaggaatggtagaggcagccccgcccccggcccgcccccgcctttccattggctgccgcgcggggcggggagcggggtcggctcagtggccctgagaccctagctctgctctcggtccgctcgctgtccgctagcccgctgcgatgttgcgcgctgccgcccgcttcgggccccgcctggsccgccgcctcttgtcagccgccgccacccaggccgtgcctgcccccaaccagcagcccgaggtcttctgcaaccagattttcataaacaatgaatggcacgatgccgtcagcaggaaaacattccccaccgtcaatccgtccactggagaggtcatctgtcaggtagctgaaggggacaaggaagatgtggacaaggcagtgaaggccgcccgggccgccttccagctgggctcaccttggcgccgcatggacgcatcacacaggggccggctgctgaaccgcctggccgatctgatcgagcgggaccggacctacctggcggccttggagaccctggacaatggcaagccctatgtcatctcctacctggtggatttggacatggtcctcaaatgtctccggtattatgccggctgggctgataagtaccacgggaaaaccatccccattgacggagacttcttcagctacacacgccatgaacctgtgggggtgtgcgggcagatcattccgtggaatttcccrctcctgatgcaagcatggaagctgggcccagccttggcaactggaaacgtggttgtgatgaaggtagctgagcagacacccctcaccgccctctatgtggccaacctgatcaaggaggctggctttccccctggtgtggtcaacattgtgcctggatttggccccacggctggggccgccattgcctcccatgaggatgtggacaaagtggcattcacaggctccactgagattggccgcgtaatccaggttgctgctgggagcagcaacctcaagagagtgaccttggagctgggggggaagagccccaacatcatcatgtcagatgccgatatggattgggccgtggaacaggcccacttcgccctgttcttcaaccagggccagtgctgctgtgccggctcccggaccttcgtgcaggaggacatctatgatgagtttgtggwgcggagcgttgcccgggccaagtctcgggtggtcgggaacccctttgatagcaagaccgagcaggggccgcaggtggatgaaactcagtttaagaagatcctcggctacatcaacacggggaagcaagagggggcgaagctgctgtgtggtgggggcattgctgctgaccgtggttacttcatccagcccactgtgtttggagatgtgcaggatggcatgaccatcgccaaggaggagatcttcgggccagtgatgcagatcctgaagttcaagaccatagaggaggttgttgggagagccaacaattccacgtacgggctggccgcagctgtcttcacaaaggatttggacaaggccaattacctgtcccaggccctccaggcgggcactgtgtgggtcaactgctatgatgtgtttggagcccagtcaccctttggtggctacaagatgtcgggragtggccgggagttgggcgagtacgggctgcaggcatacactraagtgaaaactgtcacagtcaaagtgcctcagaagaactcataagaatcatgcaagcttcctccctcagccattgatggaaagttcagcaagatcagcaacaaaaccaagaaaaatgatccttgcgtgctgaatatctgaaaagagaaatttttcctacaaaatctcttgggtcaagaaagttctagaatttgaatygataaacatggtgggttggctgagggtaagagtatatgaggaaccttttaaacgacaacaatactgctagctttcaggatgatttttaaaaaatagattcaaatgtgttatcctctctctgaaacgcttcctataactcgagtttataggggaagaaaaagctattgtttacaattatatcaccattaaggcaactgctacaccctgctttgtattctgggctaagattcattaaaaactagctgctcttaa

SEQ ID NO: 4014 - DNA, 3316 bp, Homo sapiens
gtgctcaccgccgcttccggtccgcgtgaggtgcattctcgcgccggtggcgaggttagggcccgcgttgcgacgtggtgcagcgcatattttcacaagtgggtctcccttgtccgggactatggccaccgactcgtgggccctggcggtggacgagcaggaagcggctgtcaagtcgatgaccaatttgcagatcaaggaagagaaagtcaaagcagataccaatggtattatcaaaaccagtaccactgccgagaaaacagatgaagaggagaaagaggacagagctgcccagtccttactcaacaagctgatcagaagcaaccttgttgataacacaaaccaagtggaagtcctgcaacgggatccaaactcccctctgtactcggtgaagtcgtttgaagagcttcggctgaaaccacagcttctccagggagtctatgccatgggcttcaatcgwcchtccaagatacaagagaaygcattacccatgatgcttgctgaacccccacagaatctgattgcccagtctcagtctggcactggtaaaacagctgccttygtcttagccatgctcagccgagtggagccatcagacagatacccccagtgtctgtgcctctccccaacatatgagctggcgcttcaaacaggaaaagtgattgarcaratgggcaaattttacccagaactgaagcttgcctatgccgttcgaggcaataaattggaaagaggccagawgatcagtgagcagattgtcattggcacccctgggaccgtgctggactggtgctccaagctcaagttcattgatcccaagaaaatcaaggtgtttgttctggatgaggctgatgtcatgatagccactcagggccaccaagatcagagcatccgcatccagaggatgctgcccaggaactgccagatgctgcttttctccgccacctttgaagactctgtgtggaagtttgcccagaaagtggtcccagacccaaatgttatcaaactgaagcgtgaggaagagaccctggataccatcaagcagtactatgtcctgtgcagcagcagagacgagaagttccaggccttgtgtaacctctacggggccatcaccattgctcaagccatgatcttctgccatactcgcaaaacagctagttggctggcagcagagctctcaaaagaaggccaccaggtggctctgctgagtggggagatgatggtggagcagagggctgcggtgattgagcgcttccgagagggcaaagagaaggttttggtgaccaccaacgtgtgtgcccgcggcattgatgttgaacaagtgtctgtcgtcatcaactttgatcttcccgtggacaaggacgggaatcctgacaatgagacctacctgcaccggatcgggcgcacgggccgctttggcaagaggggcctggcagtgaacatggtggacagcaagcacagcatgaacatcctgaacagaatccaggagcattttaataagaagatagaaagattggacacagatgatttggacgagattgagaaaatagccaactgagaagctccaccagccactgatgccagccctggcactgcccctgcacaggagacaagtgcrttyagggcacaggccccgacatcaccccaaggacaacggcasaagtagagagaaactacctacctcacttcaaattatgtttggacttgacaaaaataggtgcaaatgatggggggcaatagaagaaaaaatttgcattttggaaaattgggtcctttccccacttttttaaagccacattcccccatctttataataatctggwcacagtggtagtcgctggccccaggaccccctcctgattttggctaggcatcgtggaaccagctccagcccctgaagaaacgatagatgtgcaggttgtgcggaagaggctgagtggaaaatggtgtgagccccaccgctgtgcatcgaatgagggaagtggcagcagagaggccagagctgccccctctctgtctcttcaatggacccttcacaagtgtttctcctgcccttggggctgtcttccttctcctgaaatccagagactttcttgctcatcccttctccctttcacttctgttctctgctgcagaaagcagacttgcatatccctgatgagcagctcggctacttttgtaaacttcagatttggagagaaacacgaaagtctgaatcctgaccccttgagagagagtgatctggcgagggccgatgaaggggctgggcctggtcttgccttctcttctctcggttgctccctctgcctaggcccctggtactcagtcacggcagccaggagaccccaggtgagtttctgagcgcatacgtagttggttcttacccccaggtgtcacacggggccgagagctgagcaagaatttggaatggaagttatgaccaagggaattatgctgttcatttataatagtggacattatggagagctctgattcctacataatatgaataaggatggataggccgggcgtggtggctcatgcctataatcccagcacgttgggaggctgaggcgggcggatcggttgagctcaggcgttcgggaccagcctggccaacatgatgaaaccccgtctctaccaaaaatagaaaaaaatatagccgggcctggtggcgcacgcctgtagtcccagctactcgggaggctgaggtaggaggatcgcttgagcctgggtagaggctgctgtgagctgaaatggcgccactgcactccagcctgggtaacagagcgagaccccgactcaataaataaataaggatggataaattgtagcgtatgcaccattcattatgctaagacattttaaagtaattatgagaaacgctctactaatgatttgtttttatttgtatttttctgcttattagacaaatatatactcattttaaaaaggcgtgtgtgtatataaagtgagagtgctctctatcccttctcttctgggatcctgattcctggcagcttggtgaatattctaccatattgccttttatttgcataaacccatttttcttttacaaaaacaggaacattctgttcacactactatgcaacctgctttcactgatcagcatgtgttagacatgttgacatgtccaatacacacacatcttccttgccctggaaacaccatccaccttcctttctgcrtgtagctgtcccggcatttatctcctggttcctctagtgacaggcatgggggatttctagtacatggctgttatccacagtaccacaatgaacattttttttttctt

SEQ ID NO: 4015 - DNA, 1832 bp, Homo sapiens
gtcctgccaaagaaagcagcagcgaataagtacgtggcagatggtgctgtcgaccagtgtcaagaccaagtttcatgggttcctggacgctcagccaggggtagtctctgaagggccgcctggcaattgggagcagaagccagtttcccgccatctgctctccgtggaggcagtgctctcgcggctgctgcccgttggggtccagctgaggaaggagcgcggatcccaggctcgttctttgcctgggctgcccctgcggcccctggggcgggtgctgctgcggcgccagctccaagggcggatccaggcgggaggggcctcctcggagaagcggggcgcggtcccaactacgcagaggctggcacgccgaccctccacacctcaccacgcccccatctccgtccgtgtacacacactcacacaaggacgccaaccccacctagatgcaaagcaggattcaaaagaacatctttgcgttttctaccggctccccatcatcgtactagggaggaagaagcgggtgagaaacaaaacttctttccattgtcctgcccgtttctgcggacttgttctgaggccgaggcacctctaagatactgatggctctgcagaggacccattcattgcttctgcttttgctgctgwccctgctggggctggggctggtccagccctcctatggccaggatggcatgtaccagcgattcctgcggcaacacgtgcaccctsaggagacaggtggcagtgatcgctactgcaacttgatgatgcaaagacggaagatgactttgtatcactgcaagcgcttcaacaccttcatccatgaagatatctggaacattcgtagtatctgcagcaccaccaatatccaatgcaagaacggcaagatgaactgccatgagggtgtagtgaaggtcacagattgcagggacacaggaagttcyagggcacccaactgcagatatcgggccatagcgagcactagacgtgttgtcattgcctgtgagggtaacccacaggtgcctgtgcactttgacggttagatgccaccatgtagggattatcgcgagtggttgaccttacacttactccttaaatagcagtgagtaatgcatttgagctgycccaggctctgtctcctcagctcatttcytactctttttctctatataactcattctattaaatacattgcaccaaagagatatggagacataaacctgtaatgaatgaggctgggcttttctgtaataagcttccttttataatactggtcagcttagctctctcagatcctatcctgtggaatttagttattatgtgtatttatgtagtatttcaaacatttcaaaatgctttcatctatgtttatcacattttaataccacagcacttataatgatgtcactacatatagaagctcaaagttaagggatttgctgaagactgtaaagttaatggaagaattgagacaaaaatccagtgtagctggccacttatccagggctttttctacttcatcacaaggaatgttttgaaagtgtctgctttttttatccttaaaattcacctgtcagggaggcattaaaaatttggaaatgtatgccagcaaaatgtgagctctgtattttttggcattcttatgtttgggtttaataagattaagaaaatgatactgggaattttctttttcctgaaactttgaatcaccctagtaagtcaaagtactaaaaaatgtactagatcattaagacttatgtgctcttactgattgaaagattttttatgttttccttgtaataaaggacctaaaccgaaggtacctgagaaga

SEQ ID NO: 4016 - DNA, 1337 bp, Homo sapiens
acacaactggaacccatctccaggaacaaacagctggaacccatctcccgttgaagggaaactgccagatttttgtaagattcttcctcctgggcacctctaagatactgatggctctgcagaggacccattcattgcttctgcttttgctgctgwccctgctggggctggggctggtccagccctcctatggccaggatggcatgtaccagcgattcctgcggcaacacgtgcaccctsaggagacaggtggcagtgatcgctactgcaacttgatgatgcaaagacggaagatgactttgtatcactgcaagcgcttcaacaccttcatccatgaagatatctggaacattcgtagtatctgcagcaccaccaatatccaatgcaagaacggcaagatgaactgccatgagggtgtagtgaaggtcacagattgcagggacacaggaagttcyagggcacccaactgcagatatcgggccatagcgagcactagacgtgttgtcattgcctgtgagggtaacccacaggtgcctgtgcactttgacggttagatgccaccatgtagggattatcgcgagtggttgaccttacacttactccttaaatagcagtgagtaatgcatttgagctgycccaggctctgtctcctcagctcatttcytactctttttctctatataactcattctattaaatacattgcaccaaagagatatggagacataaacctgtaatgaatgaggctgggcttttctgtaataagcttccttttataatactggtcagcttagctctctcagatcctatcctgtggaatttagttattatgtgtatttatgtagtatttcaaacatttcaaaatgctttcatctatgtttatcacattttaataccacagcacttataatgatgtcactacatatagaagctcaaagttaagggatttgctgaagactgtaaagttaatggaagaattgagacaaaaatccagtgtagctggccacttatccagggctttttctacttcatcacaaggaatgttttgaaagtgtctgctttttttatccttaaaattcacctgtcagggaggcattaaaaatttggaaatgtatgccagcaaaatgtgagctctgtattttttggcattcttatgtttgggtttaataagattaagaaaatgatactgggaattttctttttcctgaaactttgaatcaccctagtaagtcaaagtactaaaaaatgtactagatcattaagacttatgtgctcttactgattgaaagattttttatgttttccttgtaataaaggacctaaaccgaaggtacctg

SEQ ID NO: 4017 - DNA, 837 bp, Homo sapiens
acctcccgggcgctggctgcaatgactttctctttccctttgcaattgccttgggtcctgccgcacagagcggcctgtctttatcagaggtccctctgccagggggagggccccagagaaaaccagaaagagggtgagagactgaggaagataaagcgtcccagggcctcctacaccagcgcctgagcaggaagggggaggggccatgactacgaggccctgggaggtcactttagggagggctgtcctgaaacctggagcctggagcagaaagtgaaaccctggtgctccagacaaagatcttagtcgggactagccggccaaggatgaagcctcacttcagaaacacagtggagcgaatgtatcgagacacattctcctacaacttttataatagacccatcctttctcgtcggaataccgtctggctgtgctacgaagtgaaaacaaagggtccctcaaggccccstttggacgcaaagatctttcgaggccaggtgcccaggtctttcatcagagccccatttcaagtgctcagtagcccctttggccagtgcgccccaccacatgggacagcgcaggtccagtggcctccccagctgaccgcaggcagggaacaaggcagaccctagagggccaggccacagcaggggctgaggatgcctggtgaatggatgcctgggagaatggatgccagaattcacgcatgaggctctgaacagggctgggaaaacttccaaacgaagggaagctcatgtcttggtgcactttgtgatgatgcttcaacagcaggactgagatggggacatttacaataaacagaaatgtatgggctcg

SEQ ID NO: 4018 - DNA, 4145 bp, Homo sapiens
acctcccgggcgctggctgcaatgactttctctttccctttgcaattgccttgggtcctgccgcacagagcggcctgtctttatcagaggtccctctgccagggggagggccccagagaaaaccagaaagagggtgagagactgaggaagataaagcgtcccagggcctcctacaccagcgcctgagcaggaagggggaggggccatgactacgaggccctgggaggtcactttagggagggctgtcctgaaacctggagcctggagcagaaagtgaaaccctggtgctccagacaaagatcttagtcgggactagccggccaaggatgaagcctcacttcagaaacacagtggagcgaatgtatcgagacacattctcctacaacttttataatagacccatcctttctcgtcggaataccgtctggctgtgctacgaagtgaaaacaaagggtccctcaaggccccstttggacgcaaagatctttcgaggccaggtgtattcccagcctgagcaccacgcagaaatgtgcttcctctcttggttctgtggcaaccagctgcctgcttacaagtgtttccagatcacctggtttgtatcctggaccccctgcccggactgtgtggcgaagctggccgaattcctgkctgagcaccccaatgtcaccctgaccatctccgccgcccgcctctactactactgggaaagagattaccgaagggcgctctgcaggctgagtcaggcaggggcccgygtgaagattatggacgatgaagaatttgcatactgctgggaaaactttgtgtacagtgaaggtcagccattcatgccttggtacaaattcgatgacaattatgcattcctgcaccgcacgctaaaggagattctcagaaacccratggaggcaatgtatccacacatattctacttccactttaaaaacctacgcaaagcctatggtcggaacgaaagctggctgtgcttcaccatggaagttgtaaagcaccactcacctrtctcctggaagaggggcgtcttccgaaaccaggtggatcctgagacccattgtcatgcagaaaggtgcttcctctcttggttctgtgacgacatactgtctcctaacacaaactacgaggtcacctggtacacatcttggagcccttgcccagagtgtgcaggggaggtggccgagttcctggccaggcacagcaacgtgaatctcaccatcttcaccgcccgcctctactacttctgggatacagattaccaggaggggctccgcagcctgagtcaggaaggggcctcygtggagatcatgggctacaaagattttaaatattgttgggaaaactttgtgtacartgatgatgagccattcaagccttggaaaggactaaaatacaactttctattcctggacagcaagctgcaggagattctcgagtgaggggtctcccmgggcctcatggtctgtctcctctagcctcctgctcatgytgtgcaggcctcccctccatcctggaccagctgtgcttttgcctggtcatcctgagcccctcctggcctcagggccattccatagtgctcccctgcctcaccacctcctctccgctctcccaggctcttcctgcagaggcctctttctgcctccatggctatccatccacccaccaagaccctgttccctgagcctgcatgcccctaacctgccttttcccatctccccagcataacctaattttttttttttttttttgagacggaatttcgctctgtcacccagactggagtgcaatggcttgatcttggctcactgcaaactctgcctaccaggttcaagcgattctcctgcctccgcctcccgagtagctggaattacagacgcctgccaccacgcacagctaactttttttttttttgtatttttagtagtgactgggtttcaccatgttggccaggctggtcttgaactcctgacctcaggtgatccgcctatctcagcctcccaaagtgctgggattacaggcgtgagccactggcccggcggcacaaccaaatcttattaaactcaccctaggctggccgcggtgactcatgcctataatcccccagcaatttgggaggcagaggtgagagaatcgcttgagcccaggaattcgagaccagcctgggccacatgacaaagccccatctctacaaaaaaattacaaaaaaaaaaaaaacaggtgtggtggcatgcacctgtagttkaagctacttggaaggatgaagtgggaggattgcttgagccggggaggtggaggctgcagtgaactgagatcacgtcactgaactccagtctgagcaacagatcgagaccctgcctgaaaataaatcaataaataaactcaaccgaaatgggyatgaaagttgaaatgggtatgtaagttgaaaaccagaagttttgagaaacatcctttgttaactttcatcctacaaattgggtcattcatgtcctacgcagctaaaacagagcccaggagccagggaggaaaagcagtcaggccacacaccattgctcccaaaatggacttctctgcaagcctgactcctgaaactgtgcattgtaccctgaaaccagctttatccatagcttctgcaataaatggctgtaagtcttggactccttgctataatcgcagctattcagcaatggaacctcccagttcccaacccttcctagtgcccatgggctttcccataggacaagagaacatttctccttttctttttttttttctttgaaatggagtctcgccctgtcacccaggctggagtgcaatggtgcggtctcggctcactgcaacctctgcctcccttgttcaagtgattctcctgtctcagcctcccgagtagctgggattacaggcgtccaccaccaaaccaggctaatttttgtatttttcataaaaacgggtttcatcatgtttcccaggctggtcttatttttattttattttttgagatggagtcttgctctgttgcccaggctggggtgcagtggtgcaatctgggttcactgcagcctctgccgcctgagttcaagctattttcctacctaagcctcccaagtagctgggattacatgcgcgtgccaccacgcctagctaatttttgtgtttttagtagagacggggtttcaacatcttgaccaggctggtcttgaactcctgacctcgtgatccacccgtctcggcctcccaaagtgctgggattacaggcgtgagccacctggscaggcttaggctggtcttaaactcctgacctcaagtgatccaacctccttggcctcccaaattgctgggattgctggtgtgagccacagcgcctagcccatttctccttttaataggacctgttgctgtctctgttctcccaacatggtraacaccacccggactgcgtgtatgtcccaaattacaattctttctttgcaaatgaaatgtgaaatttagaggcccttctccacactttaaatttgacttgacattttctaggcagatataagttattagagaatgagattctctataaaaatgatcccttcatgctgtggcctccacagaagatgccctgggccaggtgcccacatgaataatgcgggccacaggcaggcatttattttctcacagatatggaggctacaagtccaaggtggaggggtcggcggggttgtttgctctgaggccgctcctcctggatggcagggatcccttctggctgtgtcctctgtggcctttcctctatgaacctgtactgtacctctggggtctctctgcttccaaatatcttttttttttttttcagacagttttgctcttgttttctaggctggagtgcaatggcacaatctcagctcactgcaacctctgccttccgagttcaagcgattctcgtgcctcagcctcctgagtagctgggactacaggcgtgtgccaccacgcctggctaattttgtagttttagtagagacggggtttctccatgttgctcaggctggtcttgaactcatgagctcaggcgatccactctcctcagcctcccaaagtgctgggattacagatataagccaccatacacaacttttttttttttttgagatgga

SEQ ID NO: 4019 - DNA, 1730 bp, Homo sapiens
ccaacgctcagcacagcagagaaagacaccaagctacgggacccgccgcgcctcccgcgccggggtggagctgaccccgccgagccccgccccagcctgcgtctgccaatgatccaggagccgctcctttmcactcgggaaaccttcagaggagtctcagaaaggacacggctggctgcttttctcagcgccgaagccgcgccatgctcgtcctcagaagcgccctgactcgggcgctggcctcacggacgctggcgcctcagatgtgctcatcttttgctacgggacccagacaatacgatggaatattctatgaatttcgttcttattaccttaagccctcaaagatgaatgagttcctggaaaattttgagaaaaacgctcatcttcggacagctcactctgaattggttggatactggagtgtagaatttggaggcagaatgaatacagtgtttcatatttggaagtatgataattttgctcatygaactgaagttcrgaaagccttggccaaagataaggaatggcaagaacaattcctcattccaaatttggctctcattgataaacaagagagtgagattacttatctggtaccatggtgcaaattagaaaaacctccaaaagaaggagtctatgaactggccacttttcagatgaaacctggtgggccagctctgtggggtgatgcatttaaaagggcagttcatgctcatgtcaatctaggctacacaaaactagttggagtgttccacacagagtacggagcactcaacagagttcatgttctttggtggaatgagagtgcagatagtcgtgcagctgggagacataagtcccatgaggatcccagagttgtggcagctgttcgggaaagtgtcaactacctagtatctcagcagaatatgcttctgattcctacatcgttttcaccactgaaatagttttctactgaaatacaaaacatttcattaactgctataggatctgtctgctaatggtgcttaaattctcccaagaggttctcacttttatttgaaggaggtgktaagttaatttgctatgtttcttgcattatgaaggctacatctgtgctttgtaagtaccacttcaaaaaatagttctgtttactttctgcrtggtatttcagtgtctgtcatacattaaaaatacttgtcactgttttaagatcttgactcttcatttgtttcagaatagctcttctactgtattctgacaactctttgctttatagcattttgttgtattcaaatgataatggtagcatttccatgcttgtgacagcatttttaagttattaatatattttatcaacctttccatcatgtctgttttcctggttttttttggttgttttttgaccagtaaaatttattttgtaataccaaataggatttaagaaaattaacgtatttctttactatggaaaaccacattgtcatttgtgacatcatctatattaaatatggttttcacattagttatttgtcacttacttggaaaatgatgctgttaggtcctggtattaaaaatctagaaaagacttgttggtttatgtgctgaaatgtctttatttataattaattttaactactatttacttcatttcggatcctgtttaacaaagatacttgagacatccatttgttttaatgaaatctgtatggatatggaaatgcttgccctaataaaagcctacatatacc

SEQ ID NO: 4020 - DNA, 1349 bp, Homo sapiens
cccgaggaagtgacgacaggcgtgcccttgacrggcagggagggctaggctgtgcatccctccgctcgcattgcagggagatggctcagcgacttcttctgaggaggttcctggcctctgtcatctccaggaagccctctcagggtcagtggccacccctcacttccrgagccctgcagaccccacaatgcagtcctggtggcctgactgtaacacccaacccagcccggacaatatacaccacgaggatctccttgacaacctttaatatccaggatggacctgactttcaagaccgagtggtcaacagtgagacaccagtggttgtggatttccacgcacagtggtgtggaccctgcaagatcctggggccgaggttagagaagatggtggccaagcagcacgggaaggtggtgatggccaaggtggatattgatgaccacacagacctcgccattgagtatgaggtgtcagcggtgcccactgtgctggccatgaagaatggggacgtggtggacaagtttgtgggcatcaaggatgaggatcagttggaggccttcctgaagaagctgattggctgacaagcagggatgagtcctggttcccttgcccgcgtgggaccccastagaactcagcccttccatgccagcccttcctgctgcctccctcctgtctggctcctggggcccatgcttagagcccaggctccagccctgagtgcttccgagctggcggactgcccaggggccatcagaggatggtggtgctgctgctgatccggggaccgctgtcttccctcccatacgcctttcatccctccttctagggcctatggcagttctcccaggatgtgtggcgagagcctgggccagcccacagcgttcctagtcaggcagccacaccttggtcctcatcrtggtcccttccaatctgaaacctcgtgcctggctcgtctgccacctacatttctctttckagctgctgttttgtaaaaagaaaaagaaaaaagaagcccaaactagtgagagtaatatctaattatctcattttttgtaggtctgtgataaagaacttagtcatcccttkcacctcctactgtgaagaacagaccctgggtcccacactgaaatcccctctagtcacccattcccaccccccagggagctgcctcccaggcagggggtgcagaaaatgattgatgggctggggaaccctggagagcctcgactccggaagtctcaaggtgcctcctcctctccttagctggcccgttggttttctgagcagggggctgaactgtgaacaagtcagacaaataaagcaagggtctgcaccatctgcaatgtca

SEQ ID NO: 4021 - DNA, 1225 bp, Homo sapiens
cccgaggaagtgacgacaggcgtgcccttgacrggcagggagggctaggctgtgcatccctccgctcgcattgcagggagatggctcagcgacttcttctgaggaggttcctggcctctgtcatctccaggaagccctctcagggtcagtggccacccctcacttccrgagccctgcagaccccacaatgcagtcctggtggcctgactgtaacacccaacccagcccggacaatatacaccacgaggatctccttgacaacctttaatatccaggatggacctgactttcaagaccgagtggtcaacagtgagacaccagtggttgtggatttccacgcacagtgtcagcggtgcccactgtgctggccatgaagaatggggacgtggtggacaagtttgtgggcatcaaggatgaggatcagttggaggccttcctgaagaagctgattggctgacaagcagggatgagtcctggttcccttgcccgcgtgggaccccastagaactcagcccttccatgccagcccttcctgctgcctccctcctgtctggctcctggggcccatgcttagagcccaggctccagccctgagtgcttccgagctggcggactgcccaggggccatcagaggatggtggtgctgctgctgatccggggaccgctgtcttccctcccatacgcctttcatccctccttctagggcctatggcagttctcccaggatgtgtggcgagagcctgggccagcccacagcgttcctagtcaggcagccacaccttggtcctcatcrtggtcccttccaatctgaaacctcgtgcctggctcgtctgccacctacatttctctttckagctgctgttttgtaaaaagaaaaagaaaaaagaagcccaaactagtgagagtaatatctaattatctcattttttgtaggtctgtgataaagaacttagtcatcccttkcacctcctactgtgaagaacagaccctgggtcccacactgaaatcccctctagtcacccattcccaccccccagggagctgcctcccaggcagggggtgcagaaaatgattgatgggctggggaaccctggagagcctcgactccggaagtctcaaggtgcctcctcctctccttagctggcccgttggttttctgagcagggggctgaactgtgaacaagtcagacaaataaagcaagggtctgcaccatctgcaatgtca

SEQ ID NO: 4022 - DNA, 1823 bp, Homo sapiens
gcttactagtctcggggtccccgagtgcggaaaccctacctttgcggtggggtctggacgcccgagagcccttctcagcaaagtccctgaagaggagcgaggcggctccgaggaaccrcggaggaagtgaagccagtcccgccactcttcagaccggccctccacctcggccaccgtcaccacagagctgaaggaggcctagagagccgcgcgtgccgcgccaccgagaccggaaggaggcggcacagacctggaggacgaccgcgrrgctgagcgcttagagccgccgaaccatagagatcggaaataggagcgagcggcagcgccggaaaggaggccaagagcgcgggcggcgaggcaagatggcggcaaccaagaggaaacggcgtggaggctttgcagttcaggcgaagaagccaaaaagaaacgaaatagatgcggagccgccagctaagcggcacgccacrgcagaggaggtggaggaagaagagagggaccggatcccaggccccgtttgcaagggaaagtggaaaaataaggaacggattctcatcttttcttccagaggaataaattttagaacaagacatttaatgcaggacttgagaatgttgatgcctcattctaaagcagatactaaaatggatcgtaaggataagctatttgtgattaacgaggtttgtgaaatgaagaactgtaataaatgcatctattttgaagctaagaaaaaacaggatctctatatgtggctttcaaattcacctcacggaccatctgctaaattccttgttcaaaatattcataccctcgctgaactgaagatgactggaaactgtttgaaaggttctcggccccttttgtcttttgaccctgcttttgatgaattaccacattatgctttgttaaaagaactcttaattcagatctttagtacaccacggtatcatcccaaaagccaaccatttgtggaccacgtgtttactttcaccattttggataataggatatggtttcggaactttcagatcatagaagaagatgctgctcttgtagaaataggacctcgttttgtcttaaatctcataaagattttccagggaagttttggaggaccaactttatatgaaaatcctcactaccagtcaccaaacatgcatcggcgtgtcataagatccatcacagctgcaaaatacagagagaaacagcaagtgaaagatgtgcaaaaactgagaaagaaagagccgaagactcttcttccacatgatcccactgcagatgtttttgtaacaccagctgaggagaaaccaatagaaatacagtgggtaaaaccagagccaaaagttgatttgaaagcaagaaagaaacggatttacaaaaggcaaagaaaaatgaaacagaggatggacagtgggaaaacaaaataagtcaatggaaacctgatttgtttttcagttactttatatttattttgtattcaatgtgtaaatacttttattatctaatactatcttacgtctaattagtgtagcatttacaagaaagaaaaattaagatcttaaaatcagtgattatctttttctaaatwaaatatcaccagaattcatcagttaatttctgatttctttttgaagtttgtgttgctaaaaatgtagcacacttaatgtagcctgttctcttgggttggaatttttggtttagcaaagctgaaattcagacatttattaggtcatattatttgtaaaagcattcaacacttcaagagcatcggttgtggatggtaaagtaggagtagactggtagaaaggaaggcatctcactgaagt

SEQ ID NO: 4023 - DNA, 2743 bp, Homo sapiens
gcttactagtctcggggtccccgagtgcggaaaccctacctttgcggtggggtctggacgcccgagagcccttctcagcaaagtccctgaagaggagcgaggcggctccgaggaaccrcggaggaagtgaagccagtcccgccactcttcagaccggccctccacctcggccaccgtcaccacagagctgaaggaggcctagagagccgcgcgtgccgcgccaccgagaccggaaggaggcggcacagacctggaggacgaccgcgrrgctgagcgcttagagccgccgaaccatagagatcggaaataggagcgagcggcagcgccggaaaggaggccaagagcgcgggcggcgaggcaagatggcggcaaccaagaggaaacggcgtggaggctttgcagttcaggcgaagaagccaaaaagaaacgaaatagatgcggagccgccagctaagcggcacgccacrgcagaggaggtggaggaagaagagagggaccggatcccaggccccgtttgcaagggaaagtggaaaaataaggaacggattctcatcttttcttccagaggaataaattttagaacaagacatttaatgcaggacttgagaatgttgatgcctcattctaaagcagatactaaaatggatcgtaaggataagctatttgtgattaacgaggtttgtgaaatgaagaactgtaataaatgcatctattttgaagctaagaaaaaacaggatctctatatgtggtaagagaatgtattaagattttggttaaactcatttaagtggatttgttctttgtaccttttatgttatagactcctagtgtttcatgttaagggttgagaatgaagcaaacttttgatttcacgraacttgatacctttaaagaaaattaaatgtataaatattataagcatattatttatggtgaataggtggtaagcattgactacatttgctaattagttgaaaaagcttactccatatctttcaggctttcaaattcacctcacggaccatctgctaaattccttgttcaaaatagtaagttgactcaataaatttttttagatgaggaaattaaaagtaatcttttgaaatagttgtgcaaaagttacaactatttttgtttttgttgtaatttttctagttcataccctcgctgaactgaagatgactggaaactgtttgaaaggttctcggccccttttgtcttttgaccctgtaagtttctcattcagtgtatgaggtctaattttcttatctggcatggttgtttttagtagatatagttgtgttattcaatktagtttcacccccaccttggttttatggattatcaattctttcaggtacatttataatgaggttatagccaagttatagaaacaaatgagcaaacagttttaaacaaggcagtctactgttaaataatatgcttaccttatttttataggcttttgatgaattaccacattatgctttgttaaaagaactcttaattcaggtaaatatctttaaaattagctatccaaaatatacatgatatatcttggaataaggaactaacatacacttttttaactagatctttagtacaccacggtatcatcccaaaagccaaccatttgtggaccacgtgtttactttcaccattttggataataggatatggtttcggaactttcagatcatagaagaagatgctgctcttgtagaaataggacctcgttttgtcttaaatctcataaagattttccagggaagttttggaggaccaactttatatgaaaatcctcactaccagtcaccaaacatggtaagcggttgtgtcattcagtagtcttcaatgtaccagaaccctttggccaaaatgattctgtgaagtaattgctgttttattacctgtgaaactgaatttggtttttgctgcatagaaacttggaaattactcccttttttcatgacactggctgaaaggatatatggttcataactgaaagtctttgccttatataaaatgtttatttttatttcaaaagcatctaatcttttttttttttttttagcatcggcgtgtcataagatccatcacagctgcaaaatacagagagaaacagcaagtgaaagatgtgcaaaaactgagaaagaaagagccgaagactcttcttccacatgatcccactgcagatgtttttgtaacaccagctgaggagaaaccaatagaaatacagtgggtaaaaccagagccaaaagttgatttgaaagcaagaaagaaacggatttacaaaaggcaaagaaaaatgaaacagaggatggacagtgggaaaacaaaataagtcaatggaaacctgatttgtttttcagttactttatatttattttgtattcaatgtgtaaatacttttattatctaatactatcttacgtctaattagtgtagcatttacaagaaagaaaaattaagatcttaaaatcagtgattatctttttctaaatwaaatatcaccagaattcatcagttaatttctgatttctttttgaagtttgtgttgctaaaaatgtagcacacttaatgtagcctgttctcttgggttggaatttttggtttagcaaagctgaaattcagacatttattaggtcatattatttgtaaaagcattcaacacttcaagagcatcggttgtggatggtaaagtaggagtagactggtagaaaggaaggcatctcactgaagt

SEQ ID NO: 4024 - DNA, 1809 bp, Homo sapiens
ccagggctggaatggggccgcccggctccccatggcagtgggtgaygctgctgctggggctgctgctccctcctgccgcccccttctggctcctcawtgtgctcttccccchgcacaccaygcccaaggctgagctcagtaaccacacacggcccgtcatcctcgtgcccrgctgcctgsggaatcagctagaagccaagctggacaaaccagatgtggtgaactggatgtgctaccgcaagacagaggacttcttcaccatctggctggatctcaacatgttcctaccccttggggtagactgctggatcgataacaccagggttgtctamaaccggagctctgggctcrtgtccaacgcccctggtgtccagatccgcgtccctggctttggcaagacctactctgtggagtacctggacagcagcaagctggcagggtacctgcacayactggtgcagaacctggtcaacaatggctacgtgyrggacgagactgtgcgcgccgccccctrtgactggyggctggagcccggccagcaggaggagwactacygcaagctcgcagggctggtggaggagatgcacgctgcctatgggaagcctgtyttcctcaytggccacagcctcggctgtctacacttgctctatttcctgctgcgccagccccaggcctggaaggaccgctttattgatggcttcatcwctcytggggctccctggggtggctccatcaagcccatgctggtcttggcctcaggtgacaamcagsgcatccccatcatgtccagcatcaagctgaaagaggagcagcgcataaccaccacctccccctggawgtttccctctcgcatggcgtggcctgaggaccacgtgttcatttccacacccagcttcaactacrcaggccgygacttccaacgcttctttgcagacctgcactttgaggaaggctggtacatrtggctgcagtcacgtgacctcctggcaggactcccagcayctggtgtggaagtatactgtctttacggcgtgggcctgcccaygccccgcacctacatctacgaccacggcttcccctacacggaccctgtgggtgtgctctatgaggatrgtgatgacayggtggcgacccgcagcaccgagctctgtggcctgtggcagggccgccagccacagcctgtgcacytgctgcccctgcacgggatacagcatctcaacatggtcttcagcaacctgaccctggagcacatcaatgccatcctgctgggtgcctacygccagggtccccctgcatccccgactgccagcccagagcccccgcctcctgaataaagaccttcctttgctaccgtaagccctgatggctatgtttcaggttgaagggaggcactagagtcccacactaggtttcactcctcaccagccacaggctcagtgctgtgtgcagtgaggcaagatgggctctgctgaggcctgggactgagctgggcaccctagatgtacagctgcccactctcctggtcgagctgttgaggcagtgtgcaccgtgcctgcctctgtgctgggcgcggggactggagctggctccacccacagccctgtcagaggagcacggggcggtgggggggcggtgacaatttgagctgtctctcccagctcccaaaagggcaggtgagacgaccttttgagtgctgggtgaatgacagggccacaagtgtttagaggccgggcacggtggctcacgcctgtaatcctggcactttgggagaccgaggcaggcggatcacctgaactcaggagtttgaga

SEQ ID NO: 4025 - DNA, 2351 bp, Homo sapiens
actctttccaggatggcctgcctccttcgckcatttcagagaatttctgcaggggttttcttcttagcwctttggkgcatggttgtaggtgacaagctgctggtggtccctcaggacggaagccactggcttagtatgaaggatatagttgaggttctcagtgaccggggtcatgagattgtagtggtggtgcctgaagttaatttgcttttgaaagaatmcaaatactacacaagaaaaatctatccagtgccgtatgaccaagaagagctgaagaaccgttaccaatcatttggaaacaatcactttgctgagcgatcattcctractgctcctcagacagagtacaggaataacatgattgttattggcctgtacttcatcaactgccagagcctcctgcaggacagggacaccctgaacttctttaaggagagcaagtttgatgctcttttcacagacccagccttaccctgtggggtgatcctggctgagtatttgggcctaccatctgtgtacctcttcaggggttttccgtgttccctggagcatrcattcagcagmagcccagaccctgtgtcctacattcccaggtgctacacaaagttttcagaccacatgactttttcccaacgagtkgccaacttccttgttaatttgttggagccctatctattttattgtctgttttcaaagtatgaagaactcgcatcagctgtcctcaagagagatgtggatataatcaccttatatcagaaggtctctgtttggctgttaagatatgactttgtgcttgaatatcctaggccggtcatgcccaacatggtcttcattggaggtatcaactgtaagaagaggaaagacttgtctcaggaatttgaagcctacattaatgcttctggagaacatggaattgtggttttctctttggratcaatggtctcagaaattccagagaagaaagctatggcaattgctgatgctttgggcaaaatccctyrgacagtcctgtgryggtacactggaacccgaccatcgaatcttgcgaacaacacgatacttgttaagtggctacccyraaacgatctgcttggtcacccgatgaccsgtrcctttatcacccatgctggttyccrtgktgtttatgaaagsatatgcaatggcgttcccatggtgatgatgcccttgtttggtgatcagatggacratscaaagcgcatggagactaagggagctggagtgaccctgaatgttctggaaatgacttctgaagatttagaaaatgctctaraagcagtcatcaatgacaaaagttacwaggagaacatcatgcgcctctccagccttcacaaggaccgcccggtggagccgctggacctggccgtgttctgggtggmgtttgtgatgaggcacaagggcgcgccacacmtgcgcccygcagcccacgacctcacctrrtaccagkaccattycttggacgtgattggtttcctctwggccgtcgtgctgacagtggccttcatcacctttaaatgttgtscttatggctaccggaaatgcttggggaaaaaagggcgagttaagaaagcccacaaatccaagacccattgagargtgggtgggaaataaggtaaaattttgaaccattccctagtcatttccaaacttgaaaacagaatcagtgttaaattcattttattcttattaaggaaatactttgcataaattaatcagccccagagtgctttaaaaaattctcttaaataaaaataatagactcgctagtcagtaaagatatttgaatatgtatcgtgccccctcyggtgtctttgatcaggatgacatgtgccatttttcagaggacgtgcagacaggctggcattctagattacttttcttactctgaaacatggcctgtttgggagtgcgggattcaaaggtggtcccacsgctgcccctactgcaaatggcagttttaatcttatcttttggcttctgcagatggttgcaattgatccttaaccaataatggtcagtcctcatctctgtcstgcttcataggtgccaccttgtgtgtttaaagaagggaagctttgtacctttagagtgtaggtgaaatgaatgaatggcttggagtgcactgagaacagcatatgatttcttgctttggggaaaaagaatgatgctatgaaattggtgggtggtgtatttgagaagataatcattgcttatgtcaaatggagctgaatttgataaaaacccaaaatacagctatgaagtgctgggcaagtttactttttttctgatgtttcctacaactaaaaataaattaataaatttatataaattct

SEQ ID NO: 4026 - DNA, 2342 bp, Homo sapiens
ctctgatggcttgcacagggtggaccagcccccttcctctatgtgtgtgtctgctgctgacctgtggctttgccgaggcagggaagctactggtagtgcccayggatgggagccactggttcaccatgaggtcggtggtggagaaactcattctcagggggcatgaggtggttgtagtcatgccagaggtgagttggcaactgggaagatcactgaattgcacagtgaagacttattcaacttcatataccctggaggatctggaccgggagttcaaggcttttgcccatgctcaatggaaagcacaagtacgaagtatatattctctattaatgggttcatacaatgacatttttgacttatttttttcaaattgcaggagtttgtttaaagacaaaaaattagtagaatacttaaaggagagttcttttgatgcagtgtttctcgatccttttgataactgtggcttaattgttgccaaatatttctccctcccctccgtggtcttcgccaggggaatactttgccactatcttgaagaaggtgcacagtgccctgctcctctttcctatgtccccagaattctcttagggttctcagatgccatgactttcaaggagagagtacggaaccacatcatgcacttggaggaacatttattatgccaccgttttttcaaaaatgccctagaaatagcctctgaaattctccaaacacctgttacggagtatgatctctacagccacacatcaatttggttgttgcgaacggactttgttttggactatcccaaacccgwgatgcccaacatgatcttcattggtggtatcaactgccatcagggaaagccgttgcctatggaatttgaagcctacattaatgcttctggagaacatggaattgtggttttctctttggratcaatggtctcagaaattccagagaagaaagctatggcaattgctgatgctttgggcaaaatccctyrgacagtcctgtgryggtacactggaacccgaccatcgaatcttgcgaacaacacgatacttgttaagtggctacccyraaacgatctgcttggtcacccgatgaccsgtrcctttatcacccatgctggttyccrtgktgtttatgaaagsatatgcaatggcgttcccatggtgatgatgcccttgtttggtgatcagatggacratscaaagcgcatggagactaagggagctggagtgaccctgaatgttctggaaatgacttctgaagatttagaaaatgctctaraagcagtcatcaatgacaaaagttacwaggagaacatcatgcgcctctccagccttcacaaggaccgcccggtggagccgctggacctggccgtgttctgggtggmgtttgtgatgaggcacaagggcgcgccacacmtgcgcccygcagcccacgacctcacctrrtaccagkaccattycttggacgtgattggtttcctctwggccgtcgtgctgacagtggccttcatcacctttaaatgttgtscttatggctaccggaaatgcttggggaaaaaagggcgagttaagaaagcccacaaatccaagacccattgagargtgggtgggaaataaggtaaaattttgaaccattccctagtcatttccaaacttgaaaacagaatcagtgttaaattcattttattcttattaaggaaatactttgcataaattaatcagccccagagtgctttaaaaaattctcttaaataaaaataatagactcgctagtcagtaaagatatttgaatatgtatcgtgccccctcyggtgtctttgatcaggatgacatgtgccatttttcagaggacgtgcagacaggctggcattctagattacttttcttactctgaaacatggcctgtttgggagtgcgggattcaaaggtggtcccacsgctgcccctactgcaaatggcagttttaatcttatcttttggcttctgcagatggttgcaattgatccttaaccaataatggtcagtcctcatctctgtcstgcttcataggtgccaccttgtgtgtttaaagaagggaagctttgtacctttagagtgtaggtgaaatgaatgaatggcttggagtgcactgagaacagcatatgatttcttgctttggggaaaaagaatgatgctatgaaattggtgggtggtgtatttgagaagataatcattgcttatgtcaaatggagctgaatttgataaaaacccaaaatacagctatgaagtgctgggcaagtttactttttttctgatgtttcctacaactaaaaataaattaataaatttatataaattctattt

SEQ ID NO: 4027 - DNA, 1853 bp, Homo sapiens
atggccacaggactccaggttcccctgccgyggctggccacaggactgctgcttctcctcagtgtccagccctgggctgaragtggaaaggtgttggtggtgcccattgatggcagccactggctcagcatgcgggaggycttgcgggagctccatgccagaggccaccaggcagtggtcctcaccccagaggtgaatatgcacatcaaagaagagaactttttcaccctgacaacctatgccatttcgtggacccaggatgaatttgatcgccatgtgctgggccacactcaactgtactttgaaacagaacattttctgaagaaatttttcagaagtatggcaatgttgaacaatatgtctttggtctatcataggtcttgtgtggagctactacataatgaggccctgatcaggcacctgaatgctacttcctttgatgtggttttaacagaccccgttaacctctgcgcggcrgtgctggctaagtacctgtcgattcctactgtgttttttttgaggaacattccatgtgatttagactttaagggcacacagtgtccaaacccttcctcctatattcctagattactaacaaccaattcagaccacatgacattcatgcaaagggtcaagaacatgctctaccctctggccctgtcctacatttgccatgctktttctgctccttatgcaagccttgcctctgagctttttcagagagaggtgtcagtggtggatattctcagtcatgcatctgtgtggctgttccgaggggactttgtgatggactaccccaggccaatcrtgcccaacatggtcttcattgggggcatcaactgtgccaacaggaagccactatctcaggaatttgaagcctacattaatgcttctggagaacatggaattgtggttttctctttggratcaatggtctcagaaattccagagaagaaagctatggcaattgctgatgctttgggcaaaatccctyrgacagtcctgtgryggtacactggaacccgaccatcgaatcttgcgaacaacacgatacttgttaagtggctacccyraaacgatctgcttggtcacccgatgaccsgtrcctttatcacccatgctggttyccrtgktgtttatgaaagsatatgcaatggcgttcccatggtgatgatgcccttgtttggtgatcagatggacratscaaagcgcatggagactaagggagctggagtgaccctgaatgttctggaaatgacttctgaagatttagaaaatgctctaraagcagtcatcaatgacaaaagttacwaggagaacatcatgcgcctctccagccttcacaaggaccgcccggtggagccgctggacctggccgtgttctgggtggmgtttgtgatgaggcacaagggcgcgccacacmtgcgcccygcagcccacgacctcacctrrtaccagkaccattycttggacgtgattggtttcctctwggccgtcgtgctgacagtggccttcatcacctttaaatgttgtscttatggctaccggaaatgcttggggaaaaaagggcgagttaagaaagcccacaaatccaagacccattgagargtgggtgggaaataaggtaaaattttgaaccattccctagtcatttccaaacttgaaaacagaatcagtgttaaattcattttattcttattaaggaaatactttgcataaattaatcagccccagagtgctttaaaaaattctcttaaataaaaataatagactcgctagtcagtaaagatatttgaatatgtatcgtgccccctcyggtgtctttgatcaggatgacatgtgccatttttcag

SEQ ID NO: 4028 - DNA, 2380 bp, Homo sapiens
acagtcagctgtcggtggcttctgctgagatggccagaggactccaggttcccctgccgyggctggccacaggactgctgctcctcctcagtgtccagmcctgggctgagagtggaaaggtgttggtggtgcccactgatggcagcccctggctcagcatgcgggaggccktgcgggagctccatgccagaggccaccaggcggtggtcctcaccccagaggtgaatatgyacatcaaagaagagaaatttttcaccctgacagcctatgctgttccatggacccagaaggaatttgatcgcgttacgctgggctacactcaagggttctttgaaacagaacatcttctgaagagatattctagaagyatggcaattatgaacaatgtatctttggcccttcataggtgttgtgtggagctacygcataatgaggccctgatcaggcacctgaatgctacttcctttgatgtggttytaacagaccccgttaacctctgyggggcrgtgctggctaagtacctgtcgattcctgctgtgtttttttggaggtacwttccatgtgacttagactttaagggcacacagtgtccaaatccttcctcctatattcctaagttactaacgaccaattcagaccacatgacattcctgcaaagggtcaagaacatgctctaccctctggccctgtcctacmtttgccatrctktttctgccccttatgcaagycttgcctctgagctttttcagagagaggtgtcagtggtggatcttgtcagctatgcatccgtgtggctgttccgaggggactttgtgatggactaccccaggccgatcatgcccaacatggtcttcattgggggcatcaactgtgccaacgggaagccactatctcaggaatttgaagcctacattaatgcttctggagaacatggaattgtggttttctctttggratcaatggtctcagaaattccagagaagaaagctatggcaattgctgatgctttgggcaaaatccctyrgacagtcctgtgryggtacactggaacccgaccatcgaatcttgcgaacaacacgatacttgttaagtggctacccyraaacgatctgcttggtcacccgatgaccsgtrcctttatcacccatgctggttyccrtgktgtttatgaaagsatatgcaatggcgttcccatggtgatgatgcccttgtttggtgatcagatggacratscaaagcgcatggagactaagggagctggagtgaccctgaatgttctggaaatgacttctgaagatttagaaaatgctctaraagcagtcatcaatgacaaaagttacwaggagaacatcatgcgcctctccagccttcacaaggaccgcccggtggagccgctggacctggccgtgttctgggtggmgtttgtgatgaggcacaagggcgcgccacacmtgcgcccygcagcccacgacctcacctrrtaccagkaccattycttggacgtgattggtttcctctwggccgtcgtgctgacagtggccttcatcacctttaaatgttgtscttatggctaccggaaatgcttggggaaaaaagggcgagttaagaaagcccacaaatccaagacccattgagargtgggtgggaaataaggtaaaattttgaaccattccctagtcatttccaaacttgaaaacagaatcagtgttaaattcattttattcttattaaggaaatactttgcataaattaatcagccccagagtgctttaaaaaattctcttaaataaaaataatagactcgctagtcagtaaagatatttgaatatgtatcgtgccccctcyggtgtctttgatcaggatgacatgtgccatttttcagaggacgtgcagacaggctggcattctagattacttttcttactctgaaacatggcctgtttgggagtgcgggattcaaaggtggtcccacsgctgcccctactgcaaatggcagttttaatcttatcttttggcttctgcagatggttgcaattgatccttaaccaataatggtcagtcctcatctctgtcstgcttcataggtgccaccttgtgtgtttaaagaagggaagctttgtacctttagagtgtaggtgaaatgaatgaatggcttggagtgcactgagaacagcatatgatttcttgctttggggaaaaagaatgatgctatgaaattggtgggtggtgtatttgagaagataatcattgcttatgtcaaatggagctgaatttgataaaaacccaaaatacagctatgaagtgctgggcaagtttactttttttctgatgtttcctacaactaaaaataaattaataaatttatataaattctatttaa

SEQ ID NO: 4029 - DNA, 1604 bp, Homo sapiens
atggccacaggaccccaggttcccctgctgtggctggccacaggagtgctactccttctcagtgcccagccctgggctgagagtgggaaggtgctggtggtacccattgatggcagccactggctcgcatgcgggaggccgtgcgggagctccatgccagaggccaccaggcrgtggtcctcaccccagaggtgaatatgcacatcaaacaagagaaatttttcaccctgacaacctatgccatttcatggacccaggatgaatttgatcgccttgtgctgggccacactcaactgtactttgaaacagaacattttctgaagacattttctaraagtatggcaattwtgaaaaattcatctttggtctttcataggtcttgtgtggagctactgcataatgaggccctgatcaggcacctgaatgctacttccttcgatgtggttttaatagacccaatttacctctgtggggcagtgctggctaagtacctatcaattcctgctgtgttttttttgaggaacattccatgtgatttagactttaagggcacacagtgtccaaatccttcctcctatattcctaagttactaacgaccaattcagaccacatgacattcctgcaaagggtcaagaacatgctctaccctctggcccygtcctacctttgccatgctctttctgctccttatgcaagccttgcctctgagctttttcagagggaggtgtcagtggtggatcttstcagccatgcatctgtgtggctgttccgaggggactytgtgatggattaccccaggccgatcatgcccaacatggtcttcattgggggcatcaactgtgccaacaggaagccactatctcaggaatttgaagcctacattaatgcttctggagaacatggaattgtggttttctctttggratcaatggtctcagaaattccagagaagaaagctatggcaattgctgatgctttgggcaaaatccctyrgacagtcctgtgryggtacactggaacccgaccatcgaatcttgcgaacaacacgatacttgttaagtggctacccyraaacgatctgcttggtcacccgatgaccsgtrcctttatcacccatgctggttyccrtgktgtttatgaaagsatatgcaatggcgttcccatggtgatgatgcccttgtttggtgatcagatggacratscaaagcgcatggagactaagggagctggagtgaccctgaatgttctggaaatgacttctgaagatttagaaaatgctctaraagcagtcatcaatgacaaaagttacwaggagaacatcatgcgcctctccagccttcacaaggaccgcccggtggagccgctggacctggccgtgttctgggtggmgtttgtgatgaggcacaagggcgcgccacacmtgcgcccygcagcccacgacctcacctrrtaccagkaccattycttggacgtgattggtttcctctwggccgtcgtgctgacagtggccttcatcacctttaaatgttgtscttatggctaccggaaatgcttggggaaaaaagggcgagttaagaaagcccacaaatccaagacccattga

SEQ ID NO: 4030 - DNA, 2339 bp, Homo sapiens
atggctcgtgcagggtggactggcctccttccmctatatgtgtgtctactgctgacctgtggctttgccaaggcagggaagctgctggtagtgcccatggatgggagycactggttcaccatgcagtcggtggtggagaaactcatcctcagggggcatgaggtggtcgtagtcatgccagaggtgagttggcaactgggaagatcactgaattgcacagtgaagacttactcaacctcatacactctggaggatcaggaccgggarttcatggtttttgccgatgctcgctggacggcaccattgcgaagtgcattttctctattaacaagttcatccaatrgtatttttgacttatttttttcaaattgcaggagtttgtttaakgacmraaaattagtagaatacttaaaggagagttsttttgatgcagtgtttctcgatccttttgatgcctgtggcttaattgttgccaaatatttctccctcccctctgtggtcttcgccaggggaatattttgccactatcttgaagaaggtgcacagtgccctgctcctctttcctatgtccccagacttctcttagggttctcagacgccatgactttcaaggagagagtayggaaccacatcatgcacttggaggaacatttattttgcccctattttttcaaaaatgtcttagaaatagcctctgaaattctccaaacccctgtcacggcatatgatctctacagccacacatcaatttggttrttgcgaactgactttgttttggagtatcccaaacccgtgatgcccaatatgatcttcattggtggtatcaactgtcatcagggaaagccagtgcctatggaatttgaagcctacattaatgcttctggagaacatggaattgtggttttctctttggratcaatggtctcagaaattccagagaagaaagctatggcaattgctgatgctttgggcaaaatccctyrgacagtcctgtgryggtacactggaacccgaccatcgaatcttgcgaacaacacgatacttgttaagtggctacccyraaacgatctgcttggtcacccgatgaccsgtrcctttatcacccatgctggttyccrtgktgtttatgaaagsatatgcaatggcgttcccatggtgatgatgcccttgtttggtgatcagatggacratscaaagcgcatggagactaagggagctggagtgaccctgaatgttctggaaatgacttctgaagatttagaaaatgctctaraagcagtcatcaatgacaaaagttacwaggagaacatcatgcgcctctccagccttcacaaggaccgcccggtggagccgctggacctggccgtgttctgggtggmgtttgtgatgaggcacaagggcgcgccacacmtgcgcccygcagcccacgacctcacctrrtaccagkaccattycttggacgtgattggtttcctctwggccgtcgtgctgacagtggccttcatcacctttaaatgttgtscttatggctaccggaaatgcttggggaaaaaagggcgagttaagaaagcccacaaatccaagacccattgagargtgggtgggaaataaggtaaaattttgaaccattccctagtcatttccaaacttgaaaacagaatcagtgttaaattcattttattcttattaaggaaatactttgcataaattaatcagccccagagtgctttaaaaaattctcttaaataaaaataatagactcgctagtcagtaaagatatttgaatatgtatcgtgccccctcyggtgtctttgatcaggatgacatgtgccatttttcagaggacgtgcagacaggctggcattctagattacttttcttactctgaaacatggcctgtttgggagtgcgggattcaaaggtggtcccacsgctgcccctactgcaaatggcagttttaatcttatcttttggcttctgcagatggttgcaattgatccttaaccaataatggtcagtcctcatctctgtcstgcttcataggtgccaccttgtgtgtttaaagaagggaagctttgtacctttagagtgtaggtgaaatgaatgaatggcttggagtgcactgagaacagcatatgatttcttgctttggggaaaaagaatgatgctatgaaattggtgggtggtgtatttgagaagataatcattgcttatgtcaaatggagctgaatttgataaaaacccaaaatacagctatgaagtgctgggcaagtttactttttttctgatgtttcctacaactaaaaataaattaataaatttatataaattctatttaa

SEQ ID NO: 4031 - DNA, 2406 bp, Homo sapiens
gtacttcttccgcctactgtatcatagcagcttagaatcccagctgctggctcgggctgcagttctctcatggctcgcgcagggtggaccagccccgttcctttatgtgtgtgtctactgctgacctgtggctttgccgaggcagggaagctgctggtagtgcccatggatgggagtcactggttcaccatgcartcggtggtggagaaacttatcctcagggggcatgaggtggttgtagtcatgccagaggtgagttggcaactggaaagatcactgaattgcacagtgaagacttactcaacctcgtacactctggaagatcagaaccgggaattcatggttttcgcccatgctcaatggaaagcacaggcacaaagtatattttctctattaatgagttcatccagtggttttcttgacttatttttttcgcattgcaggagtttgtttaatgaccgaaaattagtagaatacttaaaggagagttcttttgatgcagtgtttctggatccttttgatacctgtggcttaattgttgctaaatatttctccctcccctctgtggtcttcaccaggggaatattttgccaccatcttgaagaaggtgcacagtgccctgctcctctttcctatgtccccaatgatctcttagggttctcagaygccatgactttcaaggagagagtatggaaccacatcgtgcacttggaggaccatttattttgccagtatctttttagaaatgccctagaaatagcytctgaaattctccaaacccctgtcacggcatatgatmtctacagtcacacatcaatttggttgttgygaacggactttgttttggactatcccaaacccgtgatgcccaacatgatcttcattggtggtatcaactgtcatcagggaaagccattgcctatggaatttgaagcctacattaatgcttctggagaacatggaattgtggttttctctttggratcaatggtctcagaaattccagagaagaaagctatggcaattgctgatgctttgggcaaaatccctyrgacagtcctgtgryggtacactggaacccgaccatcgaatcttgcgaacaacacgatacttgttaagtggctacccyraaacgatctgcttggtcacccgatgaccsgtrcctttatcacccatgctggttyccrtgktgtttatgaaagsatatgcaatggcgttcccatggtgatgatgcccttgtttggtgatcagatggacratscaaagcgcatggagactaagggagctggagtgaccctgaatgttctggaaatgacttctgaagatttagaaaatgctctaraagcagtcatcaatgacaaaagttacwaggagaacatcatgcgcctctccagccttcacaaggaccgcccggtggagccgctggacctggccgtgttctgggtggmgtttgtgatgaggcacaagggcgcgccacacmtgcgcccygcagcccacgacctcacctrrtaccagkaccattycttggacgtgattggtttcctctwggccgtcgtgctgacagtggccttcatcacctttaaatgttgtscttatggctaccggaaatgcttggggaaaaaagggcgagttaagaaagcccacaaatccaagacccattgagargtgggtgggaaataaggtaaaattttgaaccattccctagtcatttccaaacttgaaaacagaatcagtgttaaattcattttattcttattaaggaaatactttgcataaattaatcagccccagagtgctttaaaaaattctcttaaataaaaataatagactcgctagtcagtaaagatatttgaatatgtatcgtgccccctcyggtgtctttgatcaggatgacatgtgccatttttcagaggacgtgcagacaggctggcattctagattacttttcttactctgaaacatggcctgtttgggagtgcgggattcaaaggtggtcccacsgctgcccctactgcaaatggcagttttaatcttatcttttggcttctgcagatggttgcaattgatccttaaccaataatggtcagtcctcatctctgtcstgcttcataggtgccaccttgtgtgtttaaagaagggaagctttgtacctttagagtgtaggtgaaatgaatgaatggcttggagtgcactgagaacagcatatgatttcttgctttggggaaaaagaatgatgctatgaaattggtgggtggtgtatttgagaagataatcattgcttatgtcaaatggagctgaatttgataaaaacccaaaatacagctatgaagtgctgggcaagtttactttttttctgatgtttcctacaactaaaaataaattaataaatttatataaattctattt

SEQ ID NO: 4032 - DNA, 1593 bp, Homo sapiens
atggctcgcacagggtggaccagccccattcccctatgtgtttstctgctgctgacctgtggctttgctgaggcagggaagctgctggtagtgcccatggatgggagtcactggttcaccatgcagtcggtggtggagaaacttatcctcagggggcatgaggtggttgtagtcatgccagaggtgagttggcaactgggaaaatcactgaattgcacagtgaagacttactcaacctcatacactctggaggatctggaccgggaattcatggatttcgccsatgctcaatggaaagcacaagtacgaagtwtrttttctctattwmtgagttcatccaatggtttttttracttatttttttcgcattgcaggagtttgtttaatgaccgaaaattagtagaatacttaaaggagagttcttttgatgcrgtgtttctkgatccttttgatrcctgtggcttaattgttgcyaaatatttctccctcccctctgtggtcttcrccaggggaatagbttgccactatcttgaagaaggtgcacagtgccctgctcctctttcctatgtccccagaattctcttagggttctcagatgccatgactttcaaggagagagtayggaaccacatcrtgcacttggaggamcatttattttgccagtatttttccaaaaatgccctagaaatagcctctgaaattctccaaacmcctgtcacrgcatatgatctctacagccacacatcaatttggttgttgcgaacagactttgttttggactatcccaaacccgtgatgcccaatatgatcttcattggtggtatcaactgccatcagggaaagccattgcctatggaatttgaagcctacattaatgcttctggagaacatggaattgtggttttctctttggratcaatggtctcagaaattccagagaagaaagctatggcaattgctgatgctttgggcaaaatccctyrgacagtcctgtgryggtacactggaacccgaccatcgaatcttgcgaacaacacgatacttgttaagtggctacccyraaacgatctgcttggtcacccgatgaccsgtrcctttatcacccatgctggttyccrtgktgtttatgaaagsatatgcaatggcgttcccatggtgatgatgcccttgtttggtgatcagatggacratscaaagcgcatggagactaagggagctggagtgaccctgaatgttctggaaatgacttctgaagatttagaaaatgctctaraagcagtcatcaatgacaaaagttacwaggagaacatcatgcgcctctccagccttcacaaggaccgcccggtggagccgctggacctggccgtgttctgggtggmgtttgtgatgaggcacaagggcgcgccacacmtgcgcccygcagcccacgacctcacctrrtaccagkaccattycttggacgtgattggtttcctctwggccgtcgtgctgacagtggccttcatcacctttaaatgttgtscttatggctaccggaaatgcttggggaaaaaagggcgagttaagaaagcccacaaatccaagacccattga

SEQ ID NO: 4033 - DNA, 2594 bp, Homo sapiens
tgttcactcaagaatgtgatttgagtatgaaattccagccagttcaactgttgttgcctattaagaaacctaataaagctccaccttctttatctctgaaagtgaactccctgctacctttgtggactgacagctttttatagtcacgtgacacagtcaaacattaacttggtgtatcgattsgtttttgccatatatatatatataagtaggagagggcgaacctctggcaggagcaaaggcgccatggctgtggagtcccagggcggacgcccacttgtcctgggcckgctgctgtgtgtgctgggcccagtggtgtcccatgctgggaagatactgttgatcccagtggatggcagcsactggctgagcatgcttggggccatycagyagctgcagcagaggggacatgaaatagttgtcctagcacctgacgcctcgttgtacatcagagacrgagcattttamaccttgaagacgtaccctgtgccaytccaaagggaggatgtgaaagagtcttttgttagtctcgggcataatgtttttgagaatgattctttcctgcagcgtgtgatcaaaacatacaagaaaataaaaaaggactctgctatgcttttgtctggctgttcccacttactgcacaacaaggagctcatggcctccctggcagaaagcagctttgatgtcatgctgacggaccctttccttccttgcagccccatcgtggcccagtacctgtctctgcccactgtattcttcttgcatgcacwgccaygcagcctggaatttgaggctacccagtgccccaacccattctcctacgtgcccaggcctctctcctctcattcagatcacatgaccttcctgcagygggtgaagaacatgctcattgccttttcacagaactttctgtgcgacgkggtttattcccmgtatgcaacccttgcctcagaattccttcagagagaggtgactgtccaggacctattgagcyctgcatctgtctggctgtttagaagtgactttgtgaaggattaccctaggcccatcatgcccaatatggtttttgttggtggaatcaactgccttcaccaaaatccactatcccaggaatttgaagcctacattaatgcttctggagaacatggaattgtggttttctctttggratcaatggtctcagaaattccagagaagaaagctatggcaattgctgatgctttgggcaaaatccctyrgacagtcctgtgryggtacactggaacccgaccatcgaatcttgcgaacaacacgatacttgttaagtggctacccyraaacgatctgcttggtcacccgatgaccsgtrcctttatcacccatgctggttyccrtgktgtttatgaaagsatatgcaatggcgttcccatggtgatgatgcccttgtttggtgatcagatggacratscaaagcgcatggagactaagggagctggagtgaccctgaatgttctggaaatgacttctgaagatttagaaaatgctctaraagcagtcatcaatgacaaaagttacwaggagaacatcatgcgcctctccagccttcacaaggaccgcccggtggagccgctggacctggccgtgttctgggtggmgtttgtgatgaggcacaagggcgcgccacacmtgcgcccygcagcccacgacctcacctrrtaccagkaccattycttggacgtgattggtttcctctwggccgtcgtgctgacagtggccttcatcacctttaaatgttgtscttatggctaccggaaatgcttggggaaaaaagggcgagttaagaaagcccacaaatccaagacccattgagargtgggtgggaaataaggtaaaattttgaaccattccctagtcatttccaaacttgaaaacagaatcagtgttaaattcattttattcttattaaggaaatactttgcataaattaatcagccccagagtgctttaaaaaattctcttaaataaaaataatagactcgctagtcagtaaagatatttgaatatgtatcgtgccccctcyggtgtctttgatcaggatgacatgtgccatttttcagaggacgtgcagacaggctggcattctagattacttttcttactctgaaacatggcctgtttgggagtgcgggattcaaaggtggtcccacsgctgcccctactgcaaatggcagttttaatcttatcttttggcttctgcagatggttgcaattgatccttaaccaataatggtcagtcctcatctctgtcstgcttcataggtgccaccttgtgtgtttaaagaagggaagctttgtacctttagagtgtaggtgaaatgaatgaatggcttggagtgcactgagaacagcatatgatttcttgctttggggaaaaagaatgatgctatgaaattggtgggtggtgtatttgagaagataatcattgcttatgtcaaatggagctgaatttgataaaaacccaaaatacagctatgaagtgctgggcaagtttactttttttctgatgtttcctacaactaaaaataaattaataaatttatataaattctatttaa

SEQ ID NO: 4034 - DNA, 917 bp, Homo sapiens
taggaggcacagcgtggggtggacagtcagctgtccgtgtcttctgctgagatggccacaggaccccaggttcccctgctgtggctggccacaggagtgctactccttctcagtgcccagccctgggctgagagtgggaaggtgctggtggtacccattgatggcagccactggctcgcatgcgggaggccgtgcgggagctccatgccagaggccaccaggcrgtggtcctcaccccagaggtgaatatgcacatcaaacaagagaaatttttcaccctgacaacctatgccatttcatggacccaggatgaatttgatcgccttgtgctgggccacactcaactgtactttgaaacagaacattttctgaagacattttctaraagtatggcaattwtgaaaaattcatctttggtctttcataggtcttgtgtggagctactgcataatgaggccctgatcaggcacctgaatgctacttccttcgatgtggttttaatagacccaatttacctctgtggggcagtgctggctaagtacctatcaattcctgctgtgttttttttgaggaacattccatgtgatttagactttaagggcacacagtgtccaaatccttcctcctatattcctaagttactaacgaccaattcagaccacatgacattcctgcaaagggtcaagaacatgctctaccctctggcccygtcctacctttgccatgctctttctgctccttatgcaagccttgcctctgagctttttcagagggaggtgtcagtggtggatcttstcagccatgcatctgtgtggctgttccgaggggactytgtgatggattaccccaggccgatcatgcccaacatggtcttcattgggggcatcaactgtgccaacaggaagccactatctcag

SEQ ID NO: 4035 - DNA, 2278 bp, Homo sapiens
ccctgggtcttcctagccccaagactttcaagtccatatgcctggaatcccccgtcctgagacccttaaccctgcatcctccacaacagaagacccccagatgcacagccacacttccatctcaccctartaaaacccagacctttggattcctctcccgtggaatgcccaaatccacaactttggggtgcattctcactcccagatcccaaatccaaagtccaggtgctcccctgtgcaaatattccaaactcctcagttccacagtttatctgttgcccgctcctaaatccacagccctgcagcaaccctcctgaagtaccagatttagtctggagttcccctccctgttcagcttccctggggtccctctcctcctcccttgctggctgtgtcctaagctgtgtgggattcagggttggggtgtagttgggaggtgaaatgaggtgattatataatcaacyaaagtccatccctctttttcaggcagtataaaggcaaaccaccccagccatcaccatctatcatcccactgccaccatgctggcctcagggctgcttctggtgaccttgctggcctgcctgactgtgatggtcttgatgtcwgtctggcrgcagaggaagagcagggggaagctgcctccgggacccaccccattgcccttcattggaaactacctgcagctgaacacagagcagatgtacaactccctcatgaagatcagtgagmgctatggccctgtgttcaccattcacttggggccccggcgggtcgtggtgctgtgcggacatgatgccgtcaaggaggctctggtggaccaggctgaggagttcagcgggcgaggcgagcaggccaccttcgactggctcttcaaaggctatggcgtggcgttcagcaacggggagcgcgccaagcagctccggcgcttctccatcgccaccctaaggggttttggcgtgggcaagcgcggcatcgaggaacgcatccaggaggaggcgggcttcctcatcgacgccctccggggcacgcacggcgccaatatcgatcccaccttcttcctgagccgcacagtctccaatgtcatcagctccattgtctttggggaccgctttgactatgaggacaaagagttcctgtcactgttgcgcatgatgctgggaagcttccagttcacggcaacctccacggggcagctctatgagatgttctcttcggtgatgaaacacctgccaggaccacagcaacaggcctttaaggagctgcaagggctggaggacttcatcgccaagaaggtggagcacaaccagygcacgctggatcccaattccccacgggacttcatcgactcctttctcatccgcatgcaggaggaggagaagaaccccaacacagagttctacttgaagaacctggtgatgaccaccctgaacctcttctttgcgggcactgagaccgtgagcaccaccctgcgctacggtttcctgctgctcatgaagcaccyagaggtggaggccaaggtccatgaggagattgacagagtgatcggcaagaaccggcagcccaagtttgaggaccgggccaagatgccctacacagaggcagtgatccacgagatccaaagatttggagacatgctccccatgggtttggcccacagggtcaacaaggacaccaagtttcgggatttcttcctccctaagggcactgaagtgttccctatgctgggctccgtgctgagagaccccaggttcttctccaacccccgggacttcaatccccagcacttcctggataagaaggggcagtttaagaagagtgatgcttttgtgcccttttccatcggaaagcggtactgttttggagaaggcctggccagaatggagctctttctcttcttcaccaccatcatgcagaactttcgcttcaagtcccctcagtcgcctaaggatatcgacgtgtcccccaaacacgtgggctttgccacgatcccacgaaactacaccatgagcttcctgccccgctgagcgagggctgtgctggtgcagggctggtgggcggggccagggaaacggcsggggcaggggcggggcttgtgggaggggcggggctaagaatgggggcagtgggggaaggaaggggagaggtggttagagggaacagaagaaacagaaggggctcagttcaccttgatgatgtccttcagagctgtgatgagaggaagggaaaccttacagtatgctacaaagagtagtaataatagcagctcttatttcctga

SEQ ID NO: 4036 - DNA, 2635 bp, Homo sapiens
ctggtttaatttcaggtcgatggccaggtggtcttcataaactatactgccttgtgatgcctccctagaaatgagaggtctcaataccagctcagaccatgtggaccgcggatgagattgctcagctatgctatgaacactatgggatcaggctgcccaagaaggggaagcctgagccaaaccatgagtggacattattggcagcggtggtgaagatacaatctccagctgacaaggcctgcgacacccctgataagccggtgcaagtgacaaaggaagttgtgtcaatgggaacaggaacaaaatgcataggacagtccaaaatgaggaagaacggagacatcctcaatgatagccatgctgaggtcatagccagaaggagtttccaaaggtaccttctccaccaactccagttggcagccaccctgaaagaggatagcatctttgtcccaggaactcaaaaaggagtgtggaaacttagacgagacctcatttttgtgtttttctccagccatacaccctgtggggatgcctccatcattccgatgcttgagtttgaagatcagccttgctgtcctgtcttcagaaattgggccmacaactcatcagtagaagccagtagtaacctggaagctcctggaaatgaaagaaaatgtgaagaccctgacagtcctgtaaccaaaaagatgaggcttgagcctgggamtgcagccagggaggtcaccaacggagcagctcaccatcagagttttggcaagcagaaaagtggcccartctcaccaggcatccayagctgtgatctcactgtagagggactggctmctgtcaccagaatagcccctggtagtgccaaagtgayagacgtttatagaactggagccaagtgygtacctggagaagctggagactccggaawgccgggtgctgcgtttcaccaggtggggctgctccgagtgaagccaggccgtggagacagaacacgctccatgtcctgtagtgacaagatggcccgatggaacgtcctcggatgccaaggggcactgttgatgcacttgctggaagagcccatctacctgtcagctgtggtcattgggaagtgcccatacagccaggaagccatgcagagagcactgattggaaggtgtcagaatgtgtctgctttaccaaaaggcttcggagttcaagaattaaaaatactgcagtcagatttactatttgaacagagccgcagtgcggtgcaggcaaaaagggctgayagcccaggtcgacttgttccttgtggggcagccatcagctggagtgcagttcctgagcagcctttggatgttactgccaatggctttccacagggaacaacaaagaaaacaattggaagccttcaggcaagatcccaaatcagcaaagtggaactcttcagatcrttccagaagctgctaagcagaattgcaagggacaagtggccacactccctcagggtgcagaagctggatacctaccaggagtacaaggaggctgcgtcctcttaccaggaagcctggagcacactccggaagcaggtgtttggatcctggatcagaaacccaccggattatcaccagttcaagtgagaaggaaatgtttgctctggtagcaggacccttcatcctgaactgccttcctccacgcaggacaagtcttagcttttttggtagttaaatcagggaacattctttctgagctttgcatctctgttgtgtaatacagatggaatctggaacttagagcaagctatacttgattgaagtagctctctgctaaaatggcatctcactaatgacctcactatctgacttccattgtgttttattgcttctctaaaatatgaaatcagagtttggaacatgatgctttgaaagtactctgcagcagctctgttttatgggttcctacattgattcagcaaatatttattgagctgaaatgatgtttgacgctctgcaagttttacagctttgcctagcatagcgaatatatattttgtattcccagcctttctttcttcagggagccattcttttcccattcttcagtgatcctgctctgtgcctcagacttggctgaagctaaccttactccctggctctaggaatagcctgtgagccagccctggactgccctggacttgttctcagaggtatcaggaaaggctttctgttttgatctggagctgtaagggtcacataatcatgggactgccggtggccatcttttcctactacctagagaaagccagcaaagaatgaaggcaacaaaggaaacagccaagagaatcaaagatctagtaacactgtttagatgtctcaattatgtgagacagattcctgttgttattttgattaagcctgtttgtgttggttttctgacttacaattgaaagagttctgtccaaaaacctggccaacctggtgaaaccctgtctctrctaaaaatgcaaaaactrgccgggcatggtggcgcacacctgtrrtcctagctactcgggaggctgaggcrggagaattgcttgaacccaggaggcggaggtagtggtgagcaaagatcgtaccgctgcactccagcctgggtgatagagcaagaccctatctcaaaaaaaaaa

SEQ ID NO: 4037 - DNA, 2723 bp, Homo sapiens
ctggtttaatttcaggtcgatggccaggtggtcttcataaactatactgccttgtgatgcctccctagaaatgagaggtctcaataccagctcagaccatgtggaccgcggatgagattgctcagctatgctatgaacactatgggatcaggctgcccaagaaggggaagcctgagccaaaccatgagtggacattattggcagcggtggtgaagatacaatctccagctgacaaggcctgcgacacccctgataagccggtgcaagtgacaaaggaagttgtgtcaatgggaacaggaacaaaatgcataggacagtccaaaatgaggaagaacggagacatcctcaatgatagccatgctgaggtcatagccagaaggagtttccaaaggtaccttctccaccaactccagttggcagccaccctgaaagaggatagcatctttgtcccaggaactcaaaaaggagtgtggaaacttagacgagacctcatttttgtgtttttctccagccatacaccctgtggggatgcctccatcattccgatgcttgagtttgaagatcagccttgctgtcctgtcttcagaaattgggccmacaactcatcagtagaagccagtagtaacctggaagctcctggaaatgaaagaaaatgtgaagaccctgacagtcctgtaaccaaaaagatgaggcttgagcctgggamtgcagccagggaggtcaccaacggagcagctcaccatcagagttttggcaagcagaaaagtggcccartctcaccaggcatccayagctgtgatctcactgtagagggactggctmctgtcaccagaatagcccctggtagtgccaaagtgayagacgtttatagaactggagccaagtgygtacctggagaagctggagactccggaawgccgggtgctgcgtttcaccaggtggggctgctccgagtgaagccaggccgtggagacagaacacgctccatgtcctgtagtgacaagatggcccgatggaacgtcctcggatgccaaggggcactgttgatgcacttgctggaagagcccatctacctgtcagctgtggtcattgggaagtgcccatacagccaggaagccatgcagagagcactgattggaaggtgtcagaatgtgtctgctttaccaaaaggcttcggagttcaagaattaaaaatactgcagtcagatttactatttgaacagagccgcagtgcggtgcaggcaaaaagggctgayagcccaggtcgacttgttccttgtggggcagccatcagctggagtgcagttcctgagcagcctttggatgttactgccaatggctttccacagggaacaacaaagaaaacaattggaagccttcaggcaagatcccaaatcagcaaagtggaactcttcagatcrttccagaagctgctaagcagaattgcaagggacaagtggccacactccctcagggtgcagaagctggatacctaccaggagtacaaggaggctgcgtcctcttaccaggaagcctggagcacactccggaagcaggtgtttggatcctggatcagaaacccaccggattatcaccagttcaagtgagaaggaaatgtttgctctggtagcaggacccttcatcctgaactgccttcctccacgcaggacaagtcttagcttttttggtagttaaatcagggaacattctttctgagctttgcatctctgttgtgtaatacagatggaatctggaacttagagcaagctatacttgattgaagtagctctctgctaaaatggcatctcactaatgacctcactatctgacttccattgtgttttattgcttctctaaaatatgaaatcagagtttggaacatgatgctttgaaagtactctgcagcagctctgttttatgggttcctacattgattcagcaaatatttattgagctgaaatgatgtttgacgctctgcaagttttacagctttgcctagcatagcgaatatatattttgtattcccagcctttctttcttcagggagccattcttttcccattcttcagtgatcctgctctgtgcctcagacttggctgaagctaaccttactccctggctctaggaatagcctgtgagccagccctggactgccctggacttgttctcagaggtatcaggaaaggctttctgttttgatctggagctgtaagggtcacataatcatgggactgccggtggccatcttttcctactacctagagaaagccagcaaagaatgaaggcaacaaaggaaacagccaagagaatcaaagatctagtaacactgtttagatgtctcaattatgtgagacagattcctgttgttattttgattaagcctgtttgtgttggttttctgacttacaattgaaagagttctgtccaaaaagccaaaaggtggccaggcttggtggctcaggcctgtaatcccagcactttgggaagcccaggcaggcagatcrcttgaggtcaggagttcaagaccagcctggccaacctggtgaaaccctgtctctrctaaaaatgcaaaaactrgccgggcatggtggcgcacacctgtrrtcctagctactcgggaggctgaggcrggagaattgcttgaacccaggaggcggaggtagtggtgagcaaagatcgtaccgctgcactccagcctgggtgatagagcaagaccctatctc

SEQ ID NO: 4038 - DNA, 1002 bp, Homo sapiens
gcagctcggggctgcgcagcgggaaggctcgcctagtcggtccgcatccgtgtcgaccacctgtctggacaccacgaagatgccacccgttgggggcaaaaaggccaagaagggcatcctagaacgtttaaatgctggagagattgtgattggagatggagggtttgtctttgcactggagaagaggggctacgtaaaggcaggaccctggactcctgaagctgctgtggagcacccagaagcagttcgccagcttcatcgagagttcctcagagctggctcaaacgtcatgcagaccttyaccttctatgcgagtgaagacaagctggagaacaggggagcatccatcattggtgtgaactgccactkkgaccccaccattagtttaaaaacagtgaagctcatgaaggagggcttggaggctgcccractgaaagctcacctgatgagccagcccttggcttaccacactcctgactgcaacaagcagggattcatcgatctyccagaattcccatttggactggaacccagagttgccaccagatgggatattcaaaaataygccagagaggcctacaacctgggggtcaggtacattggcgggtgctgtggatttgagccctaccacatcagggcaattgcagaggagctggccccagaaaggggctttttgccrccagcttcagaaaaacatggcagctggggaagtggtttggacatgcacaccaaaccctgggttagagcaagggccaggaaggaatactgggagaatcttcggatagcctcaggccggccatacaacccttcaatgtcaaagccagatggctggggagtgaccaaaggaacagccgagctgatgcagcagaaagaagccacaactgagcagcagctgaaagagctctttgaaaaacaaaaattcaaatcacagtagcctcgatagaagctatttttgatgaatttctaggtgtttgggtcacagttcctacaaatacggaaaag

SEQ ID NO: 4039 - DNA, 2469 bp, Homo sapiens
gcagctcggggctgcgcagcgggaaggctcgcctagtcggtccgcatccgtgtcgaccacctgtctggacaccacgaagatgccacccgttgggggcaaaaaggccaagaagggcatcctagaacgtttaaatgctggagagattgtgattggagatggagggtttgtctttgcactggagaagaggggctacgtaaaggcaggaccctggactcctgaagctgctgtggagcacccagaagcagttcgccagcttcatcgagagttcctcagagctggctcaaacgtcatgcagaccttyaccttctatgcgagtgaagacaagctggagaacaggggcaactatgtcttagagaagatatctgggcaggaagtcaatgaagctgcttgcgacatcgcccgacaagtggctgatgaaggagatgctttggtagcaggaggagtgagtcagacaccttcataccttagctgcaagagtgaaactgaagtcaaaaaagtatttctgcaacagttagaggtctttatgaagaagaacgtggacttcttgattgcagagtattttgaacacgttgaagaagctgtgtgggcagttgaaaccttgatagcatccggtaaacctgtggcagcaaccatgtgcattggcccagaaggagatttgcatggcgtgccccccggcgagtgtgcagtgcgcctggtgaaagcaggagcatccatcattggtgtgaactgccactkkgaccccaccattagtttaaaaacagtgaagctcatgaaggagggcttggaggctgcccractgaaagctcacctgatgagccagcccttggcttaccacactcctgactgcaacaagcagggattcatcgatctyccagaattcccatttggactggaacccagagttgccaccagatgggatattcaaaaataygccagagaggcctacaacctgggggtcaggtacattggcgggtgctgtggatttgagccctaccacatcagggcaattgcagaggagctggccccagaaaggggctttttgccrccagcttcagaaaaacatggcagctggggaagtggtttggacatgcacaccaaaccctgggttagagcaagggccaggaaggaatactgggagaatcttcggatagcctcaggccggccatacaacccttcaatgtcaaagccagatggctggggagtgaccaaaggaacagccgagctgatgcagcagaaagaagccacaactgagcagcagctgaaagagctctttgaaaaacaaaaattcaaatcacagtagcctcgatagaagctatttttgatgaatttctaggtgtttgggtcacagttcctacaaatacggaaaagggggttaaaaagcagtgctttcatgaatgccatcctacacatattattgctattacctgaacaaaatagaattacaaatagcacttgataattttaaagtatgttttagaaattttcttaggagcaaaataagtacaaagtaaatcttgaacaggttcactaagcacccaccctgtgaaaagtattatggaaatcactgcwgcacaggaaaagtaattcagatgttaatgccacttgaagaagttggtaggctagcaaagaggatgagacatgaactgtcataaaggactcagcaaccagccagggacagataaagcgctatggaaaggggcttccaagttcttttgaacatgacccttagtaacaaacacaatttatataatgacccagcaaaacacatcacatcttactgtcgaaattaaatgtgtgatccatcctagtattttctgttccattccttttcattctatttcatttataaaacatgctagttgagacttttcaaatggatttttatgacccactactgggtttggatccacagtttgaaaaatattgctacaagacacttaaggagaccatcctgtttaagtttattcttataagtaggtcagtcatatgagacctgatcaataaatatccaatacccagagtcctgctctcagagttcttctgtttcgtgacccacttttctaccagtaaaagacatagaccaatggggaggaggggaggagagatggatatttcagccctctccatcctagtcaacactggatccacctagtgcctctgggccataaggctgagcagagtgagcttgtattagttggtagcttttaaaaaatataataagaaaaaagtagagattctccaaactctagcctggtttcctagattgagaactatgatatttttctctgataatttaatatctactctcctacaaaagctcaagcctgaagatacaagactattagaagaaacatgactaccctcagtgtattagaaaagaggtyatgcagctttctaaacattattgaattgtttgagctgttttkaaattgtaattcttttcagctattaaaaagaagagcaatgaga

SEQ ID NO: 4040 - DNA, 1208 bp, Homo sapiens
cgtcgcggagacacgtgaaggtcggtgcggagttcgtctctgcaagcttggtcgcyctgggatggattcctcctcctcttcctccgcggcgggtttgggtgcagtggacccgcagttgcagcatttcatckaggtagagactcaaaagcagcgcttccagcagctggtgcaccagatgactgaactttgttgggagaagtgcatggacaagcctgggccaaagttggacagtcgggctgaggcctgttttgtgaactgsgttgagcgcttcattgatacaagccagttcatcttgaatygactggaacagacccagaaatccaagccagttttctcagamagcctttctgactgatctcagcattacctctttggaaaaggaaggtagttcaagaaatgaagagctgttgatgggatgattgaagaaacagctatgagaggattggctcccmtcttttgttactcttgggacatcctgtcatctgagaatgaacaaagaccaattttttgtgtgtgaagcttaagggtcatatgtttgcttgtattttttaatgctaatcttgtgaaaataattgacaggygaaagaaaactctatttagatgcatattactgtacatgggactatgcttttctcaaagccccattaactgcttcctataattttgatagtgggaccacatacgtaaaaatctctcatttgtgtggagtcatttctgatttcaggggagatccttgtgtttatcagaaagggcagaagtaggggaagaataatttggtatccttatctagtgtttgattgtcaatgctggagaaaaatatctgtaagagtgtttatacagtacacttcagttatcttgadctccctttcctatatratgatttgcttaaatatccatattaagtaagtctcaaggtagggtaggcagcctgagagtctagaggcctttagttataaaggaatctagccagtgaacataattcttattactagactgccacaaggaagaaattaacttaccctgtatatcagggtacaaaaaattcagtgatgtgcctaaataagttataaagatttaggccaatcagaagctaacagcagtttcaggtagaggtgcatgcctaatgttagttagtgtagattccatttactgcattcttctgatcactgaaataaaagctatataagattcaactctgtgattgagaa

SEQ ID NO: 4041 - DNA, 1502 bp, Homo sapiens
gagacacgtgaaggtcggtgcggagttcgtctctgcaagcttggtcgcyctgggatggattcctcctcctcttcctccgcggcgggtttgggtgcagtggacccgcagttgcagcatttcatckaggtagagactcaaaagcagcgcttccagcagctggtgcaccagatgactgaactttgttggagatgggatcttgtgatgttgcccaggctagagtgcagtggcacaatcatgtcttcaatatcccattttcagcattggacagattttccagacagaaaaatcaacaaagaaatgtcagacttaatctgcactatagaaaaagtgaatctaatagatatttacagaacgtttcatccaacagctgcaaaatacacattcttctcctagcacatggatcwttctcaaggacaaccatatgttaggtcacaaagcaagtcttaaaacatttttaaacattgaaatagcatcaagcatcttctctgaccacagtggaataaaactagaaatcaataacgagagggattttagaaactatacaaacacatggaaattaaacagtatgctcctgaatgacaagtgggtcaatgaagaaattaaaaagaaaattgaaaaatgtcttgaaacaaatgataatggaaacacaacataccaaaacctatgggatacagcaaaagcagtagtgagagggaagtttatagctataagcacctacatcaaaaaagaagaaaaacttcaaataaataatctaaccatgaatcttatagaactagagaactaagagcaaacaaaatccaaagttactagaagaaaatgaataatatagatcagagcagaaataaaataaaaatgaagaaaacaatacaaaagatcaatgaaaggaaaagttggttttttaaaaataaacaaaattgacaaacccttagccagaacaatgagggtaaaaaccaaagaagacccaaataaataaaatcagagatgaaaagggatattacaactgatactgcagaaactcaaaggatcattagtggctactatgagccaataaattggaaaatctagaagaaatggatacatttctagacatatataatctacaaggattgaaccaggaagaaatccaaaacctgaacagacgaataacaagtaatgagatcgacggcataataaaaagtctcccagcaaagaaaagcccaggacctaatggcttcattaacgacttctaccaaacattaaaagaagaagtaataccagttctactcaaaccattccaaaagaagaggagragggaatacttccagtctcattctacaaggctagtattaaccttgataccaaaattagacaaaacacataaaaaaaaaaagaaaactacaagccaatttctttgatgaatatggatgcaaacatcctgaacaaaatactagcaaactgaattcaacaacacattaaaaaggtcattcatcctgaccaagtgggatttatccccgggatgcaag

SEQ ID NO: 4042 - DNA, 3252 bp, Homo sapiens
cagccaagcccagccaagcccagccaagccccgccgatcgcgggcaccggagccagccccgcagcggagggaccacagagcaccagcctgcatggaacttccttcctcactcagcttyccacgttgccagctgggacaggggagatggagtaattttgctgtggaaagacttcacgtcttgccgaatgaaagtcccgcctgtctgtcacgctgatgcccgtgcagctgtctgagcacccggaatggaatgagtctatgcactccctccggatcagtgtggggggccttcctgtgctggcgtccatgaccaaggccgcggacccccgcttccgcccccgctggaaggtgatcctgacgttctttgtgggtgctgccatcctctggctgctctgctcccaccgcccggcccccggcaggccccccacccacaatgcacacaactggaggctcggccaggcgcccgccaactggtacaatgacacctaccccctgtctcccccacaaaggacaccggctgggattcggtatcgaatcgcagttatcgcagacctggacacagagtcaagggcccaagaggaaaacaccyggttcagttacctgaaaaagggctacctgaccctgtcagacagtggggacaaggtggccgtggaatgggacaaagaccatggggtyctggagtcccacctggcggagaaggggagaggcatggagctatccgacctgattgttttcaatgggaaactctactccgtggatgaccggacgggggtcgtctaccagatcgaaggcagcaaagccgtgccctgggtgattctgtccgacggcgacggcaccgtggagaaaggcttcaaggccgaatggctggcagtgaaggacgagcgtctgtacgtgggcggcctgggcaaggagtggacgaccactacgggtgatgtggtgaacgagaacccggagtgggtgaaggtggtgggctacaagggcagcgtggaccacgagaactgggtgtccaactacaacgccctgcgggctgctgccggcatccagccgccaggctacctcatccatgagtctgcctgctggagtgacacgctgcagcgctggttcttcctgccgcgccgcgccagccaggagcgctacagcgagaaggacgacgagcgcaagggcgccaacctgctgctgagcrcctcccctgacttcggcgacatcgctgtgagccacgtcggggcggtggtccccactcacggcttctcgtccttcaagttcatccccaayaccgacgaccagatcattgtggccctcaaatccgaggaggacagcggcagagtcgcctcctacatcatggccttcacrctggacgggcgcttcctgttgccggagaccaagatcgraagcgtgaaatacgaaggcatcgagttcatttaactcaaaacrgaaacactgagcaaggccatcaggactcagcttttataaaaacaagaggagtgcacttttgttttgttttgttctttttggaactgtgcctgggttggaggtctggacagggagcccagtcccgggccccatagtggtgcgggcactggacccccgggccccacggaggccgcggtctgaactgctttccatgctgccatctggtggtgatttcggtcacttcaggcattgactcaaggcctgcctaactggctgggtcgtttcttccatccgacctcgtttcttttctttcctatgttcttttgttcagtgaatatccctagagctcctaccatatgtcaggccctatgcctcaccctgagaacgcagtgagcatgaggtggacctgtttgctgggaaccccaggtcacccccttttcttcctactctgtgcctggagcatcatgtccacccctgcagatccttggaaaagaaaatgtttatgttgcagggtattgcatggtcacgagtgagggcaggcccctggggacacatctgcccacagctgcacaggccagggcgcaggcacatctgttggttctcaggcctcagataaaaccatctccgcatcatatggccagtgaccgctttctcccttcaagaaaattctgtggctgtgcagtactttgaagttttaattattaacctgctttaattaaagcagtttcctttcttataaagtggaatcaccaaatcttatcacacagagcacagtcctgtagttacccagcccgctccagcagtgcgggagattgtaaggaagcggtggcggctggtgaagcaagtctcacatgtcggygttcttggccaatggatacaaagataaagaaaatgttgcctttttctaggaactgtcagaaatcctcatgcctttcaagacttctgtgaatgacttgaattttttattccctgcctagggtctgtgaacgaggcctgtctcttccctggggtttctttccatggcctttatttctcctcttccagtgggagttttgcaggctcttctctgtggaaacttcacgagcgttggctgggcctcggcttcgctggagtgtactccagggtgaaggcagagtgggatttgagacccaggttaggcacgacccaggctgagaagggacgtttccatcattcacagtgccctccccacagcactacctcaccccgacccccaccctcactcmtaccccaccccgcgatcgtcaggggtgccacggtgggccggagggtgccggctctggctgtccctgtgccggtccctcacaaacctctccccctttgaaactcaagcacagctgcgaggagggcagcgaggagggacccctctctcatggttgtctctttcccccgctatgtcataggtagtggaggaagcgaaggaagtgaacgctraatgtgacgcatttctgaagagctcagctgtcaccgggcatagcctggaagccccaagtctgttctgactttgcctggctgtctccttgacccgcctcctagatcattgtccttgatgtccaggctgggtcatttaaaatagagatgcaatcaggaaggttgggggacttgggactgtggctgaattgagaccttgctgatgtattcatgtcagcacctgagtcacagcccaggtgcccggaagcagcctcttcgcataggcagtgatttgcgattactttaaagctcacctttttkcttcccctctctgttcgctgctgtcagcataatgattgtgttccttycctatgggatccatctgttttgtaaacaataaagcgtctgagggagtgt

SEQ ID NO: 4043 - DNA, 5338 bp, Homo sapiens
gctgcggcccggcccggcgggtaggtttaacttgccaacatgtaagtcatgctatcagcgtgaatcatgtaaagagagcaatagctgagaatctgtggtcagtttgctcagaatgtttaraagaaagaagattctatgatgggcagctagtacttacttctgatatttggttgtgcctcaagtgtggcttccagggatgtggtaaaaactcagaaagccaacattcattgaagcactttaagagttccagaacagagccccattgkattataattaatctgagcacatggattatatggtgttatgaatgygatgaaaaattatcaacgcattgtaataagaaggttttggctcagatagttgattttctccagaaacatgcttctaaaacacaaacaagtgcattttctagaatcatgaaactttgtgaagaaaaatgtgaaacagatgaaatacagaagggaggaaaatgcagaaatttatctgtaagaggaattacaaatttaggaaatacttgcttttttaatgcagtcatgcagaacttggcrcagacttatactcttactgatctgatgaatgagatcaaagaaagtagtacaaaactcaagatttttccttcctcagactctcagctgggcacctcgatttaaagatttccagcaacaggacagtcaggagcttcttcattatcttctggatgcagtgaggacagaagaaacaaagatctccacggtgaaagatccattcattgatatttcacttcctataatagaagaaagggtttcaaaacctttactttggggaagaatgaataaatatagaagtttacgggagacagatcatgatcgatacagtggcaatgttactatagaaaatattcatcaacctagagctgccaagaagcattcttcatctaaagataagagtcaactaattcatgaccgaaaatgtattagaaaattgtcatctggagaaactgtcacataccagaaaaatgaaaaccttgaaatgaatggggattctttaatgtttgccagcctcatgaattctgagtcacgtctgaatgaaagccctactgatgacagtgaaaaagaagccagccattctgaaagcaatgttgatgctgacagtgagccttcagaatctgaaagtgcttcaaagcagactgggctgttcasatccagtagtggatccggtgtgcagccagatggacccctttaccctctgtcagcaggtaaactgctgtacaccaaggagactgacagtggtgataaggaaatggcagaagctatttctgaacttcgtttgagcagcactgtaactggrgatcaagattttgacagagaaaatcagccactaaatatttcaaataatttatgttttttrgaggggaagcatttgaggtcttatagtccccaaaatgcttttcagacyctttctcagagctatataactacttctaaagaatgttcaattcagtcctgtctctaccagtttacatctatggaattactaatggggaataataagcttctatgtgagaattgtactaaaaacaaacagaagtaccaagaagaaaccagttttgcagaaaagaaagtagaaggagtttatactaatgccaggaagcaattgctcatttctgctgttccagctgtcctaattctccacctgaaaagatttcatcaggctggcttgagtcttcgtaaagtaaacagacatgtagattttccacttatgctcgatttagcaccattctgctctgctacttgtaagaatgcaagtgtgggagataaagttctctacggtctctatggcatagtggaacatagtggctcgatgagagaaggccactacactgcttatgtgaaagtgagaacaccctccaggaaattatcggaacataacactaaaaagaaaaatgtgcctggtttgaaagcggctgatagtgaatcagcaggccagtgggtccatgttagtgacacttacttacaggtggttccagaatcaagagcacttagtgcacaagcctaccttcttttctatgaaagagtattataactattaatggtaatgattatttaggtcatttgtttttgaatgccacagtgataactataatatataatgtgcctttstagtcttccctcttctgtaggaatagcatgttcctcaaatggtcctgaactttttcaccattttggtgaacccttttaaagtaaatttactcaatgctttaaaattcatagtcttaaaataaatgtgaattttgtttccaggtatttattctggggtacaaaaacttcccagaatttacagtaggaaaggaaacccctttatgatgtggcttattattacaagcattcagaaatgatgctggctaagtcaaatcattccttgagacagtgattcctaaatgtaatgccaccttcctgaactctcacatattctatatcatggttattttaaaaaatatatttttagccttttgtaaccttagtcttgttttgagcaaycatattccatgttttatgtgcttttatatttttataataaatattaaagtaaaactattaaaaattgtttatccacgtaccacttaacttaaaatcatctcagggccatctagtggtatatatgtgtactaccatttaggaaactgctataacacataatttcatgaagtaacacctaatacggtgtagttccctggtcatattttatacaattcaaccatataaaagggtgtcactgtaatttcagtagtgtgggtttacaaataatctgctggttagcttattaccttgaggttttgaaaaactagaattatattgaggcatttcataaacatatctcttgcaccctcttcatggtggagttaaggataacttgcaggtggttggccaaggcccaatatagatgattataacatttagaattggcaattagaagttgataatccatataggaccataggatagctttgaaatataaattaccaaattatatttgtaaatgatagagaattatattcttaacagaaaaatatatackttttctacttcttgtaaatactaaacacagttttgrggttttgaaatcactttgtcttcagcaagcatcattaataagttcaggtgaatttagcttttaatggggcattaagctggcatttttkattttctttttaaataatagcaaaaatatcatttttcccctctagaatacaaattattgagctgtcaaaacttggcatgaagaatatactattacttaggcttaaatatcaaaagataatggctacttcagtgtcatattgttgaaatagaaacaaaactgcatggttcaagcatcctaatcattagtgccaatgaatgatagtgcaggcaagtgccaggtaaatgcctagtcccacttcattctcctcctgggaagaaaggataagaatagtggctgcagataaggtatggaaatatttaatcaagactgtcttaaacacataagcatatataatgttatcaaggttaccagtgctgccttttgatatatggatgaacataactgtaattaaagacggtaatagtatacaaaatgcagagcttaaaaatgtcattgcataaattctatttttaagatgttgaaatgttagtagtgtttttcttgatttttaacagtgaaataatcaagaaatatatctttaagttaatctgcaaagtcaggctgtgttctgtaaaaggtatttcacagcattttctgtttaactgtaatctgttatcatggagatctcagtaccagagcagtgaattttttgaaaaatattgactgtctttattcaagtcagccatcttggtaagagcagttttcatccccccactgcccaaatgtaaatatagatcacctaatttttcttacagaaagatactgttaagaggcatgcacttttcatcggatggtcacttgtttcttgtttcaaagacaaatatttggatagatacccatacttgctatgagtcagtcacagtgctgacactattttaacatcatttaaaatggaaagatctacatagatttttgacattattccagaagtaacatgcaagtaagatatttttattgtcattttcttcatgttaaaggagctacttatgaaacctatttttttatggcctagagtttatgagtgctttttccttgtcttctgaaaatggaataaattggatttttgatacttaagaatttcctaaagatagcttttgtaacagagaaagcatgttaaattacacatgggtctaccttaaaatttttgttattatttccaaagcacatttgcagggatagtaaatgtatatagtagcaagtctactataataacagtagtttctggatcacctcaggaaacagtataaataaataataatgtttacttatcatcaacataactaccatagtgtttgaatgaattaaagtttcattagctttatttagaaactggtttaccccagcttcccgtttttttccaaatataaaatgataaaatattgattatgtgccaatattgtcatttaatgttcttaaaacttgtgaagrccacctttttaggtagctgagaagagtgatagttggtatcaatttgttagccaggcatggtggctcatgctgttgggaggctgagtggggaagatgcttgagcccaggaggtcaaggtgcagtgaaccatgatcacaccactgcattcctgcagagtgacggagtgagaccctgtctcaaaaataaataaaaagaagacagttggtatcaattcaaagaatagttgwtgcctgttctcttattttaaatgtaccaacagagctattttactgtatttaatagttcttagcttccatgtgtgatgattttaatcagtgattttatgcaatagctgaagaaaattttctgaagattaagctgtgaaatgtatcaaccctcatctaatttttgtagtacaaaatgacatcctgattccttttaaaaattcacgtttgtaatttatttttctgcatgtattgatcaaataagcctaaaccaaatatgtgcaataaaaytgagcctttagatagtatctagtgcattgttaaaaaagattatttctagatatttatgatgtttttgtttacgtagaaatcatgaattcaaatctgtttaaaagatgaccatattttcaattttgagtaatacatattattcctactgttttttttcttttgccatgtttctagaaaacagctgtgtaacttaytgagcgttattttggtgttactgtataaaacatgcataataaatattcttatttatctcatgt

SEQ ID NO: 4044 - DNA, 3616 bp, Homo sapiens
tgattctcctgcctcagcctccagagtagctgggattacaggcgcacgtcaccacacctggctaatttttgtatttttagtagagacggggtttctccatgttggtcaggctggtctcgaactcctgacctcgtgatccgcccgcctcggcctcccaaagtgctgggattacaggcgtgagccaccgtgcccggccgggaggtcactttaaggagggctgtccaactgcaaggagccgcaagcaggaagtgaaaccacagcacttcaaaaaaagagggagactgggacaagcgtatctaagaggctgaacatgaatccacagatcagaaatccgatggagcggatgtatcgagacacattctacgacaactttgaaaacgaacccatcctctatggtcggagctacacttggctgtgctatgaagtgaaaataaagaggggccgctcaaatctcctttgggacacaggggtctttcgaggcccggtactacccaaacgtcagtcgaatcacaggcaggaggtggatcctgagacccattgtcatgcagaaaggtgcttcctctcttggttctgtgacgacatactgtctcctaacacaaactacgaggtcacctggtacacatcttggagcccttgcccagagtgtgcaggggaggtggccgagttcctggccaggcacagcaacgtgaatctcaccatcttcaccgcccgcctctactacttctgggatacagattaccaggaggggctccgcagcctgagtcaggaaggggcctcygtggagatcatgggctacaaagattttaaatattgttgggaaaactttgtgtacartgatgatgagccattcaagccttggaaaggactaaaatacaactttctattcctggacagcaagctgcaggagattctcgagtgaggggtctcccmgggcctcatggtctgtctcctctagcctcctgctcatgytgtgcaggcctcccctccatcctggaccagctgtgcttttgcctggtcatcctgagcccctcctggcctcagggccattccatagtgctcccctgcctcaccacctcctctccgctctcccaggctcttcctgcagaggcctctttctgcctccatggctatccatccacccaccaagaccctgttccctgagcctgcatgcccctaacctgccttttcccatctccccagcataacctaattttttttttttttttttgagacggaatttcgctctgtcacccagactggagtgcaatggcttgatcttggctcactgcaaactctgcctaccaggttcaagcgattctcctgcctccgcctcccgagtagctggaattacagacgcctgccaccacgcacagctaactttttttttttttgtatttttagtagtgactgggtttcaccatgttggccaggctggtcttgaactcctgacctcaggtgatccgcctatctcagcctcccaaagtgctgggattacaggcgtgagccactggcccggcggcacaaccaaatcttattaaactcaccctaggctggccgcggtgactcatgcctataatcccccagcaatttgggaggcagaggtgagagaatcgcttgagcccaggaattcgagaccagcctgggccacatgacaaagccccatctctacaaaaaaattacaaaaaaaaaaaaaacaggtgtggtggcatgcacctgtagttkaagctacttggaaggatgaagtgggaggattgcttgagccggggaggtggaggctgcagtgaactgagatcacgtcactgaactccagtctgagcaacagatcgagaccctgcctgaaaataaatcaataaataaactcaaccgaaatgggyatgaaagttgaaatgggtatgtaagttgaaaaccagaagttttgagaaacatcctttgttaactttcatcctacaaattgggtcattcatgtcctacgcagctaaaacagagcccaggagccagggaggaaaagcagtcaggccacacaccattgctcccaaaatggacttctctgcaagcctgactcctgaaactgtgcattgtaccctgaaaccagctttatccatagcttctgcaataaatggctgtaagtcttggactccttgctataatcgcagctattcagcaatggaacctcccagttcccaacccttcctagtgcccatgggctttcccataggacaagagaacatttctccttttctttttttttttctttgaaatggagtctcgccctgtcacccaggctggagtgcaatggtgcggtctcggctcactgcaacctctgcctcccttgttcaagtgattctcctgtctcagcctcccgagtagctgggattacaggcgtccaccaccaaaccaggctaatttttgtatttttcataaaaacgggtttcatcatgtttcccaggctggtcttatttttattttattttttgagatggagtcttgctctgttgcccaggctggggtgcagtggtgcaatctgggttcactgcagcctctgccgcctgagttcaagctattttcctacctaagcctcccaagtagctgggattacatgcgcgtgccaccacgcctagctaatttttgtgtttttagtagagacggggtttcaacatcttgaccaggctggtcttgaactcctgacctcgtgatccacccgtctcggcctcccaaagtgctgggattacaggcgtgagccacctggscaggcttaggctggtcttaaactcctgacctcaagtgatccaacctccttggcctcccaaattgctgggattgctggtgtgagccacagcgcctagcccatttctccttttaataggacctgttgctgtctctgttctcccaacatggtraacaccacccggactgcgtgtatgtcccaaattacaattctttctttgcaaatgaaatgtgaaatttagaggcccttctccacactttaaatttgacttgacattttctaggcagatataagttattagagaatgagattctctataaaaatgatcccttcatgctgtggcctccacagaagatgccctgggccaggtgcccacatgaataatgcgggccacaggcaggcatttattttctcacagatatggaggctacaagtccaaggtggaggggtcggcggggttgtttgctctgaggccgctcctcctggatggcagggatcccttctggctgtgtcctctgtggcctttcctctatgaacctgtactgtacctctggggtctctctgcttccaaatatcttttttttttttttcagacagttttgctcttgttttctaggctggagtgcaatggcacaatctcagctcactgcaacctctgccttccgagttcaagcgattctcgtgcctcagcctcctgagtagctgggactacaggcgtgtgccaccacgcctggctaattttgtagttttagtagagacggggtttctccatgttgctcaggctggtcttgaactcatgagctcaggcgatccactctcctcagcctcccaaagtgctgggattacagatataagccaccatacacaacttttttttttttttgagatgga

SEQ ID NO: 4045 - DNA, 1310 bp, Homo sapiens
gactcgctggggcgcggagccgagccctccccttccttaggaagctttcgtcccctccgaaggttggaacgctcatcccgagccagaccgacaaggcgtacagtctgcaggcctaccatcagcatawccgctacaacccgctgcaggatgagtgggtgctgdtgtyagctcaccgcatgaagckgcccwggyagkgtcaagtggagccccagcttmtgaagacagtgcycyrccmtgaccctctcaaccctctgtgtcctggggccatcygarccaacggagaggtgratccccagtacgatagcaccttcctgtttgacaacgacttcccagctctgcagcctgatgcccccagtccaggacccagtratcatccccttttccaagcaaagtctgctcgaggagyctgtraggtcaygtrcttcyacccctggtcggatgtaacgctgccactcrwgtyggtccctgagatcbrggctsttgytgatgcakgrgcctcagtcacagaggagctgggtgccyagtaccctygggtgmagatmtytgaaaacaaaggtgccatgatgggctgttctaaccccsamcccyactgccrggtatgggccarcagtytccygccagatattgcccagcrtgagragysatctcagyaggcctvtaagastyagcatggagagcccctgytaatggagtacagccgccaggagcyactcaggaaggaayrtctggtcctaaccagtgagcactggttagtactgktccccttctgggcaacaygrccctvccagacactgctgctgcccygtyggcatgtgcggcggctacctgagctgacccctgctgagsgtgatgatstagcctccatcatgaagaagctcttgaccaagtatgacaacctctttgagacrtcctttccctactccatgggctgkcatggggctcccacaggawcaraggctggggccaactggraccaytrgcrkctgcasvctyattacbacyctcygytcctgcrctytgycactgtcbrgarattcwtggttggctacdaaatgcttgctcaggctcagagggacctcrcccctgagyaggctgcagagagactaagggcacttcctgaggttcattaccacctggggyagaaggacagggagacagcaaccatcgccygaccacgccgaccacagggccttgaatccttttttgttttcaacagtcttgctgaattaagcagaaagggccttgaatcctggcctggaatttgggcagatatagcattaataaaactgtgcatctcaaacttttatcas

SEQ ID NO: 4046 - DNA, 1372 bp, Homo sapiens
atcgggggcggcgcggggaggggtggtgtggacggagaaagtgaaaggtgaggcacggccctgcagattttccagcggatcccccggtggcctcatgtcgcgcagtggaaccgatcctcascaacgccagcaggcgtcagaggcggacgccgcagcagcarccttccgggcaaacdaccatcagcatawccgctacaacccgctgcaggatgagtgggtgctgdtgtyagctcaccgcatgaagckgcccwggyagkgtcaagtggagccccagcttmtgaagacagtgcycyrccmtgaccctctcaaccctctgtgtcctggggccatcygarccaacggagaggtgratccccagtacgatagcaccttcctgtttgacaacgacttcccagctctgcagcctgatgcccccagtccaggacccagtratcatccccttttccaagcaaagtctgctcgaggagyctgtraggtcaygtrcttcyacccctggtcggatgtaacgctgccactcrwgtyggtccctgagatcbrggctsttgytgatgcakgrgcctcagtcacagaggagctgggtgccyagtaccctygggtgmagatmtytgaaaacaaaggtgccatgatgggctgttctaaccccsamcccyactgccrggtatgggccarcagtytccygccagatattgcccagcrtgagragysatctcagyaggcctvtaagastyagcatggagagcccctgytaatggagtacagccgccaggagcyactcaggaaggaayrtctggtcctaaccagtgagcactggttagtactgktccccttctgggcaacaygrccctvccagacactgctgctgcccygtyggcatgtgcggcggctacctgagctgacccctgctgagsgtgatgatstagcctccatcatgaagaagctcttgaccaagtatgacaacctctttgagacrtcctttccctactccatgggctgkcatggggctcccacaggawcaraggctggggccaactggraccaytrgcrkctgcasvctyattacbacyctcygytcctgcrctytgycactgtcbrgarattcwtggttggctacdaaatgcttgctcaggctcagagggacctcrcccctgagyaggctgcagagagactaagggcacttcctgaggttcattaccacctggggyagaaggacagggagacagcaaccatcgccygaccacgccgaccacagggccttgaatccttttttgttttcaacagtcttgctgaattaagcagaaagggccttgaatcctggcctggaatttgggcagatatagcattaataaaactgtgcatctcaaacttttatcac

SEQ ID NO: 4047 - DNA, 1514 bp, Homo sapiens
caggactgaagcggagaggaggcagttcaagctgggagccccagggtgggcattccagaggcggtgacacctgagcagtgtctttaagagctcgcagaaggggcatgccagcccacagggaccagcccctagagcaaaggcctccgaggagagacagcttggggtcttcaggggcctacaattccttctctgttctgcggcacaaaatattttccagcggatcccccggtggcctcatgtcgcgcagtggaaccgatcctcascaacgccagcaggcgtcagaggcggacgccgcagcagcarccttccgggcaaacdaccatcagcatawccgctacaacccgctgcaggatgagtgggtgctgdtgtyagctcaccgcatgaagckgcccwggyagkgtcaagtggagccccagcttmtgaagacagtgcycyrccmtgaccctctcaaccctctgtgtcctggggccatcygarccaacggagaggtgratccccagtacgatagcaccttcctgtttgacaacgacttcccagctctgcagcctgatgcccccagtccaggacccagtratcatccccttttccaagcaaagtctgctcgaggagyctgtraggtcaygtrcttcyacccctggtcggatgtaacgctgccactcrwgtyggtccctgagatcbrggctsttgytgatgcakgrgcctcagtcacagaggagctgggtgccyagtaccctygggtgmagatmtytgaaaacaaaggtgccatgatgggctgttctaaccccsamcccyactgccrggtatgggccarcagtytccygccagatattgcccagcrtgagragysatctcagyaggcctvtaagastyagcatggagagcccctgytaatggagtacagccgccaggagcyactcaggaaggaayrtctggtcctaaccagtgagcactggttagtactgktccccttctgggcaacaygrccctvccagacactgctgctgcccygtyggcatgtgcggcggctacctgagctgacccctgctgagsgtgatgatstagcctccatcatgaagaagctcttgaccaagtatgacaacctctttgagacrtcctttccctactccatgggctgkcatggggctcccacaggawcaraggctggggccaactggraccaytrgcrkctgcasvctyattacbacyctcygytcctgcrctytgycactgtcbrgarattcwtggttggctacdaaatgcttgctcaggctcagagggacctcrcccctgagyaggctgcagagagactaagggcacttcctgaggttcattaccacctggggyagaaggacagggagacagcaaccatcgccygaccacgccgaccacagggccttgaatccttttttgttttcaacagtcttgctgaattaagcagaaagggccttgaatcctggcctggaatttgggcagatatagcattaataaaactgtgcatctcaaacttttatcac

SEQ ID NO: 4048 - DNA, 1282 bp, Homo sapiens
aaacdgtaactgcaccgcggcagggactcgctggggcgcggagccgagccctccccttccttaggaagctttcgtcccctccgaagaccatcagcatawccgctacaacccgctgcaggatgagtgggtgctgdtgtyagctcaccgcatgaagckgcccwggyagkgtcaagtggagccccagcttmtgaagacagtgcycyrccmtgaccctctcaaccctctgtgtcctggggccatcygarccaacggagaggtgratccccagtacgatagcaccttcctgtttgacaacgacttcccagctctgcagcctgatgcccccagtccaggacccagtratcatccccttttccaagcaaagtctgctcgaggagyctgtraggtcaygtrcttcyacccctggtcggatgtaacgctgccactcrwgtyggtccctgagatcbrggctsttgytgatgcakgrgcctcagtcacagaggagctgggtgccyagtaccctygggtgmagatmtytgaaaacaaaggtgccatgatgggctgttctaaccccsamcccyactgccrggtatgggccarcagtytccygccagatattgcccagcrtgagragysatctcagyaggcctvtaagastyagcatggagagcccctgytaatggagtacagccgccaggagcyactcaggaaggaayrtctggtcctaaccagtgagcactggttagtactgktccccttctgggcaacaygrccctvccagacactgctgctgcccygtyggcatgtgcggcggctacctgagctgacccctgctgagsgtgatgatstagcctccatcatgaagaagctcttgaccaagtatgacaacctctttgagacrtcctttccctactccatgggctgkcatggggctcccacaggawcaraggctggggccaactggraccaytrgcrkctgcasvctyattacbacyctcygytcctgcrctytgycactgtcbrgarattcwtggttggctacdaaatgcttgctcaggctcagagggacctcrcccctgagyaggctgcagagagactaagggcacttcctgaggttcattaccacctggggyagaaggacagggagacagcaaccatcgccygaccacgccgaccacagggccttgaatccttttttgttttcaacagtcttgctgaattaagcagaaagggccttgaatcctggcctggaatttgggcagatatagcattaataaaactgtgcatctcaaacttttatcac

SEQ ID NO: 4049 - DNA, 2823 bp, Homo sapiens
atcgggggcggcgcggggaggggtggtgtggacggagaaagtgaaaggtgaggcacggccctgcagattttccagcggatcccccggtggcctcatgtcgcgcagtggaaccgatcctcascaacgccagcaggcgtcagaggcggacgccgcagcagcarccttccgggcaaacdaccatcagcatawccgctacaacccgctgcaggatgagtgggtgctgdtgtyagctcaccgcatgaagckgcccwggyagkgtcaagtggagccccagcttmtgaagacagtgcycyrccmtgaccctctcaaccctctgtgtcctggggccatcygarccaacggagaggtgratccccagtacgatagcaccttcctgtttgacaacgacttcccagctctgcagcctgatgcccccagtccaggacccagtratcatccccttttccaagcaaagtctgctcgaggagyctgtraggtcaygtrcttcyacccctggtcggatgtaacgctgccactcrwgtyggtccctgagatcbrggctsttgytgatgcakgrgcctcagtcacagaggagctgggtgccyagtaccctygggtgmagatmtytgaaaacaaaggtgccatgatgggctgttctaaccccsamcccyactgccrggtatgggccarcagtytccygccagatattgcccagcrtgagragysatctcagyaggcctvtaagastyagcatggagagcccctgytaatggagtacagccgccaggagcyactcaggaaggaayrtctggtcctaaccagtgagcactggttagtactgktccccttctgggcaacaygrccctvccagacactgctgctgcccygtyggcatgtgcggcggctacctgagctgacccctgctgagsgtgatgatstagcctccatcatgaagaagctcttgaccaagtatgacaacctctttgagacrtcctttccctactccatgggctgkcatggggctcccacaggawcaraggctggggccaactggraccaytrgcrkctgcasvctyattacbacyctcygytcctgcrctytgycactgtcbrgarattcwtggttggctacdaaatgcttgctcaggctcagagggacctcrcccctgagyagatgagcagcagctgctcagggctgagcagggtcctggtggccgtggctacagccctggtgtctgcctcctcyccctgcccccaggcctggggccccccaggggtccagtatgggcagccaggsaggtccgtgaagctgtgttgtcctggagtgactgccggggacccagtgtcctggtttcgggatggggagmcaaagctgctccagggacctgactctgggctagggcatgaactggtcctggcccaggcagacagcactgatgagggcacctacatctgccagaccctggatggtgcacttgggggcacagtgaccctgcagctgggctaccctccagcccgccctgttgtctcctgccaagcagccgactatgagaacttctcttgcacttggagtcccagccagatcagcggtttacccacccgctacctcacctcctacaggaagaagacagtcctaggagctgatagccagaggaggagtccatccacagggccctggccatgcccacaggatcccctaggggctgcccgctgtgttgtccacggggctgagttctggagccagtaccggattaatgtgactgaggtgaacccactgggtgccagcacacgcctgctggatgtgagcttgcagagcatcttgcgccctgacccaccccagggcctgcgggtagagtcagtaccaggttacccccgacgcctgcgagccagctggacataccctgcctcctggccgtgccagccccacttcctgctcaagttccgtttgcagtaccgtccggcgcagcatccagcctggtccacggtggagccagctggactggaggaggtgatcacagatgctgtggctgggctgccccatgctgtacgagtcagtgcccgggactttctagatgctggcacctggagcacctggagcccggaggcctggggaactccgagcactgggaccataccaaaggagataccagcatggggccagctacacacgcagccagaggtggagcctcaggtggacagccctgctcctccaaggccctccctccaaccacaccctcggctacttgatcacagggactctgtggagcaggtagctgtgctggygtctttgggaatcctttctttcctgggactggtggctggggccctggcactggggctctggctgaggctgagayggggtgggaaggatggatccccaaagcctgggttcttggcctcagtgattccagtggacaggcgtccaggagctccaaacctgtagaggacccaggagggcttcggcagattccacctataattctgtcttgctggtgtggatagaaaccaggcaggacagtagatccctatggttggatctcagctggaagttctgtttggagcccatttctgtgagaccctgtatttcaaatttgcagctgaaaggtgcttgtacctctgatttcaycccagagttggagttctgctcaaggaacgtgtgtaatgtgtacatctgtgtccatgtgtgaccatgtgtctgtgaggcagggaacatgtattctctgcatgcatgtatgtaggtgcctggggagtgtgtgtgggtccttggctcttggcctttccccttgcaggggttgtgcaggtgtgaataaagagaataaggaagttcttggagattatactcag

SEQ ID NO: 4050 - DNA, 3770 bp, Homo sapiens
aacagggccaggaggtgtgggagcgggagacactagagtaacctatgtgcacagcctctccatataccatgtgctgttgcgcctgctagtaatcgacgacattaggcaagagaaacagcggctcctcaagtcctgcccaaagacmgtccagaaaccccagcctcccgtcgccttctcgccgcctccgctgggagccgcagatcagtccaagttgacgkacaggaggcgaaatgtgcaaatgtttatgggttgacatgatgaaagaagcattagaaaaacttcagctcaatatagtagagatgaaagatgaaaatgcaactttagatggcggagatgttttattcacaggcagagaattttttgtgggcctttccaaaaggacaaatcaacgaggtgctgaaatcttggctgatacttttaaggaytatgcagtctccacagtgccagtggcagatgggttgcatttgaagagtttctgcagcatggctgggcctaacctgatcgcrattgggtctagtgaatctgcacagaaggcccttaagatcatgcaacagatgagtgaccaccgctacgacaaactcactgtgcctgatgacatagcagcaaactgtatatatctaaatatccccaacaaagggcacgtcttgctgcaccgaaccccggaagagtatccagaaagtgcaaaggtttatgagaaactgaaggaccatatgctgatccccgtgagcatgtctgaactggaaaaggtggatgggctgctcacctgctgctcagttttaattaacaagaaagtagactcctgagctgcagagtccccccsggtwgccggcaagaccgcacaggcaaggccgatgactctgtgcccactcctgttgttttccttgacaatctactgtgccactgtgctactaactcttgtttacaaaatttgattctaagttgaattgcttcattcaacacycccaccctccctcccctcgmggtggtacctaagctgtggatttgctaaatgaattaagcaacctagaagatacagagctaatgaattatcaaaatgtgattaatcccagtaaggaaacactcatttagtgtctgtatttttggtgtgaaaattatttagttgccagtatattctgaagaatgtcttcttgatcagtcagataarcttgctttttttttttttttttttcatgaatcatgtttggttcctgtgaaagtccctggtccagggatcctcctcctttctcttttacttctgaattctgaaattcagttagttacttttgcctttcgctcttctatcacagccaccttgaccttgggtaaaacccaaggtctttccttctggctaccttcctgcaggtccaccctgtctgccattggtctcctctgcctctgactacatctgccaccaacaaccctcccctcacccctgccaggggcagacaggcttctcagcagaactgtgactgaaatcagagctgctgtctggggcagtgttaactacacagaggcacatcctgacagggtttgccccagagatctaaattccagaaggagggcaccacacctaggaaggtaaatccagtatcagaaggttgctaaaagattaaagatcaagaagcttggaaacatcccwtgggtacaatgtcttagaaagtctttaagtcacataccatgaatttttgcttcattactgaccatatatgaccttggaggaactcttttttttttttccttctactcatttctgtttccacctaccctgactcaccgtatttccagtcttctacccctgcagttatcctagtccagcaaagtcatttctttcaaaagagacatcatgtctgaaaataattactggtagtctaatatgagccagagtaaacagctcctcatggtcaatgaacatgttcaggaagcgatcaccttgatgcttgaacccaaccccagacagtggacaattctactttgaaatatccgtgaatatttactgtgggatccaatttaaacttctttcttctctagcctttaaattacacaactttgaactgacacggatctcttacaaagaacaatgcggcactgaaggaagagatgattcctttactcaaacctgcaggaatcagcctattaacaggcaggggaaacggtactttccaatgaatggtaactgatccaggcacrttatcacacttcctagtcatctccacctttcctgtattgcctgtggcttgttgtttaagattaagaatcaaagagattaagaagtatcacttcaartcttgctctgctcacttctatgtttgcagtcaaattattccttatgttggtgacctaaagagaattactttcattcatttcatttcccccgtagcagatggaagtgagaaacctctgagaaaatgaaaacatccttaaccactatctttcccttttatttgattattttatgtcagaaatttgcaaaagtttttttctcctccttctcttccttgttgcttaactttttaattcatgccatatgcagatatccaattatgtgcatcctgtgaataaaccacgtcttggtcactgtcatattttgaaccatctcatcagagatgaataatatctttttaccagagagagaacgaatgttagccacatgcccaagttaacaaagaaaaaatgttctcaaggttgtccttttgggttaaatctggcccttccttggcaaaagcaaaaattctccctgtgagagctcaacatctcaaatacaaccacaggaaaaatggcccaatctgccagtttaggcttaccagcatataatttttaatatctttacttctrtcatcccaaatcaaagaactcttctctattatgtttaatcaattgcaagcaaatagatttttctttgtaacaatttgttctgcagaaggctgtttttcacttttcctttcttttgcttctttctgtctttccttctcttttgtctggagaaatcacttagactctgtgtgcctcttctacattgcattctgctctgctatgttacctgctaggctggcttctttggactccctatatgattgatgatgtgaaaacctaaattacttgcagcatagtattacttctttgatgttctcattagcataatgttatttttgaaaaggaaagatactatcacataagttttcctcatctgttgtgatatacaccaatggataaactaacggaaactgctttttgacattaaaagacaggagaaattatatttaactaagtaaaagttaagtcagaattacttgggtgatgtgattcaatttagttaaaggatgatatagagaaaatacattatttagcattatttcttcagctataatgaattgctatagaaatcaggcagatctttctaatgtgtattgattggtcttttcagctactctgaacagattactaaggccatctcctcatctctaagggagaaaaatagtctgtagatgaataatgtaaggtaaagagttgcatgtcagtctttgtaattatttacactttaactttctccagaactcagacatgatttcaacatggtgttagatttgtgcattttattttcctgaccacctcattccagccaatgtwtggttatccactctgtgtgccaaaaccaatcatgcctttcacggccmtttagttcagagaagttctgcactgatttttagtctcttgatgtctcaatcttacatgtataccaatcacaatggaataaagtgttgagttgtactgtg

SEQ ID NO: 4051 - DNA, 3839 bp, Homo sapiens
aagacaattcttaaatggaagtctatacaaagcacagcaagcctgtaggagaaggacgtgagccggatggggtaggagtgggcactgmggattatggattcacagagagagcatctgagccgagacctgckggaggagaaggaatttgccaggcagcacagctggtgactcagcgacgggggaaggcatctagatacaggatttcatctgtatggaaaaggagctctggtaactttggccaagacttttcagtaggaaatgcttcaaaatacaaagcaagagctattttcaagaaagaccttctaaatttatattaggttgacatgatgaaagaagcattagaaaaacttcagctcaatatagtagagatgaaagatgaaaatgcaactttagatggcggagatgttttattcacaggcagagaattttttgtgggcctttccaaaaggacaaatcaacgaggtgctgaaatcttggctgatacttttaaggaytatgcagtctccacagtgccagtggcagatgggttgcatttgaagagtttctgcagcatggctgggcctaacctgatcgcrattgggtctagtgaatctgcacagaaggcccttaagatcatgcaacagatgagtgaccaccgctacgacaaactcactgtgcctgatgacatagcagcaaactgtatatatctaaatatccccaacaaagggcacgtcttgctgcaccgaaccccggaagagtatccagaaagtgcaaaggtttatgagaaactgaaggaccatatgctgatccccgtgagcatgtctgaactggaaaaggtggatgggctgctcacctgctgctcagttttaattaacaagaaagtagactcctgagctgcagagtccccccsggtwgccggcaagaccgcacaggcaaggccgatgactctgtgcccactcctgttgttttccttgacaatctactgtgccactgtgctactaactcttgtttacaaaatttgattctaagttgaattgcttcattcaacacycccaccctccctcccctcgmggtggtacctaagctgtggatttgctaaatgaattaagcaacctagaagatacagagctaatgaattatcaaaatgtgattaatcccagtaaggaaacactcatttagtgtctgtatttttggtgtgaaaattatttagttgccagtatattctgaagaatgtcttcttgatcagtcagataarcttgctttttttttttttttttttcatgaatcatgtttggttcctgtgaaagtccctggtccagggatcctcctcctttctcttttacttctgaattctgaaattcagttagttacttttgcctttcgctcttctatcacagccaccttgaccttgggtaaaacccaaggtctttccttctggctaccttcctgcaggtccaccctgtctgccattggtctcctctgcctctgactacatctgccaccaacaaccctcccctcacccctgccaggggcagacaggcttctcagcagaactgtgactgaaatcagagctgctgtctggggcagtgttaactacacagaggcacatcctgacagggtttgccccagagatctaaattccagaaggagggcaccacacctaggaaggtaaatccagtatcagaaggttgctaaaagattaaagatcaagaagcttggaaacatcccwtgggtacaatgtcttagaaagtctttaagtcacataccatgaatttttgcttcattactgaccatatatgaccttggaggaactcttttttttttttccttctactcatttctgtttccacctaccctgactcaccgtatttccagtcttctacccctgcagttatcctagtccagcaaagtcatttctttcaaaagagacatcatgtctgaaaataattactggtagtctaatatgagccagagtaaacagctcctcatggtcaatgaacatgttcaggaagcgatcaccttgatgcttgaacccaaccccagacagtggacaattctactttgaaatatccgtgaatatttactgtgggatccaatttaaacttctttcttctctagcctttaaattacacaactttgaactgacacggatctcttacaaagaacaatgcggcactgaaggaagagatgattcctttactcaaacctgcaggaatcagcctattaacaggcaggggaaacggtactttccaatgaatggtaactgatccaggcacrttatcacacttcctagtcatctccacctttcctgtattgcctgtggcttgttgtttaagattaagaatcaaagagattaagaagtatcacttcaartcttgctctgctcacttctatgtttgcagtcaaattattccttatgttggtgacctaaagagaattactttcattcatttcatttcccccgtagcagatggaagtgagaaacctctgagaaaatgaaaacatccttaaccactatctttcccttttatttgattattttatgtcagaaatttgcaaaagtttttttctcctccttctcttccttgttgcttaactttttaattcatgccatatgcagatatccaattatgtgcatcctgtgaataaaccacgtcttggtcactgtcatattttgaaccatctcatcagagatgaataatatctttttaccagagagagaacgaatgttagccacatgcccaagttaacaaagaaaaaatgttctcaaggttgtccttttgggttaaatctggcccttccttggcaaaagcaaaaattctccctgtgagagctcaacatctcaaatacaaccacaggaaaaatggcccaatctgccagtttaggcttaccagcatataatttttaatatctttacttctrtcatcccaaatcaaagaactcttctctattatgtttaatcaattgcaagcaaatagatttttctttgtaacaatttgttctgcagaaggctgtttttcacttttcctttcttttgcttctttctgtctttccttctcttttgtctggagaaatcacttagactctgtgtgcctcttctacattgcattctgctctgctatgttacctgctaggctggcttctttggactccctatatgattgatgatgtgaaaacctaaattacttgcagcatagtattacttctttgatgttctcattagcataatgttatttttgaaaaggaaagatactatcacataagttttcctcatctgttgtgatatacaccaatggataaactaacggaaactgctttttgacattaaaagacaggagaaattatatttaactaagtaaaagttaagtcagaattacttgggtgatgtgattcaatttagttaaaggatgatatagagaaaatacattatttagcattatttcttcagctataatgaattgctatagaaatcaggcagatctttctaatgtgtattgattggtcttttcagctactctgaacagattactaaggccatctcctcatctctaagggagaaaaatagtctgtagatgaataatgtaaggtaaagagttgcatgtcagtctttgtaattatttacactttaactttctccagaactcagacatgatttcaacatggtgttagatttgtgcattttattttcctgaccacctcattccagccaatgtwtggttatccactctgtgtgccaaaaccaatcatgcctttcacggccmtttagttcagagaagttctgcactgatttttagtctcttgatgtctcaatcttacatgtataccaatcacaatggaataaagtgttgagttgtactgtg

SEQ ID NO: 4052 - DNA, 3961 bp, Homo sapiens
cgagctgggctccttctgcaccacattcagcggctgccaagaggagccgacgggcgctcgcaggctcagcgcgcgctgcccgcggcaggacccggccgcctccgccgccgccgccgcccctaagcctcccgaagccatggccgggctcggccaccccgccgccttcggccgggccacccacgccgtggtgcgggcgctacccgagtcgctcggccagcacgcgctgagaagcgccaagggcgaggaggtggacgtcgcccgcgcggaacggcagcaccagctctacgtgggcgtgctgggcagcaagctggggctgcaggtggtggagctgccggccgacgagagccttccggactgcgtcttcgtggaggacgtggccgtggtgtgcgaggagacggccctcatcacccgacccggggcgccgagccggaggaaggaggttgacatgatgaaagaagcattagaaaaacttcagctcaatatagtagagatgaaagatgaaaatgcaactttagatggcggagatgttttattcacaggcagagaattttttgtgggcctttccaaaaggacaaatcaacgaggtgctgaaatcttggctgatacttttaaggaytatgcagtctccacagtgccagtggcagatgggttgcatttgaagagtttctgcagcatggctgggcctaacctgatcgcrattgggtctagtgaatctgcacagaaggcccttaagatcatgcaacagatgagtgaccaccgctacgacaaactcactgtgcctgatgacatagcagcaaactgtatatatctaaatatccccaacaaagggcacgtcttgctgcaccgaaccccggaagagtatccagaaagtgcaaaggtttatgagaaactgaaggaccatatgctgatccccgtgagcatgtctgaactggaaaaggtggatgggctgctcacctgctgctcagttttaattaacaagaaagtagactcctgagctgcagagtccccccsggtwgccggcaagaccgcacaggcaaggccgatgactctgtgcccactcctgttgttttccttgacaatctactgtgccactgtgctactaactcttgtttacaaaatttgattctaagttgaattgcttcattcaacacycccaccctccctcccctcgmggtggtacctaagctgtggatttgctaaatgaattaagcaacctagaagatacagagctaatgaattatcaaaatgtgattaatcccagtaaggaaacactcatttagtgtctgtatttttggtgtgaaaattatttagttgccagtatattctgaagaatgtcttcttgatcagtcagataarcttgctttttttttttttttttttcatgaatcatgtttggttcctgtgaaagtccctggtccagggatcctcctcctttctcttttacttctgaattctgaaattcagttagttacttttgcctttcgctcttctatcacagccaccttgaccttgggtaaaacccaaggtctttccttctggctaccttcctgcaggtccaccctgtctgccattggtctcctctgcctctgactacatctgccaccaacaaccctcccctcacccctgccaggggcagacaggcttctcagcagaactgtgactgaaatcagagctgctgtctggggcagtgttaactacacagaggcacatcctgacagggtttgccccagagatctaaattccagaaggagggcaccacacctaggaaggtaaatccagtatcagaaggttgctaaaagattaaagatcaagaagcttggaaacatcccwtgggtacaatgtcttagaaagtctttaagtcacataccatgaatttttgcttcattactgaccatatatgaccttggaggaactcttttttttttttccttctactcatttctgtttccacctaccctgactcaccgtatttccagtcttctacccctgcagttatcctagtccagcaaagtcatttctttcaaaagagacatcatgtctgaaaataattactggtagtctaatatgagccagagtaaacagctcctcatggtcaatgaacatgttcaggaagcgatcaccttgatgcttgaacccaaccccagacagtggacaattctactttgaaatatccgtgaatatttactgtgggatccaatttaaacttctttcttctctagcctttaaattacacaactttgaactgacacggatctcttacaaagaacaatgcggcactgaaggaagagatgattcctttactcaaacctgcaggaatcagcctattaacaggcaggggaaacggtactttccaatgaatggtaactgatccaggcacrttatcacacttcctagtcatctccacctttcctgtattgcctgtggcttgttgtttaagattaagaatcaaagagattaagaagtatcacttcaartcttgctctgctcacttctatgtttgcagtcaaattattccttatgttggtgacctaaagagaattactttcattcatttcatttcccccgtagcagatggaagtgagaaacctctgagaaaatgaaaacatccttaaccactatctttcccttttatttgattattttatgtcagaaatttgcaaaagtttttttctcctccttctcttccttgttgcttaactttttaattcatgccatatgcagatatccaattatgtgcatcctgtgaataaaccacgtcttggtcactgtcatattttgaaccatctcatcagagatgaataatatctttttaccagagagagaacgaatgttagccacatgcccaagttaacaaagaaaaaatgttctcaaggttgtccttttgggttaaatctggcccttccttggcaaaagcaaaaattctccctgtgagagctcaacatctcaaatacaaccacaggaaaaatggcccaatctgccagtttaggcttaccagcatataatttttaatatctttacttctrtcatcccaaatcaaagaactcttctctattatgtttaatcaattgcaagcaaatagatttttctttgtaacaatttgttctgcagaaggctgtttttcacttttcctttcttttgcttctttctgtctttccttctcttttgtctggagaaatcacttagactctgtgtgcctcttctacattgcattctgctctgctatgttacctgctaggctggcttctttggactccctatatgattgatgatgtgaaaacctaaattacttgcagcatagtattacttctttgatgttctcattagcataatgttatttttgaaaaggaaagatactatcacataagttttcctcatctgttgtgatatacaccaatggataaactaacggaaactgctttttgacattaaaagacaggagaaattatatttaactaagtaaaagttaagtcagaattacttgggtgatgtgattcaatttagttaaaggatgatatagagaaaatacattatttagcattatttcttcagctataatgaattgctatagaaatcaggcagatctttctaatgtgtattgattggtcttttcagctactctgaacagattactaaggccatctcctcatctctaagggagaaaaatagtctgtagatgaataatgtaaggtaaagagttgcatgtcagtctttgtaattatttacactttaactttctccagaactcagacatgatttcaacatggtgttagatttgtgcattttattttcctgaccacctcattccagccaatgtwtggttatccactctgtgtgccaaaaccaatcatgcctttcacggccmtttagttcagagaagttctgcactgatttttagtctcttgatgtctcaatcttacatgtataccaatcacaatggaataaagtgttgagttgtactgtg

SEQ ID NO: 4053 - DNA, 1571 bp, Homo sapiens
  misc_feature (1)...(1571): n = A,T,C or G
ctctcggcttaaactcgggatcactaaggtgccgcacttccttctggtatggaaatagggcgggtcaatatcaagaaaggaagagggtgattggttagcggaacgtcttacgtgactgattattggtctacctctggggataaccgtcccagttgccagagaaacartaacgtcattatttaataagtcatcggtgattggtccgcccctgaggttaatcttaaaagcccaggttacccgcrgaaatttatgctgtccgrtyaccgtgacaayrcagctgaggaacccagaactacatctgggctgcgcgcttgcgcttcgcttcctgsccctcgtttcctgggacatccctggggctagagyacyggacartrgattggcaaggacgyytaccrtggrctrgctgyrckkggagmbcttcawgtgcaaccttgactgccaggaaragccagattcctgcatcagtsagaagctcttcatggagrtggcagagctcatggtctsakaaggctrgaaggatgcagrttrkgagkaccbctgcaytnatgrctvttsgatggytcccyaaavagattcagaaggcagacttyaggcagaccctcagcgctttcctcatgggattcgcyagctagctaattatgttcacagcaaagracygaagcyagggatttatgcagatgttrgaaataaaaccyrmscagkcttcyctgggarktttggatactacgacattgatrycyagacctttgctgacyrsgkagtagwtstgctaaaatytgwtggttgttactgtgacagtttggaaaatttggcagatgrttataagcacrtgtccttggccctgaataggactggcagaagcattgtgtactcctgtgagtggcctctttatatgtggccctttcaaaagcccartkatacagaaatcygacagtactgcaatcactggyraaattttrctracattgatgattsctksaaaagtataaagagtawcttgvactggacatcttttaacyaggagagaattgttgatgttgctggaccaggggrttggartgwccsavwtatgttagygattggcaamtttggcctcagctggaatcagcaagtaamtcagayggccctckgdgmtwtcatggctgctycttkattcrtrtytmrkgacctcbvacacatcagccctcaagccaaagctctccttcagkataaggacgwaattgccatcwatcaggaccccttgggcaagmaarsgtaccagcttagacagggagacaactttgaagtgygrraacgacctctctcaggcttagcctrggctgtagctatgataaacyggyagragattggtrgacctcrctcttawaccatcgcagttgcttccctgrrtaaaggagtggmctrtaatcctgcctgcttcatcacayagctcctccctgtgaaaaggaagctagggttctatkaatrgacttcaaggttaagaagtcacataaatvccamaggcactgttttgcttcagctagaaaatacaatgcagatgtcattaaaagacttactttaaaatgtttatt

SEQ ID NO: 4054 - DNA, 1726 bp, Homo sapiens
  misc_feature (1)...(1726): n = A,T,C or G
ctctcggcttaaactcgggatcactaaggtgccgcacttccttctggtatggaaatagggcgggtcaatatcaagaaaggaagagggtgattggttagcggaacgtcttacgtgactgattattggtctacctctggggataaccgtcccagttgccagagaaacartaacgtcattatttaataagtcatcggtgattggtccgcccctgaggttaatcttaaaagcccaggttacccgcrgaaatttatgctgtccgrtyaccgtgacaayrcagctgaggaacccagaactacatctgggctgcgcgcttgcgcttcgcttcctgsccctcgtttcctgggacatccctggggctagagyacyggacartrgattggcaaggacgyytaccrtggrctrgctgyrckkggagmbcttcawgtgcaaccttgactgccaggaaragccagattcctgcatcagtsagaagctcttcatggagrtggcagagctcatggtctsakaaggctrgaaggatgcagrttrkgagkaccbctgcaytnatgrctvttsgatggytcccyaaavagattcagaaggcagacttyaggcagaccctcagcgctttcctcatgggattcgcyagctagctaattatgttcacagcaaagracygaagcyagggatttatgcagatgttrgaaataaaaccyrmscagkcttcyctgggarktttggatactacgacattgatrycyagacctttgctgacyrsgkarttataagcacrtgtccttggccctgaataggactggcagaagcattgtgtactcctgtgagtggcctctttatatgtggccctttcaaaagcccartkatacagaaatcygacagtactgcaatcactggyraaattttrctracattgatgattsctksaaaagtataaagagtawcttgvactggacatcttttaacyaggagagaattgttgatgttgctggaccaggggrttggartgwccsavwtatggtaaaaacttgagccctccttgttcaagaccctgcggtaggcttgtttcctattttgacattcaaggtaaatacaggtaaagttcctgggaggaggctttatgtgagagtacttagagcaggatgctgtggaaagtggtttctccatatgggtcatctaggtaactttaagaatgtttcctcctctcttgtttgaattatttcattctttttctcagttagygattggcaamtttggcctcagctggaatcagcaagtaamtcagayggccctckgdgmtwtcatggctgctycttkattcrtrtytmrkgacctcbvacacatcagccctcaagccaaagctctccttcagkataaggacgwaattgccatcwatcaggaccccttgggcaagmaarsgtaccagcttagacagggagacaactttgaagtgygrraacgacctctctcaggcttagcctrggctgtagctatgataaacyggyagragattggtrgacctcrctcttawaccatcgcagttgcttccctgrrtaaaggagtggmctrtaatcctgcctgcttcatcacayagctcctccctgtgaaaaggaagctagggttctatkaatrgacttcaaggttaagaagtcacataaatvccamaggcactgttttgcttcagctagaaaatacaatgcagatgtcattaaaagacttactttaaaatgtt

SEQ ID NO: 4055 - DNA, 536 bp, Homo sapiens
tttgttgcactcaatgaacaaatctttgttgtttattttaaaattcaagacaatttttttgcaaatgctgattcaaaacgtaccaatccccatctatcatgcctatgccaatacaatctgtcacaaaaaagtttgcttctcattgtcacatagctayggggactggtggccttctaaaatcactgtccagctgctgcaagtgtgagaagcggtaagctagaggagacagacggcrttgccattaaaaacaattcaacttcattttaatgttgctatgtaagttcacaataaaatccctggaagttcaaattggaaagagcagtttggggtcatgggctcaacaatataaaggcagattcagtgaggggtaagggtagtggctctgggggcagactgacctagatttgaatgccagttgtaccagactcaagacaccttgggtaagtggttttatgaagtacctcagttcttcatcagtagaaagagtgctaacacctccataagacttttgtatggattgagtaagataatgcatg

SEQ ID NO: 4056 - DNA, 985 bp, Homo sapiens
acaacacttttatcactttttttttgttgggcttctgcaaaatacaagctcatttttaaaccaaatgaacagaccatgagctggcttcaggggaagtgctattcacaggaccatatccaccaccctcttaaattcctaaacaatatcatctaggacttctatttaagttatttaaaataaatcttccttgagagccttgggaggtgatgtcagggttataaatggcacagtgcatttgctgtaggaatgtggtttggcattgttttatacacacagtattttttataccttaatgcttattcttgatggcatctgtcagatattagaattgaaaataagaatcttcccaaaatcctttaatttacctgatgccctcatcaggtcgttaaaaattcaaatggttttaatagctaaaaaactacaaattaagctctaaaacaaacaaactacagaaatgtaaaccttcatttgccaaaggtccttggtggcctgtcccctgccctgggagcagatggccctgaagcccttccctcactgtgcaggccaccgggtgaggctggacggtcacccatggtggcttcactgcaaggagcaggactgccgagctcaagcacggggccttcagcttcccctgtcctctggccacaccgccagcccttggtccttatctgtgtgaggtttacaaataaagcttctgatgtcaaatgtttaaatcgtgccctcagtggacgaggccatgtcctgatgcagaaggctgagcccaggctctctgtggcgccgctgagagcagagggctgtcttggggtcttcgagctctggagccaaggayggcctggtcctacttctctgcccccaccaatgggggacttgaatgtggccagagaatacagtcacttcagcatcagtgattgatgagaaaaggaagggcagaggtacagcctgcaagttgctgacaggttcaagatttggggcaacaaaaatgaga

SEQ ID NO: 4057 - DNA, 562 bp, Homo sapiens
ccaggtgataaagcctgaaaggtagagatccaacagcgctagcggttgaaacgttttttaaaatagagaaagcgagaggaccgacggcggctccggtgactgctgagtttccagacaagggagctctgtgcaatgaggggcgcacaggagcatgccctcaattccaagaagatcagctggctggctggctggcaactggaggcctttctgtcctggctgagggccctggccccttggtggcctttgggaarcagcatctcatcgggccgttttttcgttctggcgggcggccggcttggcccgcggggtcgggctctccgcgcagtgcagagacgtctccaccctcagggacgaggctctgacgtggcgggaggtcgtttccgtgcgctgcgaggaggattccacgtgccgggaggacgcctcgaggatgcgagggagccgcttccccgagggggagagggagggcccctcgctgcggcgctgggaggtctccacccgccgggacgacgtctccacgcggtgggacgaggtctccacgcggaccgtggacgtctctgtgtag

SEQ ID NO: 4058 - DNA, 483 bp, Homo sapiens
tccccagagggcttctccttttttaatcaatgaccaacttatccagctttggaaatctggacaaagagaaggctgagaggaggcctggtccagtgtctaagggtctctgagtgagtctgtgtcagcatgtgggccccagctgggcctgyccatgggttgggcacagcagtttcctgactggacacctggaaccgtgttgaacttgtgcttcttgaagtaggcctcctggagtgggtatgaragtgaaaatcagcacctcacattgtctggcccacacccacttgctgaccagccagacatctataagacacacaaatgaagtcctagacctgtaaagagccctctaatttcccaccgtcttctccatcctctttgcagcatcctcagcaagctcttactagctttaatttggcctccaccattgctggagagctcatgctgtcacggcagctcacactactgcaccacagacccatgaactag

SEQ ID NO: 4059 - DNA, 3771 bp, Homo sapiens
gagtatgttcaatttttggtttattaaaacaaaactacattttctgtgtttcttgcaatacactaacaagcataaaaatcaatcagcatttccaagtatgttttgctcacaaaatcgcagttatttcacagtaccttatagtaattcttttcacgagtcttaacatttctttgtacaacaggcaaatagtttaataccttccatcaagacatttcagagctctagacgtttagaaataaggtcaagaatctctttcaaatgcaatcattagtttgtattaaactaaaatgccagacggcaagtctcaggtttctaaaatagttttaaaaaacaggtttacagcccatagtaagtcttagaaacctcaacgataggtcctgtcatgtctaaacactacaactatctgtggataaaaatctgcattcaaacrtacaatactttcttctagatctgaattaaaaccttatttaccccaattcatccatgtattctgatacgttcagtgaaaaagccaggatcattggggctgttctctctatcaaaggaaagagctccgatcacctacattataattttctgtgcttattttctgcaggggaggaaatacacatctattcaacgccacactggacgttacaaaatgcatgcatattctgccccagtgctatctgttcattaccgttttgtctccttaaagaactatctaacatagtgtttcccaaaatgttctccacaggacattagtgagaggttcataagtatcccaaaggagaaaaaggtcctggtgtcaaaatagtttgggcaatgctgggttagacagtttttcactaccggatgccaagcccttactgcgctaaagtgcattgtaagtttccaggtgcaaacttggtttcccagcaacaccatttctataaaacactgatgaacatctcacagagcactcatattacatggagtgctatgggaaatgcttttccccatccaggttactggcaattccacaatttgggcttacattcattgtaatcccagaaatattttctccatttaccctcatgactttgtgaaatttaacagattccagaaggaagactcgaagccrtctcagttaacagttctacacatttcccactagtttttgcctttgtttttcatgcattttcagagtgcacaacttccctcctctcttctgaatcacttaggacattctcattttcaaaaacagactgcagtttcatgttgtttaatattgttttttttttttaacttgaccacagtcttcccctgaagaagggcatgcatttcatgttacagaaatgcgatagagtaaactgtaataaattatttacaagcacctagtttgtttaaccttatgtggaagccatcactgttggaaaacaatgagaatgtatcttttagcaaaacggtgctatctggaagcttcattgtgaagatgctttcgtttttttgttttttgttttcagtcatgaggcactgaagaatgagttgtgctgaaattaactcaaaggtcagcttgtctggatgagcataactttggttgagatttttctcccttaaaaaagattttcaaagcaccagttaattacaaaaagcatgcatatttatcctcacagtgagttaagtggtgagagagctagcaaatcatacatygcattccccaaagcatctgaacgtacttctagaaaacaaaccaaccaaaagggaaaataatgcaagagaagccgtattttctttgcttaggttggcaaagcagcagctctttgcagcaatgacaggcagggcagagtgtcgactgggaagcgagtcccaatcttgaataatggtgagcttgagtaatccttaatttacaatttaaaggatgaaaaaaagagactagtgaaatgtttgcttccccagataaggaacacccaagactccctgggtatcctccaaatgtagccaagaaaagtgttcttctaccctagtcagtaaaatggaatgctaaaacatgatatctcattcaacatcagagctactacaactgacaatgacttcatggtatacatcaattcctataaagaaaaaatatattttaaatgcagaacttgagagggatcacaacagcatagcattattgctatgagtttcaaacatggtatttcatacaatgtgaaatatcaatcagcatccctccctctcccaaaacacacattactcatgagatactatcagtgtttaaaatccaagcttatggaagtacaaacttaattctcagtacttttatactaaattcaaagaatctatgtaacactcatctggaaaaattcttaattccataatatcttggagataagcaacagtaaactgttagaaaacgttttaacattacatgatatttaaaaaatcaccataattaccataataaaccaataattatgctccctgctcacaaaaggcacctaccaattatgaacagaccatttttcataattatttaccactatgtggcataagggtttaggcatataacccataaaaatttgttaaaagtcatggtttttcctcaaagctaaaaatccataaatgcctctaaccattaccagtcagtagggccaccacatgcatatactggacaggttgtgcacggcacaactcgagtgggtaccagtcacctggactggggtgcagtacacaatctgtgtgcagtacagaaagccctcatcagctgtggccagagaactgtattctaacagtctgtcagctcaagctaatcaagttaggaaaactgctatttggttggaggatttccaagaaacagctgtacctgtgagaggcaggtattacctgaggggtggacgaggtacagacataaaacaggaagggttctaaatatatttgctggtcatttgaaactcaatggcacttgtttatatgagcaaaagccttcaacaccagttttctggccaagtttccctagaattttgccagccaaattaacttcctgatgttaactatttgattacaatatctcagttcccgacctaaactaatattgtctgttttcacatagctcttaaaaacatttctaaatctgacagcaaaggacagcacagtgatacctgggtgtgatatatatcagtccactcaatttataaagcactttgggataaaaggtgctcccattaaaaatgtagctactattgacagataaaactgaaaaagagtgaatggatgactcaattatttttaaaggaagcattaaccactaaccagataatataccaacaaattacccagcagcactaagtataccatgtaagattcagttccagaacacagctacatttctgtgtccatcacagtaattagtccttaaaagttgtacttaaaatgtcaatctttaataaactcaaaaataatttattgagatttcatcttgtagtctacggattatgagttgcgaatagaggctgaggtccccccaagtgttatctgcaggctgctgtgttgatgcagagctgggaagatcacagatccatggagggagaaggcacttgtcttccaggagatcacttcgggacagggcaggcctgaccctgcgayggcaccttcaactcttgagccagaagctggtacctacaaggaactcatctcatgaccttcatttgccagcagtgccacacgttacctacagcaccacaaaactcagaatatattctagaagtttttgtcggttgcattgaggtagaaaagtgctgctcagttctaaaa

SEQ ID NO: 4060 - DNA, 2817 bp, Homo sapiens
atcgatagggctgcacagaggtggcacagttgtgccagaggtagcagggacaggagggctggcaagggagggtccagggctaggggattcggagtggcttcaggcggaccacgtggctaccttttttccagggccagactttggcagcgtgtaaggtctgaggacaggggcaccggaggccgaggatgagaggccagtgcctgtttccaggcagccagggcctcagaaactccggccggagcactcacccgtcggtggaggccgttaccagggccaccttattygcgagcgggtcccggygggtcatccyggagctggccatccgcaccgamttccaagcccdggcacagaggcctagcagccycgycttgtgcatggmtcagaccagcaagtgccacttcggataaaccctttggactcctaactccaatcaggtgtctgctttgttgaggactcacagacacagtctcctttcttcaagatctttacaatgcaasacctcactaacacacagggatggtctcccagagggtctgtgctgttccttcactcagaacatcaagatgcactgaagtaaggatcctctattctacagttcctgctagctgagctattccatgggggcttcagcaggaaattccaaggttggctttgacaagctaaggcyggctggtggagcacatcgagttctggaggttcatgtgtgttttcatgaagatctgtctgcccgtagcagataaagagttgttgccccactcctcctggggtcttctattttcctgggaggaatttctggattaactgaacacacacacacacacacacacccttttgaagcatcaacagtaattctgagttcttagggacaatgcagattaaatccacaataagaaagacaactatggccaggtgtggtggctcacgcctgtaatcccagaactttgggaggctgaggcggatggatcacctgaggtcaggagttagagaccaacctgaccaacatggagaaaccccgtttctactaaaaatgcaaaattagccgggcatggtggcaggcgcctgtaatcccaaatactcgggaggctgaggcaggagaatcacttaaacccgggaggcagaggttgcagtgagccaagatcgcgccattgcactccagcctgggcaagaagagcaaaactccatctcaaaaaaaaaaaaagagtactattgatccagaggtgaccagactagcctcactggagataataggtgacattattatgcaaagtggtttcagttcccttgtcttgtttttggaatagtataagaggcctacaatacgaataaataaggcccatcacaagcctcaccaaaggacaaaactaatccacttctgaagaaggctctttgttgggccagatcaaatccttggacagaactgtactcttaatctctgtagtgaaagtggggggtagtttaagaatttattaaccttctaccttgagcaatccctcagaagtaagaggtgtcaggcctctgagccgaagctcagccattgtaacccctgtgacctgcacatatatgtccagatggcctgcaggagccaagaagtctggggcagctgaaaaaccacacaagaagtaaaacagccagttcctgccttaactgattaaccaacattacaacattccaccattgtgacctgtccctgtcctaccttaactgatcaatcgaccttgtgacagtcttcttctggacaatgggtcttatcatctccccaccatgtaccttgtgaccccctcctctgctaacaatagataaccacyttttactgtaattttccattacctacccaactcctataaagcaaccccttccccatctcccttcactgactctgttttcagactcagyccacttgcactcaagtgaataaacagccttgttgctcacacaaagcctgttggtggtctcttcacacagatgtgcttgacaaaagggaagggtggatttgtccttctggttacatatgttctgctcactcattttgaatttaattaaacaaggattgcccttaccttttcatactttgtaagaaaccataaatacttatgcaccatgatttttttaaagaaacactttttattttgaagtaattatagtctcataggaagttgcaaaagtagtacatagagtccctgagtactcttcccccagtggtgacaactgtagtataatatcaattctgggaaattgacattggtacaataccaaatatactatgcctttttctctaaggcatgatgttgcagtagcatccttgtacatgtagctaggagaacttgtactaagcccagataaatagttgaagtacaagggcraggagtgtgtctttgatattttaatagaaatcacctattgccctctagaaaagctgtacccttttccagtggcagagaaccttcctgaaaggcagtcctgtgtaatggtgtccatttcatcacacccttaaaacactcagctttaacaaacatgcagatttttgctgatgtgggagaaaatattaattattaatgatattaaggtgattatcttttcgtatgtttatagatatttgtatttctttttaaatgaactgctcatgacctttgtctacttttatttgggtttacttctttctcatttattcctataaactctttataaaaggaaattaaccatttgattgtcatatgttgtgaatatttttaccattttgacttttgaatttatgtctttttaatgaattgtagaagtttaaaatctttatggaataaatttatttagttttttgtttat

SEQ ID NO: 4061 - DNA, 2030 bp, Homo sapiens
ccaaatggctcaccttaaaaaattgatttcctcacttctgtttcaggccacccaagatatttctaaaaatatagaaatgtttacaatgatatttgacatttataatcctacagcaacaaatactacaatcaaatttcwttttaaccaaattatttgcagatatcagttgatagtccacgttatacctatacttgcttctaaataacaaagatctgaaaattccgtctacagtcataccaccctgaacgcgccccatctcmtctgaaaattccactgagttcatgatttatctcatagtcatctttaaaatttatattttctgaagtaattgaagctaaaacaaagtcttcatttgagaaattttagtaatattgtcatctagaaacaggtaaaagtattgctcttgcaatgattattatttagcacagccatcttaaggcaatactttaaaatttaattcctgttcataggacaaggtgaggcaagaaacaatttttcagtattggtattcatattagtctgttctcacactrctataaagaattgcctgagactgggtaatttataaagtaaacacgtttaattgactcacagtcccacaggctggggaggcctcatgaaacttacaatcatggtggaaggggaagcaaacacatccttcttcacatggcagcaggaagaagtgccaagcaaagggggaaaattcccttacaaaaccatcagatcttgggccaggagcagtggctcacgcctgtaatcccagcactttgggaggcycaggcgggcggatcacctgaggtcgggagtttgaggccagcctaaccaacatggaaaataaacatcaaggtctgccattctaaaaaagcattaatggattacaatagtttcaatagtttacatggttttcactctttaagttcaatgaaaattgcatatattgtttttactcttgaacacagtggttaatactatatcagggtggttagtcacaagaaagacgcaaatacagaaaggataaccttatccaacttcagtattattttagtagtaatgtgtataaaatccaaccactgcttgggtgaccttaggagacagcaagcctaagagatgaaamcatttacaccttttaattaaattacactgtcaccacataaaagtgtgaggttcaacatttgttttcttaaaaacagagcactaaacagtttaacacaggacctaacttacggctaagatgtttctaaaatgtatgcagaacccttaagactatactgcatcaagtagttcttttgaattatgtatactcaaatgatggtgttataatttacattgaaatgccacaacaaaatcttgataaaacaagatataggagaaataaaaattaatttctgaaccaaatgtgtactaccttaccctagagtaaatcactgggaaatacaggcagaaaacagacatcctgcctgtgaaaacaattgcatattcaaactggagagagtcatagcacgtatgcttttaaaagtaagtttcgaaaaactgttttatcagttttgttttttttttggagcatgtcttttctaaataattctcacttatcattccagaaaatataacaaacagtttgtaagaactcatgcaaaaatgtttctctaaggccataaattggtttgctaagttgcattgttttattcaagtaaaaagcccttctagagaacaaggagtctgtaaagaaaaccaatcaccttcaactcttgggcctgtacacctgttaggagctctatcactctgaaagccaaaagatagaatgctcatttgagcatttgcaaaatgttctctatttatatttttaaaaatctgatacatgtaagkttttctggcagattctttttgtatgttacaaaacaaaacatcaaaagctcagagtaagataagaatccctttttcttagaaaggtcaagcagatacttcttgacatcatgtcctttatacaatggcatattgttcatataaaagcggactgctacttgattgttgca

SEQ ID NO: 4062 - DNA, 1014 bp, Homo sapiens
ctggggagctgtggctcagacctctggtttctgcgcctcctcactctccaaacccaacctcgaggttcccccgccgctgcgcaccctgggaagccctttctcaccaggagctctcaccccaatatcattctctccctcctcctccaactcctccgagcccaggtccgacatggtctcgccccagcctggatcacagccgcagcgcctctagcargctctgctgacccttcgggattcgcggctagctgtgatgtgtccgccaagatctcttctcttgtctgtaaacaacttcactctcaaggaggcagctctggcctctcagcaggtgcggcctacagygatgtccgtccgggttttacatccttcccmgacctcgacatgagtcccagccccctcgggcctctgactctcaggtgtcccctacgatcgccgtcctctcctctcgctcctggctcccctacactgtcacacacccacacaatcacagacgcacacgcatgtacacgtgcaggcttggaaatctgctttacctgacgcactccgcctgccgaaggcccctcacatctcccatttcctctgccatcatcccagactgcaaagctgtgttatttgttgttgctgcaggagctggggaggagtgactgaataactataggatttggtcttgatgggagaatcccagaagccaaatccacgcggtgaataagctgctgatcttccagagcacacatcccctagagattcttcccaatgctaatatgaaaggttacaaccataacccatcatcaggcccaaatatattacttactgaataaatacacaagttacaacaacacacgagattccaaaattatgtcgttttttagatgcaaagataaaaatgttgtaaacaccaaaatttaacagcttttcttatggggaaaagtggggagttagggataacagatgattattattttcttctctacatattggcagttacccagttactacaattaagcatgtcctattttt

SEQ ID NO: 4063 - DNA, 565 bp, Homo sapiens
aatttcagtctgccacatcagcacatttgctaaaagaattaaygtgggatggaatggaatcgaaccaagtgctacagctcagggaggaaatgcctccttgaccgagtgtgctcatrtgagactccacatcgyrggacacttaccagcatcgaggctgcccgtggccgctgtccagcccatgacaggcgggatggccccaaccacagctccgacccatgtgttggcaatgctgatccttttcagtggtgtgtagcagcaggtatacaggaaaatgttgaagagccccagggctcctgtgwgtggattcacccccaaggtcagaatggcaactcchggaacagcacaacaagtggcaaaggacacagctagcaaygggctggaaaaaggcagagaacstggagtgatcatctccaactcaactcaatcayactrcctaaaatcggcactgacaaagtacaaataatccacctatccagtagaggcagyactgatctggctgattcctggatatggggaatcctctttatgaaacaaacttayaataagaaagaatatgtttgtggga

SEQ ID NO: 4064 - DNA, 278 bp, Homo sapiens
gtgttcgagcctggtccaccactcctcagttcttcttgctcttggcttttgtggccttggcatccagcgtgctctgggcatgagtgaggtgcttcacagcatcaagcacarggactccaggcagcaccagcyacagggcattcatgaagacaaagtaaaaycagaagtagagagggtggcccagctctccgtgctgaggccastatgggtgcaaggggccmgcgttggtagycatgtctttgtgggctgatggctgcgtgtgtataggcaggaagtta

SEQ ID NO: 4065 - DNA, 1733 bp, Homo sapiens
gcgcgcaggattcctgcgctggaggccgcctctgacgccaccggctgggctccgccatgagttcggcgccggcctcaggctccgtgcgcgcgcgctatcttgtgtacttccagtacgtgggcaccgactttaacggggtcgcggccgtcaggggcactcagcgcgccgtcggggtccagaactacctggaggaggccgccgagcggctgaattccgtggagccggtcaggttcaccatctccagccgcacggacgccggggtccacgccctgagcaacgcggcgcacctggacgtccagcgccgctcaggccggccgcccttcccgcccgaggtcctggccgaggccctcaacacacacctgcrgcacccggccatcagggtcctgcgggccttccgagtgcccagcgacttccacgctcgtcacgcagccacgtcccggacctacctgtaccgcctggccactggctgtcaccggcgtgatgagctgccggtgtttgaacgcaacctatgctggactctcccggcagactgcctggatatggtcgccatgcaggaagccgcccagcacctcctcggcacacacgacttcagcgccttccagtccgctggcagcccggtgccgagccccgtgcgaacgctgcgcygggtctccgtttccccaggccaagccagccccttggtcacccccgaggagagcaggaagctgcggttctggaacctggagtttgagagccagtctttcctgtatagacaggtaggctctgttctggggccgtccccagggggtggggctgagggtgggcaggcccctgtgcagtcttggctctgggtcgtgggcggctctgggtcacaggtacggaggatgacggctgtgctggtgggtcacgggcggctctgggtcacaggtacggaggatgacggctgtgctggtgggtcacgggcggctctgggtcacaggtggctctgggtcacaggtacggagratgacrgctgtgctggtggccgtggggctgggggctttggcacctgcccaggtgaagacgattctggagagccaagatcccctgggcaagcaccagacacgtgtagccccagcccacggcttattcctcaagtcagtgctgtacgggaacctcggtgctgcctcctgcaccctgcaggggccacagttcgggagccacggatgaccctggacactcaagccaaagttaggccacaccaggcccaaccctgtgctggtcaagccagggcagtcacagctgcttggggcccacagcactgctgcctggtctccacagtagcctccctgcccgggtcccagcaccctggatgccygtctctgtcccaggcgggatggggcacagtgcaggacacagccatgtacaccaagaagagagtaycaagtagtcttttgttcagcttttactggaaactgctgtctaggaccacctgccctaaccaggaataaaggcaagacagcctggagaccagtttgtttcttcagctgcaaacagctgcctrggcaggcaggtgacacaaggcctctgtccccagggatgggacctgcagggtctgttcacccagggcacccacagtcctgaagtgcaggcccagggtctgtccagctgggagagggcagaggtggcggctgggtgagttgccggcctcagctgggggcctgggggaggcccttcttcagcagagatgtgaggaagctccccagctcctcgtc

SEQ ID NO: 4066 - DNA, 2628 bp, Homo sapiens
gcgcgcaggattcctgcgctggaggccgcctctgacgccaccggctgggctccgccatgagttcggcgccggcctcaggctccgtgcgcgcgcgctatcttgtgtacttccagtacgtgggcaccgactttaacggggtcgcggccgtcaggggcactcagcgcgccgtcggggtccagaactacctggaggtgcgctcagccggtcacgggacgcccggtgaggggtaagggggaggctcccgcccgcgcgtccccggggtccggcctcgctcacccgcccgccccgcggctcggtcctgcaggaggccgccgagcggctgaattccgtggagccggtcaggttcaccatctccagccgcacggacgccggggtccacgccctgagcaacgcggcgcacctggacgtccagcgccgctcaggccggccgcccttcccgcccgaggtcctggccgaggccctcaacacacacctgcrgcacccggccatcagggtcctgcgggccttccgagtgcccagcgacttccacgctcgtcacgcagccacgtcccggacctacctgtaccgcctggccactggctgtcaccggcgtgatgagctgccggtgtttgaacgcaacctatgctggactctcccggcagactgcctggatatggtcgccatgcaggaagccgcccagcacctcctcggcacacacgacttcagcgccttccagtccgctggcagcccggtgccgagccccgtgcgaacgctgcgcygggtctccgtttccccaggccaagccagccccttggtcacccccgaggagagcaggtgaggaagggcccctgggctgtggccctgccctcaagtcacgtgctgattttagctccagcacctcccccagttttaaggcaaggtgaggcgggaggcaggcagccgggagtcctcaggacctggacagctggagrggattcgcccggacgccccccagcctccagctgtgccctccccccaggctggggagcggagaacagggaaggctgcttgtctctgaaaaacccctgccatgcctgatggaagaatgttggcagctactggaaaggtctcactggtgccagtggttctggtggggtggtttctgctgcccccagcactgtcccgagggccacccaccaggtggcagcttctgaccagaacctcccctattggggtgagccctgaaggggggaagaacttctgccagccccagacttctgtggcagagcagcaggtacaggactgggggtctctggcacccgcaccagccacgttcccagaccctgcaccaggaccctaggtgagggcccagggcaagcccctctgggatggccaggctacctgcccagcctccagggtcctgctgcctccttgcccaagcattgtttctctggttttaagcccctccaatgggcctcactgggggcaggagatcagccagggcccctggtggccaagctagtgggaaccaggctcgtctttaggcccaccctgtcactctcccgtccaaggccacatagtaggctgaggatggcaaacactgccccacagacacctacaggtacgtrtttttccaggaagctgcggttctggaacctggagtttgagagccagtctttcctgtatagacaggtaggctctgttctggggccgtccccagggggtggggctgagggtgggcaggcccctgtgcagtcttggctctgggtcgtgggcggctctgggtcacaggtacggaggatgacggctgtgctggtgggtcacgggcggctctgggtcacaggtacggaggatgacggctgtgctggtgggtcacgggcggctctgggtcacaggtggctctgggtcacaggtacggagratgacrgctgtgctggtggccgtggggctgggggctttggcacctgcccaggtgaagacgattctggagagccaagatcccctgggcaagcaccagacacgtgtagccccagcccacggcttattcctcaagtcagtgctgtacgggaacctcggtgctgcctcctgcaccctgcaggggccacagttcgggagccacggatgaccctggacactcaagccaaagttaggccacaccaggcccaaccctgtgctggtcaagccagggcagtcacagctgcttggggcccacagcactgctgcctggtctccacagtagcctccctgcccgggtcccagcaccctggatgccygtctctgtcccaggcgggatggggcacagtgcaggacacagccatgtacaccaagaagagagtaycaagtagtcttttgttcagcttttactggaaactgctgtctaggaccacctgccctaaccaggaataaaggcaagacagcctggagaccagtttgtttcttcagctgcaaacagctgcctrggcaggcaggtgacacaaggcctctgtccccagggatgggacctgcagggtctgttcacccagggcacccacagtcctgaagtgcaggcccagggtctgtccagctgggagagggcagaggtggcggctgggtgagttgccggcctcagctgggggcctgggggaggcccttcttcagcagagatgtgaggaagctccccagctcctcgtc

SEQ ID NO: 4067 - DNA, 324 bp, Homo sapiens
tttttttttcgatttgggcttttttctttttggtctggatgttggtggaatttccccattcgtaagacttttctgtgagagggaagtaagagaagaagaaataagcattttgggttcctacattggccttccttccttccgctggtacatgtagttggggaaagggtcggttttcttctttagttctgttgaggccccagagaascaaaggatccccaaaggacaacagctctgcgcgcagagaagctctggggccaggcccaagcggaggcgtgaagccaccagtcccgccagggcagcaccagacacagtgtcccagacgcc

SEQ ID NO: 4068 - DNA, 405 bp, Homo sapiens
atgcaacgcgacctccttcccacagcaacgaaagactgcgactccccggactatcaggccgggagagtccacttccagctcacctcggagctccgggagccyttcagcacctgcttggatgcagccatcgtgggctacaaggacttgccttccatccaggccaccatccctgggaaaaccttcatcaacgtcaagccagctgaggttgatgtcctggttggcaaagactggtcaagtttttttgtgaatgaggtgacacttgggggccagaaatgttctgtgatctgggacctactgctgcaggatggggaactgacctatctttataccaagagcaccgatggagcccccaccttcaatgtcactgtcaccatgactgctaggatgctagtgttgtaggaagtc

SEQ ID NO: 4069 - DNA, 2353 bp, Homo sapiens
accggaagttgcagmgaggtggttgcgcctgcgcagtgcatcaccgcaggcgggcctcgcgggtccgggagcgcggcggagacgatgcctgagatcagagtcacgcccttgggggccggccaggacgtgggccgaagctgcatcctggtctccattgcgggcaagaatgtcatgctggactgtggaatgcacatgggcttcaatgacgaccgacgcttccctgacttctcctacatcacccagaacggccgcctaacagacttcctggactgtgtgatcattagccacttccacctggaccactgcggggcactcccctacttcagcgagatggtgggctacgacggscccatctacatgactcaccccacccaggccatctgccccatcttgctggaggactaccgcaagatcgccgtagacaagaagggcgaggccaacttcttcacctcccagatgatcaaagactgcatgaagaaggtggtggctgtccacctccaccagacggtccaggtagatgatgagctggagatcaaggcctactatgcaggccaygtgctgggggcagccatgttccagattaaagtgggctcagagtctgtggtctacacgggtgattataacatgaccccagaccgacacttaggagctgcctggattgacaagtgccgycccaacctgctcatcacagagtccacgtacgccacgaccatccgtgaytccaagcgctgccgggagcgagacttcctgaagaaagtccaygagaccgtggagcgtggtgggaaggtgctgatacctgtgttcgcgctgggccgcgcccaggagctctgcatcctcctggagaccttctgggagcgcatgaacctgaaggtgcccatctacttctccacggggctgaccgagaaggccaaccactactacaagctgttcatcccctggaccaaccagaagatccgcaagactttygtgcagaggaacatgtttgagttcaagcacatcaaggccttcgaccgggcttttgctgacaacccaggaccgatggttgtgtttgccacgccaggaatgctgcacgctgggcagtccctgcagatcttccggaaatgggccggaaacgaaaagaacatggtcatcatgcccggctactgcgtgcagggcaccgtcggccacaagatcctcagcgggcagcggaagctcgagatggaggggcggcaggtgctggaggtcaagatgcaggtggagtacatgtcattcagcgcacacgcggacgccaagggcatcatgcagctggtgggccaggcagagccggagagcgtgctgctggtgcatggcgaggccaagaagatggagttcctgaagcagaagatcgagcaggagctccgggtcaactgctacatgccggccaatggcgagacggtgacgctgcmcacaagccccagcatccccgtaggcatctcgctggggytgctgaagcgggagatggcgcaggggctgctccctgaggccaagaagcctcggctcctgcacggcaccctgatcatgaaggacagcaacttccggctggtgtcctcagagcaagccctcaaagagctgggtctggctgagcaccagctgcgcttcacctgccgcgtgcacctgcatgacacacgcaaggagcaggagacggcattgcgcgtctacagccacctcaagagcgtcctgaaggaccactgtgtgcagcacctcccrgacggctctgtgactgtggagtccgtcctcctccaggccgccgccccttctgaggacccaggcaccaaggtgctgctggtctcctggacctaccaggacgaggagctggggagcttcctcacatctctgctgaagaagggcctcccccaggcccccagctgaggccggcaactcacccagccgccacctctgccctgtcccatccctggggacagaggccttgtgtcacctgcctgccyaggcagctgtttgcagctgaagaaacaaactggtctccaggctgtcttgcctttattcctggttagggcaggtggtcctagacagcagtttccagtaaaagctgaacaaaagactacttgrtactctcttcttggtgtacatggctgtgtcctgcactgtgccccatcccgcctgggacagagacrggcatccagggtgctgggacccgggcagggaggctactgtggagaccaggcagcagtgctgtgggccccaagcagctgtgactgccctggcttgaccagcacagggttgggcctggtgtggcctaactttggcttgagtgtccagggtcatccgtggctcccgaactgtggcccctgcagggtgcaggaggcagcacctgtgg

SEQ ID NO: 4070 - DNA, 2279 bp, Homo sapiens
accggaagttgcagmgaggtggttgcgcctgcgcagtgcatcaccgcaggcgggcctcgcgggtccgggagcgcggcggagacgatgcctgagatcagagtcacgcccttgggggccggccaggacgtgggccgaagctgcatcctggtctccattgcgggcaagaatgtcatgctggactgtggaatgcacatgggcttcaatgacgaccgacgcttccctgacttctcctacatcacccagaacggccgcctaacagacttcctggactgtgtgatcattagccacttccacctggaccactgcggggcactcccctacttcagcgagatggtgggctacgacggscccatctacatgactcaccccacccaggccatctgccccatcttgctggaggactaccgcaagatcgccgtagacaagaagggcgaggccaacttcttcacctcccagatgatcaaagactgcatgaagaaggtggtggctgtccacctccaccagacggtccagattaaagtgggctcagagtctgtggtctacacgggtgattataacatgaccccagaccgacacttaggagctgcctggattgacaagtgccgycccaacctgctcatcacagagtccacgtacgccacgaccatccgtgaytccaagcgctgccgggagcgagacttcctgaagaaagtccaygagaccgtggagcgtggtgctgatacctgtgttcgcgctgggccgcgcccaggagctctgcatcctcctggagaccttctgggagcgcatgaacctgaaggtgcccatctacttctccacggggctgaccgagaaggccaaccactactacaagctgttcatcccctggaccaaccagaagatccgcaagactttygtgcagaggaacatgtttgagttcaagcacatcaaggccttcgaccgggcttttgctgacaacccaggaccgatggttgtgtttgccacgccaggaatgctgcacgctgggcagtccctgcagatcttccggaaatgggccggaaacgaaaagaacatggtcatcatgcccggctactgcgtgcagggcaccgtcggccacaagatcctcagcgggcagcggaagctcgagatggaggggcggcaggtgctggaggtcaagatgcaggtggagtacatgtcattcagcgcacacgcggacgccaagggcatcatgcagctggtgggccaggcagagccggagagcgtgctgctggtgcatggcgaggccaagaagatggagttcctgaagcagaagatcgagcaggagctccgggtcaactgctacatgccggccaatggcgagacggtgacgctgcmcacaagccccagcatccccgtaggcatctcgctggggytgctgaagcgggagatggcgcaggggctgctccctgaggccaagaagcctcggctcctgcacggcaccctgatcatgaaggacagcaacttccggctggtgtcctcagagcaagccctcaaagagctgggtctggctgagcaccagctgcgcttcacctgccgcgtgcacctgcatgacacacgcaaggagcaggagacggcattgcgcgtctacagccacctcaagagcgtcctgaaggaccactgtgtgcagcacctcccrgacggctctgtgactgtggagtccgtcctcctccaggccgccgccccttctgaggacccaggcaccaaggtgctgctggtctcctggacctaccaggacgaggagctggggagcttcctcacatctctgctgaagaagggcctcccccaggcccccagctgaggccggcaactcacccagccgccacctctgccctgtcccatccctggggacagaggccttgtgtcacctgcctgccyaggcagctgtttgcagctgaagaaacaaactggtctccaggctgtcttgcctttattcctggttagggcaggtggtcctagacagcagtttccagtaaaagctgaacaaaagactacttgrtactctcttcttggtgtacatggctgtgtcctgcactgtgccccatcccgcctgggacagagacrggcatccagggtgctgggacccgggcagggaggctactgtggagaccaggcagcagtgctgtgggccccaagcagctgtgactgccctggcttgaccagcacagggttgggcctggtgtggcctaactttggcttgagtgtccagggtcatccgtggctcccgaactgtggcccctgcagggtgcaggaggcagcacctgtgg

SEQ ID NO: 4071 - DNA, 2756 bp, Homo sapiens
accggaagttgcagmgaggtggttgcgcctgcgcagtgcatcaccgcaggcgggcctcgcgggtccgggagcgcggcggagacgatgcctgagatcagagtcacgcccttgggggccggccaggacgtgggccgaagctgcatcctggtctccattgcgggcaagaatgtcatgctggactgtggaatgcacatgggcttcaatgacgaccgacgcttccctgacttctcctacatcacccagaacggccgcctaacagacttcctggactgtgtgatcattagccacttccacctggaccactgcggggcactcccctacttcagcgagatggtgggctacgacggscccatctacatgactcaccccacccaggccatctgccccatcttgctggaggactaccgcaagatcgccgtagacaagaagggcgaggccaacttcttcacctcccagatgatcaaagactgcatgaagaaggtggtggctgtccacctccaccagacggtccagattaaagtgggctcagagtctgtggtctacacgggtgattataacatgaccccagaccgacacttaggagctgcctggattgacaagtgccgycccaacctgctcatcacagagtccacgtacgccacgaccatccgtgaytccaagcgctgccgggagcgagacttcctgaagaaagtccaygagaccgtggagcgtggtgggaaggtgctgatacctgtgttcgcgctgggccgcgcccaggagctctgcatcctcctggagaccttctgggagcgcatgaacctgaaggtgcccatctacttctccacggggctgaccgagaaggccaaccactactacaagctgttcatcccctggaccaaccagaagatccgcaagactttygtgcagaggaacatgtttgagttcaagcacatcaaggccttcgaccgggcttttgctgacaacccaggaccgatggttgtgtttgccacgccaggaatgctgcacgctgggcagtccctgcagatcttccggaaatgggccggaaacgaaaagaacatggtgagggcatggtgaggtgtgggaatctggaagctggaggccgacgggttgtccttccacccatgctgtctctgagctctcactggcttggcctcgtgctggccaagggacgtggctgctgctgctggggaacgggggcgatgtccgcctggagctgctcagtctctgtgacacagcttgtccacctcgggcagaacagccccagcccagccctggacagtcttgtgccaaaacctgagccctttggagtctgcagctaggcttggtcrggcgccgctggcaggtggaaacagcttccaggggttcaggcgggggcatcccgggcaaggccttgaggtgccaaggctggagttccctggctgtgagctctgtgcctgcccccaggtcatcatgcccggctactgcgtgcagggcaccgtcggccacaagatcctcagcgggcagcggaagctcgagatggaggggcggcaggtggtgagtctcgaccccgcactgggctggcagggccgaggggcacctcctggtggtaaccactrtccacgccccgtggcctctgtagctggaggtcaagatgcaggtggagtacatgtcattcagcgcacacgcggacgccaagggcatcatgcagctggtgggccaggcagagccggagagcgtgctgctggtgcatggcgaggccaagaagatggagttcctgaagcagaagatcgagcaggagctccgggtcaactgctacatgccggccaatggcgagacggtgacgctgcmcacaagccccagcatccccgtaggcatctcgctggggytgctgaagcgggagatggcgcaggggctgctccctgaggccaagaagcctcggctcctgcacggcaccctgatcatgaaggacagcaacttccggctggtgtcctcagagcaagccctcaaagagctgggtctggctgagcaccagctgcgcttcacctgccgcgtgcacctgcatgacacacgcaaggagcaggagacggcattgcgcgtctacagccacctcaagagcgtcctgaaggaccactgtgtgcagcacctcccrgacggctctgtgactgtggagtccgtcctcctccaggccgccgccccttctgaggacccaggcaccaaggtgctgctggtctcctggacctaccaggacgaggagctggggagcttcctcacatctctgctgaagaagggcctcccccaggcccccagctgaggccggcaactcacccagccgccacctctgccctgtcccatccctggggacagaggccttgtgtcacctgcctgccyaggcagctgtttgcagctgaagaaacaaactggtctccaggctgtcttgcctttattcctggttagggcaggtggtcctagacagcagtttccagtaaaagctgaacaaaagactacttgrtactctcttcttggtgtacatggctgtgtcctgcactgtgccccatcccgcctgggacagagacrggcatccagggtgctgggacccgggcagggaggctactgtggagaccaggcagcagtgctgtgggccccaagcagctgtgactgccctggcttgaccagcacagggttgggcctggtgtggcctaactttggcttgagtgtccagggtcatccgtggctcccgaactgtggcccctgcagggtgcaggaggcagcacctgtgg

SEQ ID NO: 4072 - DNA, 2422 bp, Homo sapiens
accggaagttgcagmgaggtggttgcgcctgcgcagtgcatcaccgcaggcgggcctcgcgggtccgggagcgcggcggagacgatgcctgagatcagagtcacgcccttgggggccggccaggacgtgggccgaagctgcatcctggtctccattgcgggcaagaatgtcatgctggactgtggaatgcacatgggcttcaatgacgaccgacgcttccctgacttctcctacatcacccagaacggccgcctaacagacttcctggactgtgtgatcattagccacttccacctggaccactgcggggcactcccctacttcagcgagatggtgggctacgacggscccatctacatgactcaccccacccaggccatctgccccatcttgctggaggactaccgcaagatcgccgtagacaagaagggcgaggccaacttcttcacctcccagatgatcaaagactgcatgaagaaggtggtggctgtccacctccaccagacggtccaggtagatgatgagctggagatcaaggcctactatgcaggccaygtgctgggggcagccatgttccagattaaagtgggctcagagtctgtggtctacacgggtgattataacatgaccccagaccgacacttaggagctgcctggattgacaagtgccgycccaacctgctcatcacagagtccacgtacgccacgaccatccgtgaytccaagcgctgccgggagcgagacttcctgaagaaagtccaygagaccgtggagcgtggtgggaaggtgctgatacctgtgttcgcgctgggccgcgcccaggagctctgcatcctcctggagaccttctgggagcgcatgaacctgaaggtgcccatctacttctccacggggctgaccgagaaggccaaccactactacaagctgttcatcccctggaccaaccagaagatccgcaagactttygtgcagaggaacatgtttgagttcaagcacatcaaggccttcgaccgggcttttgctgacaacccaggaccgatggttgtgtttgccacgccaggaatgctgcacgctgggcagtccctgcagatcttccggaaatgggccggaaacgaaaagaacatggtcatcatgcccggctactgcgtgcagggcaccgtcggccacaagatcctcagcgggcagcggaagctcgagatggaggggcggcaggtgctggaggtcaagatgcaggtggagtacatgtcattcagcgcacacgcggacgccaagggcatcatgcagctggtgggccaggcagagccggagagcgtgctgctggtgcatggcgaggccaagaagatggagttcctgaagcagaagatcgagcaggagctccgggtcaactgctacatgccggccaatggcgagacggtgacgctgcmcacaagccccagcatccccgtaggcatctcgctggggytgctgaagcgggagatggcgcaggggctgctccctgaggccaagaagcctcggctcctgcacggcaccctgatcatgaaggacagcaacttccggctggtgtcctcagagcaagccctcaaagagctgggtctggctgagcaccagctgcgcttcacctgccgcgtgcacctgcatgacacacgcaaggagcaggagacggcattgcgcgtctacagccacctcaagagcgtcctgaaggaccactgtgtgcagcacctcccrgacggctctgtgactgtggagtccgtcctcctccaggccgccgccccttctgaggacccaggcaccaaggtgctgctggtctcctggacctaccaggacgaggagctggggagcttcctcacatctctgctgaagaagggcctcccccaggcccccagctgaggccggcaactcacccagccgccacctctgccctctcccagctggacagaccctgggcctgcacttcaggactgtgggtgccctgggtgaacagaccctgcaggtcccatccctggggacagaggccttgtgtcacctgcctgccyaggcagctgtttgcagctgaagaaacaaactggtctccaggctgtcttgcctttattcctggttagggcaggtggtcctagacagcagtttccagtaaaagctgaacaaaagactacttgrtactctcttcttggtgtacatggctgtgtcctgcactgtgccccatcccgcctgggacagagacrggcatccagggtgctgggacccgggcagggaggctactgtggagaccaggcagcagtgctgtgggccccaagcagctgtgactgccctggcttgaccagcacagggttgggcctggtgtggcctaactttggcttgagtgtccagggtcatccgtggctcccgaactgtggcccctgcagggtgcaggaggcagcacctgtgg

SEQ ID NO: 4073 - DNA, 2287 bp, Homo sapiens
accggaagttgcagmgaggtggttgcgcctgcgcagtgcatcaccgcaggcgggcctcgcgggtccgggagcgcggcggagacgatgcctgagatcagagtcacgcccttgggggccggccaggacgtgggccgaagctgcatcctggtctccattgcgggcaagaatgtcatgctggactgtggaatgcacatgggcttcaatgacgaccgacgcttccctgacttctcctacatcacccagaacggccgcctaacagacttcctggactgtgtgatcattagccacttccacctggaccactgcggggcactcccctacttcagcgagatggtgggctacgacggscccatctacatgactcaccccacccaggccatctgccccatcttgctggaggactaccgcaagatcgccgtagacaagaagggcgaggccaacttcttcacctcccagatgatcaaagactgcatgaagaaggtggtggctgtccacctccaccagacggtccagattaaagtgggctcagagtctgtggtctacacgggtgattataacatgaccccagaccgacacttaggagctgcctggattgacaagtgccgycccaacctgctcatcacagagtccacgtacgccacgaccatccgtgaytccaagcgctgccgggagcgagacttcctgaagaaagtccaygagaccgtggagcgtggtgggaaggtgctgatacctgtgttcgcgctgggccgcgcccaggagctctgcatcctcctggagaccttctgggagcgcatgaacctgaaggtgcccatctacttctccacggggctgaccgagaaggccaaccactactacaagctgttcatcccctggaccaaccagaagatccgcaagactttygtgcagaggaacatgtttgagttcaagcacatcaaggccttcgaccgggcttttgctgacaacccaggaccgatggttgtgtttgccacgccaggaatgctgcacgctgggcagtccctgcagatcttccggaaatgggccggaaacgaaaagaacatggtcatcatgcccggctactgcgtgcagggcaccgtcggccacaagatcctcagcgggcagcggaagctcgagatggaggggcggcaggtgctggaggtcaagatgcaggtggagtacatgtcattcagcgcacacgcggacgccaagggcatcatgcagctggtgggccaggcagagccggagagcgtgctgctggtgcatggcgaggccaagaagatggagttcctgaagcagaagatcgagcaggagctccgggtcaactgctacatgccggccaatggcgagacggtgacgctgcmcacaagccccagcatccccgtaggcatctcgctggggytgctgaagcgggagatggcgcaggggctgctccctgaggccaagaagcctcggctcctgcacggcaccctgatcatgaaggacagcaacttccggctggtgtcctcagagcaagccctcaaagagctgggtctggctgagcaccagctgcgcttcacctgccgcgtgcacctgcatgacacacgcaaggagcaggagacggcattgcgcgtctacagccacctcaagagcgtcctgaaggaccactgtgtgcagcacctcccrgacggctctgtgactgtggagtccgtcctcctccaggccgccgccccttctgaggacccaggcaccaaggtgctgctggtctcctggacctaccaggacgaggagctggggagcttcctcacatctctgctgaagaagggcctcccccaggcccccagctgaggccggcaactcacccagccgccacctctgccctgtcccatccctggggacagaggccttgtgtcacctgcctgccyaggcagctgtttgcagctgaagaaacaaactggtctccaggctgtcttgcctttattcctggttagggcaggtggtcctagacagcagtttccagtaaaagctgaacaaaagactacttgrtactctcttcttggtgtacatggctgtgtcctgcactgtgccccatcccgcctgggacagagacrggcatccagggtgctgggacccgggcagggaggctactgtggagaccaggcagcagtgctgtgggccccaagcagctgtgactgccctggcttgaccagcacagggttgggcctggtgtggcctaactttggcttgagtgtccagggtcatccgtggctcccgaactgtggcccctgcagggtgcaggaggcagcacctgtgg

SEQ ID NO: 4074 - DNA, 2050 bp, Homo sapiens
accggaagttgcagmgaggtggttgcgcctgcgcagtgcatcaccgcaggcgggcctcgcgggtccgggagcgcggcggagacgatgcctgagatcagagtcacgcccttgggggccggccaggacgtgggccgaagctgcatcctggtctccattgcgggcaagaatgtcatgctggactgtggaatgcacatgggcttcaatgacgacgtagatgatgagctggagatcaaggcctactatgcaggccaygtgctgggggcagccatgttccagattaaagtgggctcagagtctgtggtctacacgggtgattataacatgaccccagaccgacacttaggagctgcctggattgacaagtgccgycccaacctgctcatcacagagtccacgtacgccacgaccatccgtgaytccaagcgctgccgggagcgagacttcctgaagaaagtccaygagaccgtggagcgtggtgggaaggtgctgatacctgtgttcgcgctgggccgcgcccaggagctctgcatcctcctggagaccttctgggagcgcatgaacctgaaggtgcccatctacttctccacggggctgaccgagaaggccaaccactactacaagctgttcatcccctggaccaaccagaagatccgcaagactttygtgcagaggaacatgtttgagttcaagcacatcaaggccttcgaccgggcttttgctgacaacccaggaccgatggttgtgtttgccacgccaggaatgctgcacgctgggcagtccctgcagatcttccggaaatgggccggaaacgaaaagaacatggtcatcatgcccggctactgcgtgcagggcaccgtcggccacaagatcctcagcgggcagcggaagctcgagatggaggggcggcaggtgctggaggtcaagatgcaggtggagtacatgtcattcagcgcacacgcggacgccaagggcatcatgcagctggtgggccaggcagagccggagagcgtgctgctggtgcatggcgaggccaagaagatggagttcctgaagcagaagatcgagcaggagctccgggtcaactgctacatgccggccaatggcgagacggtgacgctgcmcacaagccccagcatccccgtaggcatctcgctggggytgctgaagcgggagatggcgcaggggctgctccctgaggccaagaagcctcggctcctgcacggcaccctgatcatgaaggacagcaacttccggctggtgtcctcagagcaagccctcaaagagctgggtctggctgagcaccagctgcgcttcacctgccgcgtgcacctgcatgacacacgcaaggagcaggagacggcattgcgcgtctacagccacctcaagagcgtcctgaaggaccactgtgtgcagcacctcccrgacggctctgtgactgtggagtccgtcctcctccaggccgccgccccttctgaggacccaggcaccaaggtgctgctggtctcctggacctaccaggacgaggagctggggagcttcctcacatctctgctgaagaagggcctcccccaggcccccagctgaggccggcaactcacccagccgccacctctgccctgtcccatccctggggacagaggccttgtgtcacctgcctgccyaggcagctgtttgcagctgaagaaacaaactggtctccaggctgtcttgcctttattcctggttagggcaggtggtcctagacagcagtttccagtaaaagctgaacaaaagactacttgrtactctcttcttggtgtacatggctgtgtcctgcactgtgccccatcccgcctgggacagagacrggcatccagggtgctgggacccgggcagggaggctactgtggagaccaggcagcagtgctgtgggccccaagcagctgtgactgccctggcttgaccagcacagggttgggcctggtgtggcctaactttggcttgagtgtccagggtcatccgtggctcccgaactgtggcccctgcagggtgcaggaggcagcacctgtgg

SEQ ID NO: 4075 - DNA, 2127 bp, Homo sapiens
caggccaccgcggcctgtgacgcgcacctcggcgcccaaggcccgtagccgcgcagtttcctcgggcgtcaggccgccgcgcagcccggccgtatacacgggccccrcgggctcgcagagcaggagcgcgcccgcctcagtccccgacggggcctcaatgcctggctcggcctgcagccgccgcagccagcggtcctgcagccccagtagctcggcgtacggcacccgacccaggcgcaccarccgaacggcgggttgccgcatcgtgcccaccgttgcgtccgcggggccccgccctctccgtgggcctgggggcgtggcctgaggggcggggactcgggggcacaccccgagccgcagctcccaggtgcgtgttaaaagctggaggggggatatgtgatcccaggaccaaaagcgcggggccagactcatcggttcattcaacaaccagtatttagtgcctgctgtgttctgcaggccctgccataggcgcttgatacagcggtgcatagcgtatgaraaagatctgtcctggctgagcatccgtaatataaaaatctgaaatctgaaatgctccaaaatcctaaactttttgagtgctgacattatgccacaaatggaaaatttcatacctgaccttatgtgagttgcagtcaaaacacaggtgcacaacacccagttcatgcaacatccccartgggaaaaaagacccccccagctctcttctgctgcagtttttctgctcacacctggatttccccatgcattcccacaaaaagtaattaaatggcatgygtgcaggctggacacgccaacaacaggtttcccacaatgccccacatggggccaagacctgtgtgcattactcaytgcrtttttttgcttattctctgctgtgtggtataaatatattgttgaaaatgtcaaaaagacctaaagatacccctgtgaatatcagtgataagaaaaagaggaagcatttatgtttatctatagcacagaaagtcaagttgttggagaaactggacagtggtgtaagtgtgaaacatcttacrgaagagtatggtgttggaatgaccaccatatatgacctgaagaaacagaaggataaactgttgaagttttatgctgaaagtgatgagcagatattaatgaaaaatagaaaaacacttcataaagctaaaaatgaagatcttgatcgtgtattgaaagagtggatccgtcagcgtcgcagtgaacacatgccacttaatggtatgctgatcatgaaacaagcaaagatatatcacaatgaactaaaaattgaggggaactgtgaatattcaacaggctggttgcagaaatttaagaaaagacatggcattaaatttttaaagacttgtggcaataaagcatctgctggtcatgaagcaacagagaagtttactggcaakttcagtaatgatgatgaacaagatggtaactttgaaggattcagtatgtcaagtgagaaaaaaataatgtctgacctccttacatatacaaaaaatatacatccagagactgtcagtaagctggaagaagaggatatcaaagatgtttttaacagtaataatgaggctccagttgttcattcattgtccaatggtgaagtaacaaaaatggttctgaatcaagatgatcatgatgataatgataatgaagatgatgttaacactgcagaaaaagtgcctatagacgacatggtaaaaatgtgtgatgggcttattaaaggactagagcagcatgcattcataacagagcaagaaatcatgtcagtttataaaatcaaagagagacttctaagacaaaaagcatcattaatgaggcagatgactctgaaagaaacatttaaaaaagccatccagaggaatgcttcttcctctctacaggacccacttcttggtccctcaactgcttctgatgcttcttctcacctaaaaataaaataaaatacagtgtacagtaaccttttagtcaaaacagcatcatacttggaaactgaaagcctactgttatttgttattgttgcttaacagctgatacagrtattctggtgacactactgtgctggcttacttaacctgaatacactatttttttcgttgt

SEQ ID NO: 4076 - DNA, 552 bp, Homo sapiens
ccatagaaatccagaaagtcgacaggttatagcactcagagttctggccactcttgtatagctcaggcaatgccaggagtgtttctgcagagatgtctttgtcaaggactccaaagacaagaggaggcaaggaggtaaagaagagattgaagaataycatctgccagtaatcaatcatggtggagctggagaaaccacagaagaactgataccagaagagcaggttgacgtagcacacgttcttgtagaggtagtacaccaccatcctggccaggcgcgagtaacaccagtggccatgcacgagcagcaacttcttgagatgcttaaagcgggtgatggcaaagtcgctggacatgacagcctgcatgccttcctgtccagatattccaattccaatatcagcagcttgaatcatgcttacatcatttgctccatcacctatggaaagggtcatgacgcgcaacttgtctcgcaccagcttgactatcatactcttctggagtggcgtggagcggcagcacaggacggaccgacaatactgggtcaattcca

SEQ ID NO: 4077 - DNA, 923 bp, Homo sapiens
ggggcgaacggaagccgggaaggcgattcatagctcgcggggtacgggcgcgcgtgcgcactccgcagcccgttcaggaccccggcgcgggcagggcgcscacgagctggctggctgcttgcacccacatccttctttctctgggacctggggtcgcggttacttgggctggccggcgaacccttgagtggcctggcggggagcgggcctcgcgcgcctggagggccctgtggaacgaagagaggcacacagcatggcagaaaaccgagagccccgcggtgctgtggaggctgaactggatccagtggaatacacccttaggaaaaggcttcccagccgcytgccccggagacccaatgacatttatgtcaacatgaagacggactttaaggcccagctggcccgctgccagaagctgctggacggaggggcccggggtcagaacgcgtgctctgagatctacattcacggcttgggcctggccatcaaccgcgccatcaacatcgcgctgcagctgcaggcgggcagcttcgggtccttgcaggtggctgccaatacctccaccgtggagcttgttgatgagctggagccagagaccgacasacgggagccactgactcggatccgcaacaactcagccatccacatccgagtctwcagggtmacacccaagtaattgaaaagacactcctccacttatcccctccgtgatatggctcttcgcatgctgagtactggacctcggaccagagccatgtaagaaaaggcctgttccctggaagcccaaaggactctgcattgagggtgggggtaattgtctcttggtgggcccagttagtkggccttcctgagtgtgtgtatgcggtctgtaactattgccatataaataaaaaatcctgttgcactagtgtcctgccatccca

SEQ ID NO: 4078 - DNA, 2652 bp, Homo sapiens
agagcgctcgccaacggccgacgctccaggccgtcccgcccagcgcagctgcacccaatcacaatgctcagatcgggaggtggagccaatcaggtccaaccaagaggaggggacaccggcactccactagcaggaaaacgggccgagggaccgcaagcagggggtgcctagtcctcgtcccccaaagaccaatcgtaagccagatacaggcgagtgactgtcaagaaggccaattagagcctccgaagggaatctggacctgcctcttctctgagggacggctctacctaccaatagcatgggcgagaaggcggtccctttgctaaggaggaggcgggtgaagagaagctgcccttcttgtggctcggagcttggggttgaagagaagagggggaaaggaaatccgatttccatccagttgttccccccagagctggtggagcatatcatctcattcctcccagtcagagaccttgttgycctcggccagacctgccgctacttccacgaagtgtgcgatggggaaggcgtgtggagacgcatctgtcgcagactcagtccgcgcctccaagatcaggacacgaagggcctgtatttccaggcatttggaggccgccgccgatgtctcagcaagagcgtggcccccttgctagcccacggctaccgccgcttcttgcccaccaaggatcacgtcttcattcttgactacgtggggaccctcttcttcctcaaaaatgccctggtctccaccctcggccagatgcagtggaagcgggcctgtcgctatgttgtgttgtgtcgtggagccaaggattttgcctcggacccaaggtgtgacacagtttaccgtaaatacctctacgtcttggccactcgggagccgcaggaagtggtgggtaccaccagcagccgggcctgtgactgtgttgaggtctatctgcagtctagtgggcagcgggtcttcaagatgacattccaccactcaatgaccttcaagcagatcgtgctggttggtcaggagacccagcgggctctactgctcctcacagaggaaggaaagatctactctttggtagtgaatgagacccagcttgaccagccacgctcctacacggttcagctggccctgaggaaggtgtcccactacctgcctcacctgcgcgtggcctgcatgacttccaaccagagcagcaccctctacgtcacagatcctattctgtgctcttggctacaaccaccttggcctggtggatgaatttggccgaatcttcatgcaaggaaataacagatacgggcagctaggaacaggggacaaaatggaccgaggggaacccacacagggaccctggccrtgtgtccccaggtttgttacctgcagcggcccatcaccctgtggtgcggcctcaaccactccctggtgctgagccagagctcagagttcagcaaggagctgctgggctgcggctgtggggctgggggccgcctcccaggctggcccaaggggagtgcctccttcgtcaagctccaagtcaaggtccctctgtgtgcctgtgccctctgtgccaccagggagtgcctatacatcctgtccagccacgacattgagcagcacgccccctatcgccacctgccagccagcagggtggtggggactcctgagcccagcctgggggccagagcaccccaggaccccggggggatggcccaggcctgcgaggagtacctcagccagatccacagttgccaaacgttgcaggaccgcayggagaagatgaaggagatcgtagggtggatgcccctgatggccgcacagaaggacttcttctgggaggccctggacatgctgcagagggctgaaggaggcgggggtggtgtagggcccccagcccctgagacctaatccccctcatgctagcctagtccctggaggagggagtccggccccaggccagggactaaggagcaatgaccattgtgcacatgcgtgtgggaaggggttgctagggggtggggacggctaaccagggtaagaatgttcagggggctgcccaggaggggcccccaacctgactatcatggacaagagatttgatggatagaataaaaggctgcagcgaggcctggtgtggaagccttgggggctgggagggacaggggcagggatggggtgggtgggtgcccggcttggtgggtgcaggagggcaggagcccaggcaggggcaggcagcacaagcagctccaggtctcaggtgcagcagagctgatgctgcctgaacccttcacattgttgtccactccctgctcccaagagcacacctggtcgtttggactgggaagttctggccctaccttctggaacaactctatgcacagatgctcttggctaccccactgggatcccctgcccactagacttgtccccatcctgaggcagcctgttcctcctgacccccgaaagcttcccacccatctcccttcggcctgaagccagcccccctcctctctcccttctgtttacctcccaggtttgggctstattttctactccttccacctcttcctgagtaacaaggacactcccttcatccacaccccatgcctcctgccttgcttcctgtaccttcaagtasttggaagaggtcatgggtgaga

SEQ ID NO: 4079 - DNA, 2793 bp, Homo sapiens
agagcgctcgccaacggccgacgctccaggccgtcccgcccagcgcagctgcacccaatcacaatgctcagatcgggaggtggagccaatcaggtccaaccaagaggaggggacaccggcactccactagcaggaaaacgggccgagggaccgcaagcagggggtgcctagtcctcgtcccccaaagaccaatcgtaagccagatacaggcgagtgactgtcaagaaggccaattagagcctccgaagggaatctggacctgcctcttctctgagggacggctctacctaccaatagcatgggcgagaaggcggtccctttgctaaggaggaggcgggtgaagagaagctgcccttcttgtggctcggagcttggggttgaagagaagagggggaaaggaaatccgatttccatccagttgttccccccagagctggtggagcatatcatctcattcctcccagtcagagaccttgttgycctcggccagacctgccgctacttccacgaagtgtgcgatggggaaggcgtgtggagacgcatctgtcgcagactcagtccgcgcctccaagatcagggttctggagtccggccctggaagagagctgccattctgaactacacgaagggcctgtatttccaggcatttggaggccgccgccgatgtctcagcaagagcgtggcccccttgctagcccacggctaccgccgcttcttgcccaccaaggatcacgtcttcattcttgactacgtggggaccctcttcttcctcaaaaatgccctggtctccaccctcggccagatgcagtggaagcgggcctgtcgctatgttgtgttgtgtcgtggagccaaggattttgcctcggacccaaggtgtgacacagtttaccgtaaatacctctacgtcttggccactcgggagccgcaggaagtggtgggtaccaccagcagccgggcctgtgactgtgttgaggtctatctgcagtctagtgggcagcgggtcttcaagatgacattccaccactcaatgaccttcaagcagatcgtgctggttggtcaggagacccagcgggctctactgctcctcacagaggaaggaaagatctactctttggtagtgaatgagacccagcttgaccagccacgctcctacacggttcagctggccctgaggaaggtgtcccactacctgcctcacctgcgcgtggcctgcatgacttccaaccagagcagcaccctctacgtcacagaccaggggggagtgtattttgaggtgcataccccaggggtgtatcgcgatctctttgggacccttcaagcctttgaccccctggaccagcagatgccgcttgctctctcactgcctgccaagatcctattctgtgctcttggctacaaccaccttggcctggtggatgaatttggccgaatcttcatgcaaggaaataacagatacgggcagctaggaacaggggacaaaatggaccgaggggaacccacacaggtttgttacctgcagcggcccatcaccctgtggtgcggcctcaaccactccctggtgctgagccagagctcagagttcagcaaggagctgctgggctgcggctgtggggctgggggccgcctcccaggctggcccaaggggagtgcctccttcgtcaagctccaagtcaaggtccctctgtgtgcctgtgccctctgtgccaccagggagtgcctatacatcctgtccagccacgacattgagcagcacgccccctatcgccacctgccagccagcagggtggtggggactcctgagcccagcctgggggccagagcaccccaggaccccggggggatggcccaggcctgcgaggagtacctcagccagatccacagttgccaaacgttgcaggaccgcayggagaagatgaaggagatcgtagggtggatgcccctgatggccgcacagaaggacttcttctgggaggccctggacatgctgcagagggctgaaggaggcgggggtggtgtagggcccccagcccctgagacctaatccccctcatgctagcctagtccctggaggagggagtccggccccaggccagggactaaggagcaatgaccattgtgcacatgcgtgtgggaaggggttgctagggggtggggacggctaaccagggtaagaatgttcagggggctgcccaggaggggcccccaacctgactatcatggacaagagatttgatggatagaataaaaggctgcagcgaggcctggtgtggaagccttgggggctgggagggacaggggcagggatggggtgggtgggtgcccggcttggtgggtgcaggagggcaggagcccaggcaggggcaggcagcacaagcagctccaggtctcaggtgcagcagagctgatgctgcctgaacccttcacattgttgtccactccctgctcccaagagcacacctggtcgtttggactgggaagttctggccctaccttctggaacaactctatgcacagatgctcttggctaccccactgggatcccctgcccactagacttgtccccatcctgaggcagcctgttcctcctgacccccgaaagcttcccacccatctcccttcggcctgaagccagcccccctcctctctcccttctgtttacctcccaggtttgggctstattttctactccttccacctcttcctgagtaacaaggacactcccttcatccacaccccatgcctcctgccttgcttcctgtaccttcaagtasttggaagaggtcatgggtgaga

SEQ ID NO: 4080 - DNA, 4370 bp, Homo sapiens
taatgacgggaggaagaaaggcacaagcgctgagaaactgcaaaggctgtgggattggggttaccagagggtgcagtgacaatggggtaggagtggggtgctagtcagaaagttcagagtaggggtggttggaggcagcgttgagaaggagcaagaagtgtcagggtggtgatggcgtcttagaagatctccaggttttgggagaagatgggtgtatgggttaccacaataggactagactaatacaagggttcagtctattgtgccacgttcttccaggaggataaactccggagccaatgaactggagccaagtgggagagtccgcctctaagggattaaagggtctcctttcactaatcgatctcgccctattcctttcgttgattggctgagaattccaatccgtcgaggaagcgtagcgttgcggccaattgacgtggcgttactaggcgtgtcgcatcactgaggcgggagccaggccgcaagcgaatttcctgattggctgtgatctgcgggttgctggggagaggcscggagaggcgggcgagagtccgcagggcaggcgctgattggctgaggtgggagcagcttcccttccgatgattcggctcttctcggctcagtctcagcgaagcgtctgcgaccgtcgtttgagtcgtcgctgccgctgccgctgccrctgccactgccacctcgcggatcaggagccagcgttgttcgcccgacgcctcgctgccggtgggaggaagcgagagggaagccgcttgcgggtttgtcgccgctgctcgcccaccgcctggaagagccgagccccggcccagtcggtcgcttgccaccgctcgtagccgttacccgcgggccgccacagccgccggccgggagaggcgcgcgccatggcttctggagccgattcaaaaggtgatgacctatcaacagccattctcaaacagaagaaccgtcccaatcggttaattgttgatgaagccatcaatgaggacaacagtgtggtgtccttgtcccagcccaagatggatgaattgcagttgttccgaggtgacacagtgttgctgaaaggaaagaagagacgagaagctgtttgcatcgtcctttctgatgatacttgttctgatgagaagattcggatgaatagagttgttcggaataaccttcgtgtacgcctaggggatgtcatcagcatccagccatgccctgatgtgaagtacggcaaacgtatccatgtgctgcccattgatgacacagtggaaggcattactggtaatctcttcgaggtataccttaagccgtacttcctggaagcgtatcgacccatccggaaaggagacatttttcttgtccgtggtgggatgcgtgctgtggagttcaaagtggtggaaacagatcctagcccttattgcattgttgctccagacacagtgatccactgcgaaggggagcctatcaaacgagaggatgaggaagagtccttgaatgaagtagggtatgatgacattggtggctgcaggaagcagctagctcagataaaggagatggtggaactgcccctgagacatcctgccctctttaaggcaattggtgtgaagcctcctagaggaatcctgctttacggacctcctggaacaggaaagaccctgattgctcgagctgtagcaaatgagactggagccttcttcttcttgatcaatggtcctgagatcatgagcaaattggctggtgagtctgagagcaaccttcgtaaagcctttgaggaggctgagaagaatgctcctgccatcatcttcattgatgagctagatgccatygctcccaaaagagagaaaactcatggcgaggtggagcggcgcattgtatcacagttgttgaccctcatggatggcctaaagcagagggcacatgtgattgttatggcagcaaccaacagacccaacagcattgacccagctctacggcgatttggtcgctttgacagggaggtagatattggaattcctgatgctacaggacgcttagagattcttcagatccataccaagaacatgaagctggcagatgatgtggacctggaacaggtagccaatgagactcacgggcatgtgggtgctgacttagcagccctgtgctcagaggctgctctgcaagccatccgcaagaagatggatctcattgacctagaggatgagaccattgatgccgaggtcatgaactctctagcagttactatggatgacttccggtgggccttgagccagagtaacccatcagcactgcgggaaaccgtggtagaggtgccacaggtaacctgggaagacatcgggggcctagaggatgtcaaacgtgagctacaggagctggtccagtatcctgtggagcacccagacaaattcctgaagtttggcatgacaccttccaagggagttctgttctatggacctcctggctgtgggaaaactttgttggccaaagccattgctaatgaatgccaggccaacttcatctccatcaagggtcctgagctgctcaccatgtggtttggggagtctgaggccaatgtcagagaaatctttgacaaggcccgccaagctgccccctgtgtgctattctttgatgagctggattcgattgccaaggctcgtggaggtaacattggagatggtggtggggctgctgaccgagtcatcaaccagatcctgacagaaatggatggcatgtccacaaaaaaaaatgtgttcatcattggcgctaccaaccggcctgacatcattgatcctgccatcctcagacctggccgtcttgatcagctcatctacatcccacttcctgatgagaagtcccgtgttgccatcctcaaggctaacctgcgcaagtccccagttgccaaggatgtggacttggagttcctggctaaaatgactaatggcttctctggagctgacctgacagagatttgccagcgtgcttgcaagctggccatccgtgaatccatcgagagtgagattaggcgagaacgagagaggcagacaaacccatcagccatggaggtagaagaggatgatccagtgcctgagatccgtcgagatcactttgaagaagccatgcgctttgcgcgccgttctgtcagtgacaatgacattcggaagtatgagatgtttgcccagacccttcagcagagtcggggctttggcagcttcagattcccttcagggaaccagggtggagctggccccagtcagggcagtggaggcggcacaggtggcagtgtatacacagaagacaatgatgatgacctgtatggctaagtggtggtggccagcgtgcagtgagctggcctgcctggaccttgttccctgggggtgggggcgcttgcccaggagagggaccaggggtgcgcccacagcctgctccattctccagtytgaacagttcagctacagtctgactctggacagggkgtttctgttgcaaaaatacaaaacaaaagcgataaaataaaagcgattttcatttggtaggcggagagtgaattaccaacagggaattgggccttgggcctatgccatttctgttgtagtttggggcagtgcaggggacctgtgtggggtgtgaaccaaggcactactgccacctgccmcagtaaagcatytgcacttgactcaatgctgcccgagccctcccttccccctatccaacctgggtaggtgggtaggggccmcagttgctggatgtttatataragagtaggttgatttattttacatgcttttgagttaatgttggaaaactaatcacaagcagtttytaaaccaaaaaatgacatgttgtaaaaggacaataaacgttgggtcaaaatggagcctgagtcctgggccctgtgcctgcttcttttcctgggaacagccttgggctacccaccactcccaaggcattcttccaaatgtgaaatcctggaagtaagattgcaccttcttcctctcctgatcaacatcggtatgatgtctcctgttgcctcaccctttgtctgcagtatcactggataggactggtggaaagggagcagcctgacagagctccaaatgtggagaatatggcatccctccacctatatttgatgtggacggtaaggctaggcctgcaggatcccttatcctgaccaaagactgtgttggggtgccatttgaaaatcgcagggttgcaaaagaatacaatcttacttgcaggtggatattctctatactctcttttaatgcatctaaaaatcccaaacatcccctggttggtgatcacttacagttgtgtccacctttattttatgtactttgattaaaaaaaaaaaactttttgttaatataaaa

SEQ ID NO: 4081 - DNA, 4434 bp, Homo sapiens
taatgacgggaggaagaaaggcacaagcgctgagaaactgcaaaggctgtgggattggggttaccagagggtgcagtgacaatggggtaggagtggggtgctagtcagaaagttcagagtaggggtggttggaggcagcgttgagaaggagcaagaagtgtcagggtggtgatggcgtcttagaagatctccaggttttgggagaagatgggtgtatgggttaccacaataggactagactaatacaagggttcagtctattgtgccacgttcttccaggaggataaactccggagccaatgaactggagccaagtgggagagtccgcctctaagggattaaagggtctcctttcactaatcgatctcgccctattcctttcgttgattggctgagaattccaatccgtcgaggaagcgtagcgttgcggccaattgacgtggcgttactaggcgtgtcgcatcactgaggcgggagccaggccgcaagcgaatttcctgattggctgtgatctgcgggttgctggggagaggcscggagaggcgggcgagagtccgcagggcaggcgctgattggctgaggtgggagcagcttcccttccgatgattcggctcttctcggctcagtctcagcgaagcgtctgcgaccgtcgtttgagtcgtcgctgccgctgccgctgccrctgccactgccacctcgcggatcaggagccagcgttgttcgcccgacgcctcgctgccggtgggaggaagcgagagggaagccgcttgcgggtttgtcgccgctgctcgcccaccgcctggaagagccgagccccggcccagtcggtcgcttgccaccgctcgtagccgttacccgcgggccgccacagccgccggccgggagaggcgcgcgccatggcttctggagccgagtgagtgtgcgcgcgccgttcgcttgctgcggcggcgcgcaccgggaccagccgcgcaggttcaaaaggtgatgacctatcaacagccattctcaaacagaagaaccgtcccaatcggttaattgttgatgaagccatcaatgaggacaacagtgtggtgtccttgtcccagcccaagatggatgaattgcagttgttccgaggtgacacagtgttgctgaaaggaaagaagagacgagaagctgtttgcatcgtcctttctgatgatacttgttctgatgagaagattcggatgaatagagttgttcggaataaccttcgtgtacgcctaggggatgtcatcagcatccagccatgccctgatgtgaagtacggcaaacgtatccatgtgctgcccattgatgacacagtggaaggcattactggtaatctcttcgaggtataccttaagccgtacttcctggaagcgtatcgacccatccggaaaggagacatttttcttgtccgtggtgggatgcgtgctgtggagttcaaagtggtggaaacagatcctagcccttattgcattgttgctccagacacagtgatccactgcgaaggggagcctatcaaacgagaggatgaggaagagtccttgaatgaagtagggtatgatgacattggtggctgcaggaagcagctagctcagataaaggagatggtggaactgcccctgagacatcctgccctctttaaggcaattggtgtgaagcctcctagaggaatcctgctttacggacctcctggaacaggaaagaccctgattgctcgagctgtagcaaatgagactggagccttcttcttcttgatcaatggtcctgagatcatgagcaaattggctggtgagtctgagagcaaccttcgtaaagcctttgaggaggctgagaagaatgctcctgccatcatcttcattgatgagctagatgccatygctcccaaaagagagaaaactcatggcgaggtggagcggcgcattgtatcacagttgttgaccctcatggatggcctaaagcagagggcacatgtgattgttatggcagcaaccaacagacccaacagcattgacccagctctacggcgatttggtcgctttgacagggaggtagatattggaattcctgatgctacaggacgcttagagattcttcagatccataccaagaacatgaagctggcagatgatgtggacctggaacaggtagccaatgagactcacgggcatgtgggtgctgacttagcagccctgtgctcagaggctgctctgcaagccatccgcaagaagatggatctcattgacctagaggatgagaccattgatgccgaggtcatgaactctctagcagttactatggatgacttccggtgggccttgagccagagtaacccatcagcactgcgggaaaccgtggtagaggtgccacaggtaacctgggaagacatcgggggcctagaggatgtcaaacgtgagctacaggagctggtccagtatcctgtggagcacccagacaaattcctgaagtttggcatgacaccttccaagggagttctgttctatggacctcctggctgtgggaaaactttgttggccaaagccattgctaatgaatgccaggccaacttcatctccatcaagggtcctgagctgctcaccatgtggtttggggagtctgaggccaatgtcagagaaatctttgacaaggcccgccaagctgccccctgtgtgctattctttgatgagctggattcgattgccaaggctcgtggaggtaacattggagatggtggtggggctgctgaccgagtcatcaaccagatcctgacagaaatggatggcatgtccacaaaaaaaaatgtgttcatcattggcgctaccaaccggcctgacatcattgatcctgccatcctcagacctggccgtcttgatcagctcatctacatcccacttcctgatgagaagtcccgtgttgccatcctcaaggctaacctgcgcaagtccccagttgccaaggcaggatgtggacttggagttcctggctaaaatgactaatggcttctctggagctgacctgacagagatttgccagcgtgcttgcaagctggccatccgtgaatccatcgagagtgagattaggcgagaacgagagaggcagacaaacccatcagccatggaggtagaagaggatgatccagtgcctgagatccgtcgagatcactttgaagaagccatgcgctttgcgcgccgttctgtcagtgacaatgacattcggaagtatgagatgtttgcccagacccttcagcagagtcggggctttggcagcttcagattcccttcagggaaccagggtggagctggccccagtcagggcagtggaggcggcacaggtggcagtgtatacacagaagacaatgatgatgacctgtatggctaagtggtggtggccagcgtgcagtgagctggcctgcctggaccttgttccctgggggtgggggcgcttgcccaggagagggaccaggggtgcgcccacagcctgctccattctccagtytgaacagttcagctacagtctgactctggacagggkgtttctgttgcaaaaatacaaaacaaaagcgataaaataaaagcgattttcatttggtaggcggagagtgaattaccaacagggaattgggccttgggcctatgccatttctgttgtagtttggggcagtgcaggggacctgtgtggggtgtgaaccaaggcactactgccacctgccmcagtaaagcatytgcacttgactcaatgctgcccgagccctcccttccccctatccaacctgggtaggtgggtaggggccmcagttgctggatgtttatataragagtaggttgatttattttacatgcttttgagttaatgttggaaaactaatcacaagcagtttytaaaccaaaaaatgacatgttgtaaaaggacaataaacgttgggtcaaaatggagcctgagtcctgggccctgtgcctgcttcttttcctgggaacagccttgggctacccaccactcccaaggcattcttccaaatgtgaaatcctggaagtaagattgcaccttcttcctctcctgatcaacatcggtatgatgtctcctgttgcctcaccctttgtctgcagtatcactggataggactggtggaaagggagcagcctgacagagctccaaatgtggagaatatggcatccctccacctatatttgatgtggacggtaaggctaggcctgcaggatcccttatcctgaccaaagactgtgttggggtgccatttgaaaatcgcagggttgcaaaagaatacaatcttacttgcaggtggatattctctatactctcttttaatgcatctaaaaatcccaaacatcccctggttggtgatcacttacagttgtgtccacctttattttatgtactttgattaaaaaaaaaaaactttttgttaatataaaa

SEQ ID NO: 4082 - DNA, 1127 bp, Homo sapiens
atcaagcaggtgtacatatccctgcctcagggtgagaaagtccgggtcatgtatatctggatcgatggtactggaaaaggactgcactgcaagacctggaccctggacagtgagcccaatgacatgtatctcgttcctgctgctatgtttaaggaccctttccgtaaggatcctaacaagctggtattgtgtgaagttttcaagtacaatcgaaagcctgcagagaccaatttgaggcacacctgtaaacggataatcgacgtgatgagcaaccagcacccctggtttggcatggagcaggaatataccctcatggggacaaatggccacccctttggttggccttccagtggcttcccggggcctcagactccatattactgcagtgtgggagcagacagaacctatggcagggacatcgtggaggctcattacagcgcctgcttgtatgctggagtcaggattgtggggactaatgccaatcatgcctccccagtgagaatttcaaattggaccctgtgaaggaatcagcatgggagatcatctctgggtggctcgtttcatcttgcatcrtgtgtgtgaagactttgragtgatagcaacctttgatcctaagcccattcctgggaactggaatggtgcaggctgccataccaactttagcaccaaggccatgtgggaggagaatggtctgaaatacactgsggaggccatcaagaaattaagcaagcracaccagtaccacatctgtgcctgtgatcccaaaggaggcctggacaaggcccgacacctaactggattccatgaaacctccaacatcaacaacttttctgctggtgtagccaatcgtagcgccagcatatgcattccctggactgtcggccaggagaagaagggttactttgaagaccatcacccctctrccaactgtgaccccttttcggtgacagaagccctcatccgcacgtgtcttctcaatgaaactggtgatgagcccttccagtacaaaaactaagtggactagacctccagctgtcgagcccctcctagttcttcatcccactccaactcttccccctctcccagttgtcccaattgtaactcgaagggtgaataccaaggtcttt

SEQ ID NO: 4083 - DNA, 1259 bp, Homo sapiens
acatggcggccttctgtgcccgccccctccgctaacsggcacgttactccgtccgaacgcagtagacgaaggcggcggmgatggcggcggggatagtggcttstcgcagactccgcgacctactgacccggcgactgacaggctccaactacccgggactcagtattagccttcgcctcactggctcctctgcacaagaggmggcttccggagtagccctcggtgaagccccagaccacagctrtgagtcccttcgtgtgacgtctgcgcagaaacatgttctgcatgtccagctcaaccggcccaacaagaggaatgccatgaacaaggtcttctggagagagatggtagagtgcttcaacaagatttcgagagacgctgactgtcgggcggtggtgatctctggtgcaggaaaaatgttcactgcaggtattgacctgatggacatggcttcrgacatcctgcagcccaaaggagatgatgtggcccggatcagctggtacctccgtgacatcatcactcgataccaggagaccttcaacgtcatcgagaggtgccccaagcccgtgattgctgccgtccatgggggctgcattggcggaggtgtggaccttgtcaccgcctgtgacatccggtactgtgcccaggatgctttcttccaggtgaaggaggtggacgtgggtttggctgccgatgtaggaacactgcagcgcctgcccaaggtcatcrggaaccagagcctggtcaacgagctggccttcaccgcccgcaagatgatggctgacgaggcyctgggcagtgggctggtcagccgggtgttcccagacaaagaggtcatgctggatgctgccttagcgctggcggccgagatttccagcaagagccccgtggyggtgcagagcaccaaggtcaacctgctgtattcccgcgaccattcggtggccgagagcctcaactacgtggcgtcctggaacatgagcatgctgcagacccaagacctcgtgaagtcggtccaggccacgactgagaacaaggaactgaaaaccgtcaccttctccaagctctgagagccctcgcgtcccaggccccagccagggggccggccttgtcccgcckcatccacagaaagggaggatgggcgatgacagttgtttctatgccttctgacccagtttcccagtttataactttatgacaatgagtttctcaagcccaaggccttatcttcaccccacaaacaataaagcaaagtaaagaac

SEQ ID NO: 4084 - DNA, 2071 bp, Homo sapiens
tgcctcgcgtcactgaagaggcgggacacagacgacgattgggcgacgaaggactctatcgcggtcaactttcctcaggatctgattggctcgtcacggtcaggttcgctgccttgcaattggtctaaacgcggagtgggcgggacgaagtgccgccttgtycccggtccaagatggctgcgtccatggcgcggcgcttgtggcctttgctgactcgtcgggggttccggccccggggaggctgcatctccaacgatagtccaaggagaagtttcrctacagagaaacgaaaccggaacctcctgtacgagtatgcgcgcgagggctacagcgcactccctcagctggacatagagcggttctgcgcatgcccagaagaggccgcacacgccctggagctccgcaagggggagctgcgctyggcggacctgcccgcgatcatctcgacatggcaggagctgaggcagctgcaggagcagatccggagcctggargaagagaaggcagctgtgactgaggcagtgcgggccctgctggcaaaccaggacagtggtgaagtgcarcaggaccccaagtaccagggtctgcgggcacgtggccgggagatccggaaggagcttgttcacctgtaccccagggaggcccagcttgaggagcagttctacctgcaggcgctgaagctgcccaaccagacccacccagacgtgcccgtcggggatgagagccaggctcgagtgctccacatggtcggagacaagccagttttctccttccaacctcggggccacctggaaattggcgagaaactcgacatcatccgtcagaagcgcctgtcccacgtgtctggccaccggtcctattacctgcgyggggctggagccctcctgcagcacggcctggtcaacttcacattcaacaagcttctccgccggggcttcacccccatgacggtgccagaccttctccgcggagcagtgtttgaaggctgtgggatgacaccaaatgccaacccatcccaaatttacaacatcgaccctgcccgcttcaaagatctcaacctggctggaacagcggaggtggggcttgcaggctacttcatggaccacaccgtggccttcagggacctgccagtcaggatggtttgctccagcacctgctaccgggcagagacaaacacgggacaggaaccccgggggctgtatcgagtacaccacttcaccaaggctggtatgtttggggtgacaggccctgggctggagcagagctcacagctgctggaggagttcctgtcccttcagatggagatcttgacagagctgggcttgcacttccgggtcctggatatgcccacccaagaactgggcctccccgcctaccgcaagtttgacattgaggcctggatgccaggccgaggccgctttggagaggtcaccagtgcttccaactgcacagacttccagagccgccgcctccacatcatgttccagaccgaggctggggagctgcagtttgcccacacggtgaacgccaccgcctgtgctgtcccccgccttctcatcgcgctcctggagagtaaccagcagaaggacggctcagtgctcgtgccccctgccctccagtcctacctcggcactgatcggatcacagcccctacccacgtgcctctccagtacatcggccccaaccagccccggaagcctgggctgcctggccagcctgctgtaagctaagaacccacccacagcagccctcgggggtgtcactgcttcctggagttcaggagaccccggacacctgggacctgtgttsctgagcccgtcctgacatckgtgttcttcctgtcagctccacgcccgggcccctggaccacggggtccacctctcctctgtccttgctgcctcagagtcagtcactgaccctgttatcattgagggtcccagtgggaagcaggacgtctgggctttacggttctagggacaggagaagcagaggaagaggcttccatccctccttccttctttcctcctacagtgctgagcaaaaagtccccaataaatggtcaggacaaag

SEQ ID NO: 4085 - DNA, 2000 bp, Homo sapiens
tgcctcgcgtcactgaagaggcgggacacagacgacgattgggcgacgaaggactctatcgcggtcaactttcctcaggatctgattggctcgtcacggtcaggttcgctgccttgcaattggtctaaacgcggagtgggcgggacgaagtgccgccttgtycccggtccaagatggctgcgtccatggcgcggcgcttgtggcctttgctgactcgtcgggggttccggccccggggaggctgcatctccaacgatagtccaaggagaagtttcrctacagagaaacgaaaccggaacctcctgtacgagtatgcgcgcgagggctacagcgcactccctcagctggacatagagcggttctgcgcatgcccagaagaggccgcacacgccctggagctccgcaagggggagctgcgctyggcggacctgcccgcgatcatctcgacatggcaggagctgaggcagctgcaggagcagatccggagcctggargaagagaaggcagctgtgactgaggcagtgcgggccctgctggcaaaccaggacagtggtgaagtgcarcagggaggcccagcttgaggagcagttctacctgcaggcgctgaagctgcccaaccagacccacccagacgtgcccgtcggggatgagagccaggctcgagtgctccacatggtcggagacaagccagttttctccttccaacctcggggccacctggaaattggcgagaaactcgacatcatccgtcagaagcgcctgtcccacgtgtctggccaccggtcctattacctgcgyggggctggagccctcctgcagcacggcctggtcaacttcacattcaacaagcttctccgccggggcttcacccccatgacggtgccagaccttctccgcggagcagtgtttgaaggctgtgggatgacaccaaatgccaacccatcccaaatttacaacatcgaccctgcccgcttcaaagatctcaacctggctggaacagcggaggtggggcttgcaggctacttcatggaccacaccgtggccttcagggacctgccagtcaggatggtttgctccagcacctgctaccgggcagagacaaacacgggacaggaaccccgggggctgtatcgagtacaccacttcaccaaggctggtatgtttggggtgacaggccctgggctggagcagagctcacagctgctggaggagttcctgtcccttcagatggagatcttgacagagctgggcttgcacttccgggtcctggatatgcccacccaagaactgggcctccccgcctaccgcaagtttgacattgaggcctggatgccaggccgaggccgctttggagaggtcaccagtgcttccaactgcacagacttccagagccgccgcctccacatcatgttccagaccgaggctggggagctgcagtttgcccacacggtgaacgccaccgcctgtgctgtcccccgccttctcatcgcgctcctggagagtaaccagcagaaggacggctcagtgctcgtgccccctgccctccagtcctacctcggcactgatcggatcacagcccctacccacgtgcctctccagtacatcggccccaaccagccccggaagcctgggctgcctggccagcctgctgtaagctaagaacccacccacagcagccctcgggggtgtcactgcttcctggagttcaggagaccccggacacctgggacctgtgttsctgagcccgtcctgacatckgtgttcttcctgtcagctccacgcccgggcccctggaccacggggtccacctctcctctgtccttgctgcctcagagtcagtcactgaccctgttatcattgagggtcccagtgggaagcaggacgtctgggctttacggttctagggacaggagaagcagaggaagaggcttccatccctccttccttctttcctcctacagtgctgagcaaaaagtccccaataaatggtcaggacaaag

SEQ ID NO: 4086 - DNA, 1947 bp, Homo sapiens
tgcctcgcgtcactgaagaggcgggacacagacgacgattgggcgacgaaggactctatcgcggtcaactttcctcaggatctgattggctcgtcacggtcaggttcgctgccttgcaattggtctaaacgcggagtgggcgggacgaagtgccgccttgtycccggtccaagatggctgcgtccatggcgcggcgcttgtggcctttgctgactcgtcgggggttccggccccggggaggctgcatctccaacgatagtccaaggagaagtttcrctacagagaaacgaaaccggaacctcctgtacgagtatgcgcgcgagggctacagcgcactccctcagctggacatagagcggttctgcgcatgcccagaagaggccgcacacgccctggagctccgcaagggggagctgcgctyggcggacctgcccgcgatcatctcgacatggcaggagctgaggcagctgcaggagcagatccggagcctggargaagagaaggcagctgtgactgaggcagtgcgggccctgctggcaaaccaggacagtggtgaagtgcarcaggaccccaagtaccagggtctgcgggcacgtggccgggagatccggaaggagcttgttcacctgtaccccagggaggcccagcttgaggagcagttctacctgcaggcgctgaagctgcccaaccagacccacccagacgtgcccgtcggggatgagagccaggctcgagtgctccacatggtcggagacaagccagttttctccttccaacctcggggccacctggaaattggcgagaaactcgacatcatccgtcagaagcgcctgtcccacgtgtctggccaccggtcctattacctgcgyggggctggagccctcctgcagcacggcctggtcaacttcacattcaacaagcttctccgccggggcttcacccccatgacggtgccagaccttctccgcggagcagtgtttgaaggctgtgggatgacaccaaatgccaacccatcccaaatttacaacatcgaccctgcccgcttcaaagatctcaacctggctggaacagcggaggtggggcttgcaggctacttcatggaccacaccgtggccttcagggacctgccagtcaggatggtttgctccagcacctgctaccgggcagagacaaacacgggacaggaaccccgggggctgtatcgagtacaccacttcaccaaggctggtatgtttggggtgacaggccctgggctggagcagagctcacagctgctggaggagttcctgtcccttcagatggagatcttgacagagctgggcttgcacttccgggtcctggatatgcccacccaagaactgggcctccccgcctaccgcaagtttgacattgaggcctggatgccaggccgaggccgctttggagaggtcaccagtgcttccaactgcacagacttccagagccgccgcctccacatcatgttccagaccgaggctggggagctgcagtttgcccacacggtgaacgccaccgcctgtgctgtcccccgccttctcatcgcgctcctggagagtaaccagcagaaggacggctcagtgctcgtgccccctgccctccagtcctacctcggcactgatcggatcacagcccctacccacgtgcctctccagtacatcggccccaaccagccccggaagcctgggctgcctggccagcctgctctccacgcccgggcccctggaccacggggtccacctctcctctgtccttgctgcctcagagtcagtcactgaccctgttatcattgagggtcccagtgggaagcaggacgtctgggctttacggttctagggacaggagaagcagaggaagaggcttccatccctccttccttctttcctcctacagtgctgagcaaaaagtccccaataaatggtcaggacaaag

SEQ ID NO: 4087 - DNA, 3173 bp, Homo sapiens
acggcagcgcgccggccgcgagagagggccccgtcgcgaccgcgtccccttgggtccttgatcctgagctgaccgggtagccatggccttgcggctcctgaagctggcagcgacgtccgcgtccgcccgggtcgtggcggcgggcgcccagcgcgtgagaggaattcatagcagtgtgcagtgcaarctgcgctatggaatgtggcatttcctacttggggataaagcaagcaaaagactgacagaacgcagcagagtgataactgtagatggcartatatgtactggaaaaggcaaacttgcaaaagaaatagcagagaaactaggcttcaagcactttcctgaagcggggattcattatccagacagtaccacaggagatgggaagcccctcgccaccgactataatggcaactgtagtttggagaaattttacgatgatccgagaagcaatgatggcaacagttaccgcctgcagtcctggttgtacagcagtcgcctgctgcagtactcagatgccttggagcacttgctgaccacaggacaaggtgttgtgttggagcgctccatcttcagtgactttgtgttcctggaggcgatgtacaaccagggattcatccgaaagcagtgtgtggaccactacaacgaggtgaagagcgtcaccatctgcgattacctgcccccccacctggtgatttacatcgatgtgcccgttccagaggtccagaggcggattcagaagaaaggagatccacatgaaatgaagatcacctctgcctatctacaggacattragaatgcctataagaaaacctttctccctgagatgagtgaaaaatgtgaggttttacartattctgcaagggaagctcaagattcaaaaaaggtggtagaggacattgaatacctgaagttcgataaagggccgtggctcaagcaggacaatcgcactttataccacctgcgattactggttcaggataagtttgaggtgctgaattacacaagcattcctatctttctcccggaagtcaccattggagctcatcagactgaccgtgtcttacatcagttcagagagctgccgggccgcaagtacagccctgggtacaacaccgaggtgggagacaagtggatctggctgaagtgaacgggccgccttctgctccagctgcatcacagtgatggccaagctgcatcagccgcactctcctggacgccrtatagctttaagatcgggggagggtaaataatgcaaaaattgcacagtggaagaaggggtctcacaaaaagcaatccatcctgtagtataggtaatggagttgggggaagcagcttccattctggatgtttggaaccctttagctttgttttggaatggcccaccattctcactggaaaacagtggtctgctgtgaaaggccagctctcggcagcccctgtggtttcagcgctgcygctctgtgtcattcaggttgtgcacattgtttttcttctgacttccagaaataaaagtgtttccatgggaatttccccatcgtacgtctatgtgcgtgcgggcacrtcgaaactgcacacgtgcacacacgctgctctgggccctgtttggtgtggtgtggtttaattgaggcttacattatgctgaagagtttttctaaaggcctactgtatttattttagtaatgtgctacattagagtagaaaaaataagaacgtgaagaagaaatagcaaaaggagaaaattaccacagatttacagaacaatatgttttaagagagaygttgagaaagattcacgtggccgtcctcagcgtctcaaactcctttgaagggagatttgagcttaggctgttgatgacataagatgcaaaagcaaaataatatactctctttattacccagaaaatcaagttgccagtcaaaactgagaaatgagaaagaaaatcagatttctttattcatctctgttgaagcctagaaaaccaaaacaagctggttgtggttcagcatcatggtttaggaatcaagctgtcagttgtgagtcctactgaactgtgggttttccactgtaaagctccactgtgtccattaggaatcaggctgccagttgtgagtcctactgaactgtgggttttccactgtaaagctccactgtgtccaatatggtagctcctagccacatgtgggtattgaaatttaaatgagctaaaatgtaatagagtttaaaattgggttccttggttgcactggccatagttcaggcactccacagccgcctgtgggcagtagttccagtgctggtgcagaggacgatgctctgctccccgcggaagctctaccaggcctcgctgctgcggagcatgcgaagaagatgcacactccttccctccttgcgtccgcctgcctttttccctctccccttccttccctccttctttcctcctccttccctcccttcctttcttccttccatctgtccttgttttcctcccttcccttcctccctgcctctttccttccctccttctcttccttccttccgtctgtccttgttttcctccctgcctctttccttccctccttctcttccttccttccttccgtctgtccttgttttcctcccttcccttcctccctgcctccttccttgttttaagaatttgaaaataaagtttcccaggagttttgaattggagtcgagatttaagtggctgaagttttgcatttcactaggaaaccaacagctttaatcatgaaatgaaagcacagctgggcattgggccagtcacagagtgtcttttgctctgagcacttcacaaacccattgtggaggggaggaaagaaaaagaaagccatctttaattatcttagctgttcctaatgtctttggctgcaaagagctagctgtttccttcaaccttggtggttgcacgggtagtgtcctcagcagtgagagggcaggtctgccctgtggtcaggattgcccttgtgaggggcagagctctccaaccatgcagggctccgtgtcggcatggtgtggactcgggtgctctgatcatcccctgtgtttgcgtctgaccctgtgtggttgcattcccttgatggartgggaagtatgtaatttgtagtgctgaggacattcgtctgtttgattttctggtgttttcaatgac

SEQ ID NO: 4088 - DNA, 743 bp, Homo sapiens
acggcagcgcgccggccgcgagagagggccccgtcgcgaccgcgtccccttgggtccttgatcctgagctgaccgggtagccatggccttgcggctcctgaagctggcagcgacgtccgcgtccgcccgggtcgtggcggcgggcgcccagcgcgtgagaggaattcatagcagtgtgcagtgcaarctgcgctatggaatgtggcatttcctacttggggataaagcaagcaaaagactgacagaacgcagcagagtgataactgtagatggcartatatgtactggaaaaggcaaacttgcaaaagaaatagcagagaaactaggcttcaagcactttcctgaagcggggattcattatccagacagtaccacaggagatgggaagcccctcgccaccgactataatggcaactgtagtttggagaaattttacgatgatccgagaagcaatgatggcaacagttaccgcctgcagtcctggttgtacagcagtcgcctgctgcagtactcagatgccttggagcacttgctgaccacaggacaaggtgttgtgttggagcgctccatcttcagtgactttgtgttcctggaggcgatgtacaaccagggattcatccgaaagcagtgtgagtcagcattgcagacccacttctgggtgtgtggtgcgactttgcaagggctgtgatagactcaccttgcacttactgtgtttatgaatgtctgttagatagatgaataaa

SEQ ID NO: 4089 - DNA, 1369 bp, Homo sapiens
acggcagcgcgccggccgcgagagagggccccgtcgcgaccgcgtccccttgggtccttgatcctgagctgaccgggtagccatggccttgcggctcctgaagctggcagcgacgtccgcgtccgcccgggtcgtggcggcgggcgcccagcgcgtgagaggaattcatagcagtgtgcagtgcaarctgcgctatggaatgtggcatttcctacttggggataaagcaagcaaaagactgacagaacgcagcagagtgataactgtagatggcartatatgtactggaaaaggcaaacttgcaaaagaaatagcagagaaactaggcttcaagcactttcctgaagcggggattcattatccagacagtaccacaggagatgggaagcccctcgccaccgactataatggcaactgtagtttggagaaattttacgatgatccgagaagcaatgatggcaacagttaccgcctgcagtcctggttgtacagcagtcgcctgctgcagtactcagatgccttggagcacttgctgaccacaggacaaggtgttgtgttggagcgctccatcttcagtgactttgtgttcctggaggcgatgtacaaccagggattcatccgaaagcagtgtgagtcagcattgcagacccacttctggactggggtggctggagccagtggaaagctggaatctgggagctcagaggaagtactgttgattaatgaaagaggaggccgaagcaagccaggtgtggaccactacaacgaggtgaagagcgtcaccatctgcgattacctgcccccccacctggtgatttacatcgatgtgcccgttccagagccacatgaaatgaagatcacctctgcctatctacaggacattragaatgcctataagaaaacctttctccctgagatgagtgaaaaatgtgaggttttacartattctgcaagggaagctcaagattcaaaaaaggtggtagaggacattgaatacctgaagttcgataaagggccgtggctcaagcaggacaatcgcactttataccacctgcgattactggttcaggataagtttgaggtgctgaattacacaagcattcctatctttctcccggaagtcaccattggagctcatcagactgaccgtgtcttacatcagttcagagagcgattagattggactgtgtgttttggggaggaatccacagaggtgaagcatcaggggcacttgctgtcagtgcagcctggcaccrtggccctgaccgtgggctcctggctgaggtcgtgcttgctgggtctccactggaagctgctcttcctctttccagaaagccccatgcacaccacagcctttatgttcctttgt

SEQ ID NO: 4090 - DNA, 3119 bp, Homo sapiens
acggcagcgcgccggccgcgagagagggccccgtcgcgaccgcgtccccttgggtccttgatcctgagctgaccgggtagccatggccttgcggctcctgaagctggcagcgacgtccgcgtccgcccgggtcgtggcggcgggcgcccagcgcgtgagaggaattcatagcagtgtgcagtgcaarctgcgctatggaatgtggcatttcctacttggggataaagcaagcaaaagactgacagaacgcagcagagtgataactgtagatggcartatatgtactggaaaaggcaaacttgcaaaagaaatagcagagaaactaggcttcaagcactttcctgaagcggggattcattatccagacagtaccacaggagatgggaagcccctcgccaccgactataatggcaactgtagtttggagaaattttacgatgatccgagaagcaatgatggcaacagttaccgcctgcagtcctggttgtacagcagtcgcctgctgcagtactcagatgccttggagcacttgctgaccacaggacaaggtgttgtgttggagcgctccatcttcagtgactttgtgttcctggaggcgatgtacaaccagggattcatccgaaagcagtgtgtggaccactacaacgaggtgaagagcgtcaccatctgcgattacctgcccccccacctggtgatttacatcgatgtgcccgttccagaggtccagaggcggattcagaagaaaggagatccacatgaaatgaagatcacctctgcctatctacaggacattragaatgcctataagaaaacctttctccctgagatgagtgaaaaatgtgaggttttacartattctgcaagggaagctcaagattcaaaaaaggtggtagaggacattgaatacctgaagttcgataaagggccgtggctcaagcaggacaatcgcactttataccacctgcgattactggttcaggataagtttgaggtgctgaattacacaagcattcctatctttctcccggaagtcaccattggagctcatcagactgaccgtgtcttacatcagttcagagagctgccgggccgcaagtacagccctgggtacaacaccgaggtgggagacaagtggatctggctgaagtgaacgggccgccttctgctccagctgcatcacagtgatggccaagctgcatcagccgcactctcctggacgccrtatagctttaagatcgggggagggtaaataatgcaaaaattgcacagtggaagaaggggtctcacaaaaagcaatccatcctgtagtataggtaatggagaatggcccaccattctcactggaaaacagtggtctgctgtgaaaggccagctctcggcagcccctgtggtttcagcgctgcygctctgtgtcattcaggttgtgcacattgtttttcttctgacttccagaaataaaagtgtttccatgggaatttccccatcgtacgtctatgtgcgtgcgggcacrtcgaaactgcacacgtgcacacacgctgctctgggccctgtttggtgtggtgtggtttaattgaggcttacattatgctgaagagtttttctaaaggcctactgtatttattttagtaatgtgctacattagagtagaaaaaataagaacgtgaagaagaaatagcaaaaggagaaaattaccacagatttacagaacaatatgttttaagagagaygttgagaaagattcacgtggccgtcctcagcgtctcaaactcctttgaagggagatttgagcttaggctgttgatgacataagatgcaaaagcaaaataatatactctctttattacccagaaaatcaagttgccagtcaaaactgagaaatgagaaagaaaatcagatttctttattcatctctgttgaagcctagaaaaccaaaacaagctggttgtggttcagcatcatggtttaggaatcaagctgtcagttgtgagtcctactgaactgtgggttttccactgtaaagctccactgtgtccattaggaatcaggctgccagttgtgagtcctactgaactgtgggttttccactgtaaagctccactgtgtccaatatggtagctcctagccacatgtgggtattgaaatttaaatgagctaaaatgtaatagagtttaaaattgggttccttggttgcactggccatagttcaggcactccacagccgcctgtgggcagtagttccagtgctggtgcagaggacgatgctctgctccccgcggaagctctaccaggcctcgctgctgcggagcatgcgaagaagatgcacactccttccctccttgcgtccgcctgcctttttccctctccccttccttccctccttctttcctcctccttccctcccttcctttcttccttccatctgtccttgttttcctcccttcccttcctccctgcctctttccttccctccttctcttccttccttccgtctgtccttgttttcctccctgcctctttccttccctccttctcttccttccttccttccgtctgtccttgttttcctcccttcccttcctccctgcctccttccttgttttaagaatttgaaaataaagtttcccaggagttttgaattggagtcgagatttaagtggctgaagttttgcatttcactaggaaaccaacagctttaatcatgaaatgaaagcacagctgggcattgggccagtcacagagtgtcttttgctctgagcacttcacaaacccattgtggaggggaggaaagaaaaagaaagccatctttaattatcttagctgttcctaatgtctttggctgcaaagagctagctgtttccttcaaccttggtggttgcacgggtagtgtcctcagcagtgagagggcaggtctgccctgtggtcaggattgcccttgtgaggggcagagctctccaaccatgcagggctccgtgtcggcatggtgtggactcgggtgctctgatcatcccctgtgtttgcgtctgaccctgtgtggttgcattcccttgatggartgggaagtatgtaatttgtagtgctgaggacattcgtctgtttgattttctggtgttttcaatgac

SEQ ID NO: 4091 - DNA, 5441 bp, Homo sapiens
taatagtcacatgacacgtttcccgtcaagatggcggatactctcccttcggagtttgatgtgatcgtaatagggacgggtttgcctgaatccatcattgcagctgcatgttcaagaagtggccggagagttctgcatgttgattcaagaagctactatggaggaaactgggccagttttagcttttcaggactattgtcctggctaaaggaataccaggaaaacagtgacattgtaagtgacagtccagtgtggcaagaccagatccttgaaaatgaagaagccattgctcttagcaggaaggacaaaactattcaacatgtggaagtattttgttatgccagtcaggatttgcatgaagatgtcgaagaagctggtgcactgcagaaaaatcatgctcttgtgacatctgcaaactccacagaagctgcagattctgccttcctgcctacggaggatgagtcattaagcactatgagctgtgaaatgctcacagaacaaactccaagcagcgatccagagaatgcgctagaagtaaatggtgctgaagtgacagggkaaaaagaaaaccattgtgatgataaaacttgtgtgccatsaacttcagcagaagacatgagtgaaaatgtgcctatagcagaagataccacagagyaaccaaagaaaaacagaattacttactcacaaattattaaagaaggcaggagatttaatattgatttagtatcaaagctgctgtattctygaggattactaattgatcttctaatcaaatctaatgttagtygatakgcagagtttaaaaatattaccaggattcttgcatttygagaaggaygagtggaacaggttccgtgttccagagcagatgtctttaatagcaaacaacttactatggtagaaaagygaatgctaatgaaatttcttacattttgtatggaatatgagaaatatcctgatgaatataaaggatatgaagagatcacattttatgaatatttaaagactcaaaaattaacccccaacctcyaatatattgtcatgcattmaattgcaatgacatsagagacagccagcagcaccatagatggtctcaaagctaccaaaaactttcttcactgtcttgggcggtatggcaacactccatttttgtttcctttatatggccaaggagaactcccccagtgtttctgcaggatgtgtgctgtgtttggtggaatttattgtcttcgccattcagtacagtgccttgtagtggacaaagaatccagaaaatgtaaagcaattatagatcagtttggtcagagaataatctctgagcatttcctcgtggaggacagttactttcctgagaacatgtgctcacgtgtgcaatacaggcagatctccagggcagtgctgattacagatagatctgtcctaaaaacagattcagatcaacagatttccattttgacagtgccagcagaggaaccaggaacttttgctgttcgggtcattgagttatgttcttcaacgatgacatgcatgaaaggcacctatttggttcatttgacttgcacatcttctaaaacagcaagagaagatttagaatcagttgtgcagaaattgtttgttccatatactgaaatggagatagaaaatgaacaagtagaaaagccaagaattctgtgggctctttacttcaatatgwgagattcgtsagacatcagcaggagctgttataatgatttaccatccaacgtttatgtctgctctggcccagattgtggtttaggaaatgataatgcagtcaaacaggctgaaacacttttccaggaaatctgccccaatgaagatttctgtccccctccaccaaatcctgaagacattatccttgatggagacagtttacagccagaggcttcagaatccagtgccataccagaggctaactcggagactttcaaggaaagcacaaaccttggaaacctagaggagtcctctgaataatggatatacaccaaactggatacccaactttggaaattctgactggtctcagagtctacttgatagaaggactgtttgagaaatgttagaaagcagcagcaattataaggcaaaataggtaatagaaatccaaaaggggattttccttatagaggacattccaagaacacacaacacttataaagcacattgacttgctcattttaaataccaaacttgtgtgactagcagatgaaaattataaatcaattgattctcaggaatgtaactgtggatatgaaagtgatcctatgcattgttaataattccatggtcttaggacaattttgcttaccactttggatctttgtttgaaagccacattttcagaaccagctcatgtattttctttggttatttgaattttattttctttatggacaagagcatcataacataatgataaaaacatatagaaaaactaaagtatcatgatctagatagaagcctgtatttggaatacaggtttgttttgctttctatgttgagaagcattgaaaatgctaatataaaggtgtttagacatttttacgaataagtcagtagtgttttttagtatcagtagtgatatttgtttgtaaattatttacatattgggaaaggtcaataatgaagaaatgaaagaatggaaggaaaggtgtggataggctcattggtatttgaatattctgtctgtcaagtaactagagtattaggctaattgtctacagacctaatttaatcctggctgtcctactgatgatatttggtaaattgtttaacttctgagcctacgtttctccatatataaagtggaaatagtattactatgcctactatatgagaatggttatgaagacaatgcaatgccatgtttagaatcggtttgccagaagaaaattgttttagaattttcccattgacttgatgaatctcaaaagtctcacgcaggaaataattgcttgctgtcagtcaacttccaaacaaaatagatcacagtgtttttattgcattaagctttttaaatgaaaatttcttttttaaagtagtattttatagtcttacagaccagtaaaaatagtaacaagtagaattgtggttttgaaatattactaaggaaaacactctataaattgttttattccttttctggtaggtaaacctgcaaccaccaaggactccaaattgtgtatgacagttggtaagccctaatatacactacataaaaacgttagggctgcctgtaatcccagcactttgggaagctgaggtgggtagatcacttgaggtcaggagttcgagaccagcctggccaacatggcgaaaccctgtctctactaaaaatacaaaattttagctgggtgttatggtgggcacctgtaatcccagctactttgaagatgaggtagcagactcacttgaaccagggaggcggaggttgcagtgagccaagattttgccactgcactccagcctgggtgacagagcaagactctgtctcacaaaaaaaaaaaaagggggctgtacataggcagcaaactaagctgcagtgatgttgcctatatttaaattttctcaaatggccaagctctgatggtctactttatttgagcaatagttgagacttataattgcctataaataaacaaacaaatgaactatttgtttttttttctcacaacatctggcctatattgtctgtcaggaagccatggctccaatgtaaagtacatagttcttacatacttcaactgcagctggtccctgacctcaccaggtttcagagatgttcttaaaggaagccagctgtggcaggtcacagattcatgggaaatggaaagaaccaaggaatatagctcttgcctcacctttctacccactgcagatatagttcaagccagagtaatggaagaacttaacttactagcctctcaggctgctcctatccctacctcccagtgtacagcccctccccatctctttagtcccctttccctcacttccccttttataatgtcacacaaatcagggacagtaggatcacattataacctactttgtcatagggattcgatttttcttatatcaaatcatgtttcctgaaacccagctggggcatatgcactcaatgtctaatacatacttattaatgtaccggatattggccttgcccctggatatcagcaatatattataaaaggttccagtagatgagacgattgagtctgaatacaattgcagtaaattgtgccaataaagatattgtactgttacggtcttagagttaaagccgcttgaatgcagcatgcacattcatgtaaacagacaatcagggtaggcctagaataaccacaaaaattctattggccttactgcagccacctatatgtagaacaatggaggagatagtttgtggtccattattgtaccctgtttcatccattagcatcagaatctctctttcaggtcatttattaaatatgattgaaatgtttaaaagttcctgaacatgattcatgatgattaaaatatcatacaactgataaaagactttaagaactttatatatttcctgttgcctcaaaatgtaacagaaattattcttagagctttgattttagctatcctaattactgcaaataaatatttgttcttatagttttaaatcaaaaagaaaagtcttgttataaaaccttaagcttgaaatcatattaataaaatatattgtacatagtggaaaattttcagtagctaatttaaaatttcagaaaatgctattaaagaattttgattcaagtatttaaactgtttagttatgcatgcttcttattaaccgaaaatgataataccatttagtttagtgatcagtatgagaagcaatacctaatcctatgttgctattgtattttttcctagttggtgtgcctgctcagaaaaacatatactgtatgtgtatacatacctgtgtatatataaaaggtcaatttatatatttttctataggaaaatggagtaacaagttccctatctcccatatttatttgtccatagtaaaatggccacattgatgataatttctagaactagtttctgagattgtcagccctttgtctaaaataatggcagtattaatgattgacttctgtcactgccatagttacctggattgtcagccttggtagcctttgtctaaagtcctaaagagttccaaaaaaaatgtgttgaaatttaattgctaaatagtggttggtgattctttacagtaggaattgtaataattttcttgcaaataagttatttactgctattgatattgaataatttgtcttttattcagatatatttcaaaaagcatgaatatatgattattcataaattgtatactttaccagtaagttttcagaggaaataaagacttttaaatccttttc

SEQ ID NO: 4092 - DNA, 2187 bp, Homo sapiens
atggccggagaccggctcccgaggaagatgatggacgccaagaagctggccagcctgctgcggggcgggcctagggtgcctggtcatctacagccgctccttcctggagtacaacagctggcatgtgctcagctccgtcaacatctgctgctccaagctggtgaagtgccggctgcagaagggcaaggtgaccattgcagagttcatctggctggccacacgcagccaaatggaggccactgagccacaggatatggtggtctatgaccagagcacacgggacgccagtgtgctggccgcagaccgcttcctctccatcctgctgagcaagctggacagctgcttcgacagcgtggccatcctcacggggggcttcgccaccttctcctcctgcttccccagcctctgccagggcaagcctgctgccctgctacccatgagcctctcccagccctgcctgcccgtgcctagcgtgagcctgaccctcatcctgcctcacctctacctgggctcgcagaaagacgttctgaacaaggatctgacgacacagaatggaataagctacgtcctcaatgccagcaactcctgccccaagcctgacttcatctgcgagagccgcttcatgcrggtccccatcaacgacaactactgtgaaaagctgctgccctggctggacaagtctatggagttcrtctgtaaaggcaagstgtccagctgccaagtcatcgtccactrtctggtcggtatctcccactctgccaccatcgccatcgcctacatcatgaagaccatgggcatatcctccgacgacacctacaggttcatgaaggataggcgccagtccatctcgcccaacttcaacttcctgggccagctgctggagtaggagcgcagcctgaagctgctggccaccgtgcagggggatgcgggcaccccctcagggacgccggagcctccgcccagccctgcggctggggcccggctgccatggctgccaccacctacctcagaaagcgctgccaccgggagtgcagctgccagggagggcggcctgagcgcgggcggggagcccccactgccccccacgcccccagacacctgcgcgctgcagcagggcctgcgcggcctgtacctctcctctgaccgcctgcaggacaccaaccgcctcaagcgctccttctcgctgtacatcaaatcagcgaacacccccggccggcggcccaacggccccgggtcacccgaccccggcgaggtcccaaagctctgcaagctgcacggcccgtcggagccacgctgagcctaccttcgcccagccccgacagcccggatgccgcgcgcccacggccctgcgggcggcccaggcccccagccggctccccgctcccccgcgcacagcctcggcctctcggtccctgtcggcgcccaggctgcccggccctggccagccggccccggagtctgggcgccccgcttgactccccgggcacgccgtcgcccgacgggccctagtgcttcagcccccagggcgcgcaaggggcgggcgggtgctgttcgcgccctttggtcaggcgggcgcccccagacggggcggcggcagcgagctgcggcggccggaggcagcaagggctgagccccgggacgcgcggaccaactggcccgacgagccgccccggagacggagacgcagatcaagcgctgcagctgccagatggagttcgaggagggcatcctggaggggcgcactcgcggcgaggagctggccgccatgggcaagcaggcgagcttctcgggcagcgtggaggtcatcgagatgtcctgacccctccgctgcccttagctccgctgcccacagccagacccgttataaatatatattatatataatgcaaagaaaggtaaatggttttacttttatttttattgagaagtaaatatttctattttttatttatttaagctattcattctggcaatgatttggcaacagtgcaggtggtcctcgagctctatttttactgtctggtatttatactgaaacatacctttctaagcaatacgaggccaccttcagtcgcaaggtgggtgccaggcctggtgcccctcccagttcccccaccccaggaaacactgctgacacttgcaaagactgccgaacttttgtgcactttttacataagaaaaaggatt

SEQ ID NO: 4093 - DNA, 6694 bp, Homo sapiens
ggctgcagagagaggcactttgcaccacagacagatagcaagaagggaaagacagagagtgagaaaaaagaggagtcagtcgctcctggggaagggagagagtgagactgggagaaagagaagcacagaaagtgtgtgtaaaacggagtaaagaaagaaaaaaaaaaaactacccttaaagcacatttaaaaaaaaaaaaaactctggcaattcaaraaaraaacaggctacgtttaaagagcatagagacaatgaaaggctaaagaaaattttaaaatytctgccacagtctcataggtgcttggaaatgaaagtagaactgcctgtctttaacggactctgacaraggtaactggattagggacgagtacgccagcytttttttttttttttttttttttttttaacatcttaaatcctgaaaaaaaaaaaaaaaaaaaaaaaaaggcagcagctccgaattgaatgaattgatgggcacactccaactgctgggctggagagactggacttagtcttgccatttctgcttctttgaaagaggagacaacttgggcttccttttaatttagttttttttccccttctcccccaacccccaaccttcccccttacctcccccaccccctttatcaccaccccccttttaaataagagggtgaaggggaaccagagcgcacaagggaactgactcaggaggcagagaagatgggcatcctcagcgtagacttgctgatcacactgcaaattctgccagtttttttctccaactgcctcttcctggctctctatgactcggtcattctgctcaagcacgtggtgctgctgttgagccgctccaagtccactcgcggagagtggcggcgcatgctgacctcagagggactgcgctgcgtctggaagagcttcctcctcgatgcctacaaacaggtgaaattgggtgmggatgmccccaattccagtgtggtgcatgtctccagtrcagaaggaggtgacaacagtggcaatggtacccaggagaagatagctgagggagccacatgccaccttcttgactttgccagccctgagcgcccactagtggtcaactttggctcagccacttgacctcctttcacgagccagctgccagccttccgcaaactggtggaagagttctcctcagtggctgacttcctgctggtctacattgatgaggctcatccatcagatggctgggcgataccgggggactcctctttgtcttttgaggtgaagaagcaccagaaccaggaagatcgatgtgcagcagcccagcagcttctggagcgtttctccttgccgccccagtgccgagttgtggctgaccgcatggacaataacgccaacatagcttacggggtagcctttgaacgtgtgtgcattgtgcagagacagaaaattgcttatctgggaggaaagggccccttctcctacaaccttcaagaagtccggcattggctggagaagaatttcagcaagagatgaaagaaaactagattagctggttaaaggtatgattataagagagcttattgttttaaaaagttatataaaggcaaggaaattaagaactgaatccatatttcaacagagccctattggcttactgaaagacaggagtttatctatcggaagaacatgaatctctaacagctccatacttctttcactactcaaatggcattgggctgagtaagtaaccatatcacctctcttcttagtaaaaagccctatgtgaaaagatcccaagatggagaggaagaaacgctaattcagcatgtgttcattctgcattgagaaggaactgatacatctgatgcatgctttgagaccagaagaaaagacttacctgaataattactacattagggaagctactgtctacgttaagataaagggtattgccttggctctatttggcatggatggagcccagttggaaaattcccaaatattacaacaagtccttgaacccaggccatgtggttagacgttggtgttaaggttagaccttatgttagagtcatttctgatgttccagcttctagccatgtagtgctctcagtcttcataccccagaaattattggtatatttgtagataccgagaatgatccctcagtctgagaggttagaatgatcatctgtaatctgagggttaatttctaggcaggtggagagagtggtaaaaaagaaatgaaattgacaagctaggaaagaggaggcagaaagatttggaaaattcacagagtttcacccttaagctgtagagagtgggtcacatttgttagccacggaaacatagaaacatacacaaggccagaaaaagaagaaggagctcaactaaaagtggcatagagaatacacatataaaaacaatatatttgtcatatgctcctagagaggagaaaggggtgattgaaagaaaaaaaaatacttaaatatttgtaattgtgaggggtttcttttggaaataattacttttgaaccatgtatgtggtatgtatattttcagtgggttaattataccccatgatacctattaaaggaaaaccagtgggtctggtggtgctggtcttttcctccccattcctacaatttctatgtggcccaagtcattcctaatcttggtctctatagcagtgttctctctgaatgctgagctgaagaaattatacgtacatacacacatacatacatacatacaaatatatgtatatatattctcagctgctgcgggaggtaggtaccatggccattcagcacagccttgatttcctcccaaagtaggtgagctatagtgaagaataggtgcaaacaaacaagcttacttccattgcaaaatagaagaagaggaagttagagataattctgatcaatcattttggaggctttgttataaggcaacccccggtatatcatggaatttccattgacatttgaatttggacttggatcttccyttggtcccattagctgaggtttagtaatctaaagtccctatagtatatgattataatgctattttaaaawatatatatataaaatatttttttctttttaaaatagacactatagttttacccataagtaatatttaaagattatagctcccaaaagaatggaccaaccactttcgtatcataatttctttttggtaaatatgagactattatgaaatcatagtatatgattgtatttaaaggtacaatcaaaggatcttttgtccattccattaataactgaataaaaaataaataaaatggatagaaaaaaactaaagttgaaaatacattcttaaactagttgtctgaawtgagaaaagagtgagaactaggtgtgcaagaaccaaacgtattttattttattttttaaatgggagcaacatatcagtcgtgtcaccagctggtatattgtgtaaatattaaagctccattgggactgatttttcatggcaacatcagctttctaatgttctaaattctataaaaaccacccacaaagaaacaaagcaaatttcattatctaatgagttgctggaaaatcatattgagaataattatttcagattcctcagttgttaacttctacattcaaggcttatctctgcccccattgatttttaacctcaaaatggtgttgagatttacgtggaaccctaaagcagtaaaataaaaaacctggttgcagcacattcacactgttgtccttaaaattccccttttttctctatgtacgataaagtaacagtatgtcagataagccggtggggggatgagattaggctgaggcagtgctagtcaactggggaaaaggatgatggaaaaatcacccagttgtgctatatttttaaagaaggaggtcgtttatgtgtgcagacaattctccctgaggttagcccaatggagaaatgaagcagaggaaggaaacatagaaagacatgggctatcagggaggaagatgttcaatagaacatgcaagaatttctggaagaaaggctgtggaagggccaatggagaaaatgaatggacaaagctcaggaatcctacgctatgtagaatgtcttggtgttatcagggttaagcctgtaattatgtaacctatttatcgcaacatgaatttttatgatttcttgtgatgtattcttttatgaaattaacaagaactcattattttgaggtagaggaaaatcaatgctttatctgatatgctgagaaattattagattgccaatactcatgtgcgtttcatgtgttttataaggtttgttcctttgaagaattgtagttcttagtcccacagggaaatgtgtatctatttatatatcatagtataaatctatgatatatttatatcatatataaaagtctgagttctctttcttagtccctaatcatgtttctcccataggctgtgtttacatggagctatcggtttagccttttaagcttcattagcttgtctattattgaaatagtttccaagaaattttagatattatcataacatctgggtctactcaaacacttattgtttgaaagacttatgtcttggacctatcaaaaactgactttatttattgcttagtgaaaatactagtgggatcaacaatgattttcttgaatgggcatgaatggagatgcccgcacagtaatgtagaaatgtttcatacagctattaaaatgtaactgacctccttagaggcagattagtaactgttcctactttgtatagctaagtgacagtcacttaacttacatgactttcttttttcacattgggtctctggtcctgtgtcttcacctcatttatagcacgtctccttgatttttggtagtatcaacttcccagtgatctgttcagttaagttcttctcccgttaaccaggaagtgcttattctctcatcacagtgggaagaatagcctattgtctttcattttgcctgagtgtattttactatttgggctctgaaataaaaattatgaaatatggtgaggtcacatgttggtgctgccttgctgcataaaattctagagggcaggttagagacagtatgtatgccttcgggaaaattcaaaggtggattacaaggtgtcctcagcatgccctatggcctatgtgcgaagcaagaagaattgactgatttacaggacttctctttatgtcaatcttaagaggatggatgaatctggacatttgttccacccgacctctgactgatggtttggaaaataactttaattaggatcatatgaccattgaaaaaggaaaaatgtagactctgacttccgtcccactgaaggattaatgaaaacctttactagcatttagagcttttcagaacatccccactgtcatgtgtctcagcagtggagactgcaagtaaggcttttaattttaggaggtttttttttttttttttttyyycctaaatggtatggccaaaagtcagagttaaaatatatatagttagattccaacttcctccttcactctaaaaataraatccaaacccactcttcatatatgcttccaraatggggcttaagtaccaatctctgctttgcaatgggcacaatcttggtcatgtcctgaggctctctaaraaaagagaggatctaggatgggagagctagaaagttgctaactgggaagaacaaggccctgagggsttggtctaccaatctgggaagatttgaaaacaaacttctcgcaactgaaggaaggctgaaggctgctgcaagtcattgagtgactttaggatgagcaaaacattgggccacttcctaatgccctatgtgtatagtaccagaagcaaggtctcagacttaacagacccagctctgttccaaggtgagtctgaaccaatagaaagcaaacatgtgcagatatccaaacaagactgctcatgcaagtcggggctggctacccgtcttaggcagcaacagcagagctccagggagcttattcaatatttactgagacttcgaagacccagcagatgtttaatgaagtcactattttggctcaaaccctccacttctccccctcccctcaaaaagccaacaggtaaacacataaatgaaagaaacccacagaaggggatgggaaataaagaaaattctctcaagacttctccaggcccatgtcactggtcagcgtggtttttatgtgtattaggattgggggatgtgaagaaataagtatccagtactttataaccaaagcaattaaatgatattgggtagggaatgttggccagttttgtttagttttgcatcacattgtcaccagactcactagcccaagtaatcgggcgcccgaagagggagacagagatgtgcagagttgaccagtgtgcggatgataactactgacgaaagagtcatcgactcagttagtggttggatgtagtcacattrgtttgcctctccccatctttgtctccctggcaaggagaatatgcgggacatgatgctaagagycctgggtaaatgtggtgagaatgcacgcgtgcatatgctacacatatgtgcttytcagttgcagaaaatgaactgctttgggagattatcagtagaaagrgtgttatcatattggtgctgagtgctatgtgtgcttatacaatttgttcttgtattttaataaactttgaataaaagaataaagcta

SEQ ID NO: 4094 - DNA, 6016 bp, Homo sapiens
ggctgcagagagaggcactttgcaccacagacagatagcaagaagggaaagacagagagtgagaaaaaagaggagtcagtcgctcctggggaagggagagagtgagactgggagaaagagaagcacagaaagtgtgtgtaaaacggagtaaagaaagaaaaaaaaaaaactacccttaaagcacatttaaaaaaaaaaaaaactctggcaattcaaraaaraaacaggctacgtttaaagagcatagagacaatgaaaggctaaagaaaattttaaaatytctgccacagtctcataggtgcttggaaatgaaagtagaactgcctgtctttaacggactctgacaragagggtgaaggggaaccagagcgcacaagggaactgactcaggaggcagagaagatgggcatcctcagcgtagacttgctgatcacactgcaaattctgccagtttttttctccaactgcctcttcctggctctctatgactcggtcattctgctcaagcacgtggtgctgctgttgagccgctccaagtccactcgcggagagtggcggcgcatgctgacctcagagggactgcgctgcgtctggaagagcttcctcctcgatgcctacaaacaggtgaaattgggtgmggatgmccccaattccagtgtggtgcatgtctccagtrcagaaggaggtgacaacagtggcaatggtacccaggagaagatagctgagggagccacatgccaccttcttgactttgccagccctgagcgcccactagtggtcaactttggctcagccacttgacctcctttcacgagccagctgccagccttccgcaaactggtggaagagttctcctcagtggctgacttcctgctggtctacattgatgaggctcatccatcagatggctgggcgataccgggggactcctctttgtcttttgaggtgaagaagcaccagaaccaggaagatcgatgtgcagcagcccagcagcttctggagcgtttctccttgccgccccagtgccgagttgtggctgaccgcatggacaataacgccaacatagcttacggggtagcctttgaacgtgtgtgcattgtgcagagacagaaaattgcttatctgggaggaaagggccccttctcctacaaccttcaagaagtccggcattggctggagaagaatttcagcaagagatgaaagaaaactagattagctggttaaaggtatgattataagagagcttattgttttaaaaagttatataaaggcaaggaaattaagaactgaatccatatttcaacagagccctattggcttactgaaagacaggagtttatctatcggaagaacatgaatctctaacagctccatacttctttcactactcaaatggcattgggctgagtaagtaaccatatcacctctcttcttagtaaaaagccctatgtgaaaagatcccaagatggagaggaagaaacgctaattcagcatgtgttcattctgcattgagaaggaactgatacatctgatgcatgctttgagaccagaagaaaagacttacctgaataattactacattagggaagctactgtctacgttaagataaagggtattgccttggctctatttggcatggatggagcccagttggaaaattcccaaatattacaacaagtccttgaacccaggccatgtggttagacgttggtgttaaggttagaccttatgttagagtcatttctgatgttccagcttctagccatgtagtgctctcagtcttcataccccagaaattattggtatatttgtagataccgagaatgatccctcagtctgagaggttagaatgatcatctgtaatctgagggttaatttctaggcaggtggagagagtggtaaaaaagaaatgaaattgacaagctaggaaagaggaggcagaaagatttggaaaattcacagagtttcacccttaagctgtagagagtgggtcacatttgttagccacggaaacatagaaacatacacaaggccagaaaaagaagaaggagctcaactaaaagtggcatagagaatacacatataaaaacaatatatttgtcatatgctcctagagaggagaaaggggtgattgaaagaaaaaaaaatacttaaatatttgtaattgtgaggggtttcttttggaaataattacttttgaaccatgtatgtggtatgtatattttcagtgggttaattataccccatgatacctattaaaggaaaaccagtgggtctggtggtgctggtcttttcctccccattcctacaatttctatgtggcccaagtcattcctaatcttggtctctatagcagtgttctctctgaatgctgagctgaagaaattatacgtacatacacacatacatacatacatacaaatatatgtatatatattctcagctgctgcgggaggtaggtaccatggccattcagcacagccttgatttcctcccaaagtaggtgagctatagtgaagaataggtgcaaacaaacaagcttacttccattgcaaaatagaagaagaggaagttagagataattctgatcaatcattttggaggctttgttataaggcaacccccggtatatcatggaatttccattgacatttgaatttggacttggatcttccyttggtcccattagctgaggtttagtaatctaaagtccctatagtatatgattataatgctattttaaaawatatatatataaaatatttttttctttttaaaatagacactatagttttacccataagtaatatttaaagattatagctcccaaaagaatggaccaaccactttcgtatcataatttctttttggtaaatatgagactattatgaaatcatagtatatgattgtatttaaaggtacaatcaaaggatcttttgtccattccattaataactgaataaaaaataaataaaatggatagaaaaaaactaaagttgaaaatacattcttaaactagttgtctgaawtgagaaaagagtgagaactaggtgtgcaagaaccaaacgtattttattttattttttaaatgggagcaacatatcagtcgtgtcaccagctggtatattgtgtaaatattaaagctccattgggactgatttttcatggcaacatcagctttctaatgttctaaattctataaaaaccacccacaaagaaacaaagcaaatttcattatctaatgagttgctggaaaatcatattgagaataattatttcagattcctcagttgttaacttctacattcaaggcttatctctgcccccattgatttttaacctcaaaatggtgttgagatttacgtggaaccctaaagcagtaaaataaaaaacctggttgcagcacattcacactgttgtccttaaaattccccttttttctctatgtacgataaagtaacagtatgtcagataagccggtggggggatgagattaggctgaggcagtgctagtcaactggggaaaaggatgatggaaaaatcacccagttgtgctatatttttaaagaaggaggtcgtttatgtgtgcagacaattctccctgaggttagcccaatggagaaatgaagcagaggaaggaaacatagaaagacatgggctatcagggaggaagatgttcaatagaacatgcaagaatttctggaagaaaggctgtggaagggccaatggagaaaatgaatggacaaagctcaggaatcctacgctatgtagaatgtcttggtgttatcagggttaagcctgtaattatgtaacctatttatcgcaacatgaatttttatgatttcttgtgatgtattcttttatgaaattaacaagaactcattattttgaggtagaggaaaatcaatgctttatctgatatgctgagaaattattagattgccaatactcatgtgcgtttcatgtgttttataaggtttgttcctttgaagaattgtagttcttagtcccacagggaaatgtgtatctatttatatatcatagtataaatctatgatatatttatatcatatataaaagtctgagttctctttcttagtccctaatcatgtttctcccataggctgtgtttacatggagctatcggtttagccttttaagcttcattagcttgtctattattgaaatagtttccaagaaattttagatattatcataacatctgggtctactcaaacacttattgtttgaaagacttatgtcttggacctatcaaaaactgactttatttattgcttagtgaaaatactagtgggatcaacaatgattttcttgaatgggcatgaatggagatgcccgcacagtaatgtagaaatgtttcatacagctattaaaatgtaactgacctccttagaggcagattagtaactgttcctactttgtatagctaagtgacagtcacttaacttacatgactttcttttttcacattgggtctctggtcctgtgtcttcacctcatttatagcacgtctccttgatttttggtagtatcaacttcccagtgatctgttcagttaagttcttctcccgttaaccaggaagtgcttattctctcatcacagtgggaagaatagcctattgtctttcattttgcctgagtgtattttactatttgggctctgaaataaaaattatgaaatatggtgaggtcacatgttggtgctgccttgctgcataaaattctagtttttttttttttttttttyyycctaaatggtatggccaaaagtcagagttaaaatatatatagttagattccaacttcctccttcactctaaaaataraatccaaacccactcttcatatatgcttccaraatggggcttaagtaccaatctctgctttgcaatgggcacaatcttggtcatgtcctgaggctctctaaraaaagagaggatctaggatgggagagctagaaagttgctaactgggaagaacaaggccctgagggsttggtctaccaatctgggaagatttgaaaacaaacttctcgcaactgaaggaaggctgaaggctgctgcaagtcattgagtgactttaggatgagcaaaacattgggccacttcctaatgccctatgtgtatagtaccagaagcaaggtctcagacttaacagacccagctctgttccaaggtgagtctgaaccaatagaaagcaaacatgtgcagatatccaaacaagactgctcatgcaagtcggggctggctacccgtcttaggcagcaacagcagagctccagggagcttattcaatatttactgagacttcgaagacccagcagatgtttaatgaagtcactattttggctcaaaccctccacttctccccctcccctcaaaaagccaacaggtaaacacataaatgaaagaaacccacagaaggggatgggaaataaagaaaattctctcaagacttctccaggcccatgtcactggtcagcgtggtttttatgtgtattaggattgggggatgtgaagaaataagtatccagtactttataaccaaagcaattaaatgatattgggtagggaatgttggccagttttgtttagttttgcatcacattgtcaccagactcactagcccaagtaatcgggcgcccgaagagggagacagagatgtgcagagttgaccagtgtgcggatgataactactgacgaaagagtcatcgactcagttagtggttggatgtagtcacattrgtttgcctctccccatctttgtctccctggcaaggagaatatgcgggacatgatgctaagagycctgggtaaatgtggtgagaatgcacgcgtgcatatgctacacatatgtgcttytcagttgcagaaaatgaactgctttgggagattatcagtagaaagrgtgttatcatattggtgctgagtgctatgtgtgcttatacaatttgttcttgtattttaataaactttgaataaaagaataaagcta

SEQ ID NO: 4095 - DNA, 6323 bp, Homo sapiens
ggctgcagagagaggcactttgcaccacagacagatagcaagaagggaaagacagagagtgagaaaaaagaggagtcagtcgctcctggggaagggagagagtgagactgggagaaagagaagcacagaaagtgtgtgtaaaacggagtaaagaaagaaaaaaaaaaaactacccttaaagcacatttaaaaaaaaaaaaaactctggcaattcaaraaaraaacaggctacgtttaaagagcatagagacaatgaaaggctaaagaaaattttaaaatytctgccacagtctcataggtgcttggaaatgaaagtagaactgcctgtctttaacggactctgacaraggtaactggattagggacgagtacgccagcytttttttttttttttttttttttttttaacatcttaaatcctgaaaaaaaaaaaaaaaaaaaaaaaaaggcagcagctccgaattgaatgaattgatgggcacactccaactgctgggctggagagactggacttagtcttgccatttctgcttctttgaaagaggagacaacttgggcttccttttaatttagttttttttccccttctcccccaacccccaaccttcccccttacctcccccaccccctttatcaccaccccccttttaaataagagggtgaaggggaaccagagcgcacaagggaactgactcaggaggcagagaagatgggcatcctcagcgtagacttgctgatcacactgcaaattctgccagtttttttctccaactgcctcttcctggctctctatgactcggtcattctgctcaagcacgtggtgctgctgttgagccgctccaagtccactcgcggagagtggcggcgcatgctgacctcagagggactgcgctgcgtctggaagagcttcctcctcgatgcctacaaacaggtgaaattgggtgmggatgmccccaattccagtgtggtgcatgtctccagtrcagaaggaggtgacaacagtggcaatggtacccaggagaagatagctgagggagccacatgccaccttcttgactttgccagccctgagcgcccactagtggtcaactttggctcagccacttgacctcctttcacgagccagctgccagccttccgcaaactggtggaagagttctcctcagtggctgacttcctgctggtctacattgatgaggctcatccatcagatggctgggcgataccgggggactcctctttgtcttttgaggtgaagaagcaccagaaccaggaagatcgatgtgcagcagcccagcagcttctggagcgtttctccttgccgccccagtgccgagttgtggctgaccgcatggacaataacgccaacatagcttacggggtagcctttgaacgtgtgtgcattgtgcagagacagaaaattgcttatctgggaggaaagggccccttctcctacaaccttcaagaagtccggcattggctggagaagaatttcagcaagagatgaaagaaaactagattagctggttaaaggtatgattataagagagcttattgttttaaaaagttatataaaggcaaggaaattaagaactgaatccatatttcaacagagccctattggcttactgaaagacaggagtttatctatcggaagaacatgaatctctaacagctccatacttctttcactactcaaatggcattgggctgagtaagtaaccatatcacctctcttcttagtaaaaagccctatgtgaaaagatcccaagatggagaggaagaaacgctaattcagcatgtgttcattctgcattgagaaggaactgatacatctgatgcatgctttgagaccagaagaaaagacttacctgaataattactacattagggaagctactgtctacgttaagataaagggtattgccttggctctatttggcatggatggagcccagttggaaaattcccaaatattacaacaagtccttgaacccaggccatgtggttagacgttggtgttaaggttagaccttatgttagagtcatttctgatgttccagcttctagccatgtagtgctctcagtcttcataccccagaaattattggtatatttgtagataccgagaatgatccctcagtctgagaggttagaatgatcatctgtaatctgagggttaatttctaggcaggtggagagagtggtaaaaaagaaatgaaattgacaagctaggaaagaggaggcagaaagatttggaaaattcacagagtttcacccttaagctgtagagagtgggtcacatttgttagccacggaaacatagaaacatacacaaggccagaaaaagaagaaggagctcaactaaaagtggcatagagaatacacatataaaaacaatatatttgtcatatgctcctagagaggagaaaggggtgattgaaagaaaaaaaaatacttaaatatttgtaattgtgaggggtttcttttggaaataattacttttgaaccatgtatgtggtatgtatattttcagtgggttaattataccccatgatacctattaaaggaaaaccagtgggtctggtggtgctggtcttttcctccccattcctacaatttctatgtggcccaagtcattcctaatcttggtctctatagcagtgttctctctgaatgctgagctgaagaaattatacgtacatacacacatacatacatacatacaaatatatgtatatatattctcagctgctgcgggaggtaggtaccatggccattcagcacagccttgatttcctcccaaagtaggtgagctatagtgaagaataggtgcaaacaaacaagcttacttccattgcaaaatagaagaagaggaagttagagataattctgatcaatcattttggaggctttgttataaggcaacccccggtatatcatggaatttccattgacatttgaatttggacttggatcttccyttggtcccattagctgaggtttagtaatctaaagtccctatagtatatgattataatgctattttaaaawatatatatataaaatatttttttctttttaaaatagacactatagttttacccataagtaatatttaaagattatagctcccaaaagaatggaccaaccactttcgtatcataatttctttttggtaaatatgagactattatgaaatcatagtatatgattgtatttaaaggtacaatcaaaggatcttttgtccattccattaataactgaataaaaaataaataaaatggatagaaaaaaactaaagttgaaaatacattcttaaactagttgtctgaawtgagaaaagagtgagaactaggtgtgcaagaaccaaacgtattttattttattttttaaatgggagcaacatatcagtcgtgtcaccagctggtatattgtgtaaatattaaagctccattgggactgatttttcatggcaacatcagctttctaatgttctaaattctataaaaaccacccacaaagaaacaaagcaaatttcattatctaatgagttgctggaaaatcatattgagaataattatttcagattcctcagttgttaacttctacattcaaggcttatctctgcccccattgatttttaacctcaaaatggtgttgagatttacgtggaaccctaaagcagtaaaataaaaaacctggttgcagcacattcacactgttgtccttaaaattccccttttttctctatgtacgataaagtaacagtatgtcagataagccggtggggggatgagattaggctgaggcagtgctagtcaactggggaaaaggatgatggaaaaatcacccagttgtgctatatttttaaagaaggaggtcgtttatgtgtgcagacaattctccctgaggttagcccaatggagaaatgaagcagaggaaggaaacatagaaagacatgggctatcagggaggaagatgttcaatagaacatgcaagaatttctggaagaaaggctgtggaagggccaatggagaaaatgaatggacaaagctcaggaatcctacgctatgtagaatgtcttggtgttatcagggttaagcctgtaattatgtaacctatttatcgcaacatgaatttttatgatttcttgtgatgtattcttttatgaaattaacaagaactcattattttgaggtagaggaaaatcaatgctttatctgatatgctgagaaattattagattgccaatactcatgtgcgtttcatgtgttttataaggtttgttcctttgaagaattgtagttcttagtcccacagggaaatgtgtatctatttatatatcatagtataaatctatgatatatttatatcatatataaaagtctgagttctctttcttagtccctaatcatgtttctcccataggctgtgtttacatggagctatcggtttagccttttaagcttcattagcttgtctattattgaaatagtttccaagaaattttagatattatcataacatctgggtctactcaaacacttattgtttgaaagacttatgtcttggacctatcaaaaactgactttatttattgcttagtgaaaatactagtgggatcaacaatgattttcttgaatgggcatgaatggagatgcccgcacagtaatgtagaaatgtttcatacagctattaaaatgtaactgacctccttagaggcagattagtaactgttcctactttgtatagctaagtgacagtcacttaacttacatgactttcttttttcacattgggtctctggtcctgtgtcttcacctcatttatagcacgtctccttgatttttggtagtatcaacttcccagtgatctgttcagttaagttcttctcccgttaaccaggaagtgcttattctctcatcacagtgggaagaatagcctattgtctttcattttgcctgagtgtattttactatttgggctctgaaataaaaattatgaaatatggtgaggtcacatgttggtgctgccttgctgcataaaattctagtttttttttttttttttttyyycctaaatggtatggccaaaagtcagagttaaaatatatatagttagattccaacttcctccttcactctaaaaataraatccaaacccactcttcatatatgcttccaraatggggcttaagtaccaatctctgctttgcaatgggcacaatcttggtcatgtcctgaggctctctaaraaaagagaggatctaggatgggagagctagaaagttgctaactgggaagaacaaggccctgagggsttggtctaccaatctgggaagatttgaaaacaaacttctcgcaactgaaggaaggctgaaggctgctgcaagtcattgagtgactttaggatgagcaaaacattgggccacttcctaatgccctatgtgtatagtaccagaagcaaggtctcagacttaacagacccagctctgttccaaggtgagtctgaaccaatagaaagcaaacatgtgcagatatccaaacaagactgctcatgcaagtcggggctggctacccgtcttaggcagcaacagcagagctccagggagcttattcaatatttactgagacttcgaagacccagcagatgtttaatgaagtcactattttggctcaaaccctccacttctccccctcccctcaaaaagccaacaggtaaacacataaatgaaagaaacccacagaaggggatgggaaataaagaaaattctctcaagacttctccaggcccatgtcactggtcagcgtggtttttatgtgtattaggattgggggatgtgaagaaataagtatccagtactttataaccaaagcaattaaatgatattgggtagggaatgttggccagttttgtttagttttgcatcacattgtcaccagactcactagcccaagtaatcgggcgcccgaagagggagacagagatgtgcagagttgaccagtgtgcggatgataactactgacgaaagagtcatcgactcagttagtggttggatgtagtcacattrgtttgcctctccccatctttgtctccctggcaaggagaatatgcgggacatgatgctaagagycctgggtaaatgtggtgagaatgcacgcgtgcatatgctacacatatgtgcttytcagttgcagaaaatgaactgctttgggagattatcagtagaaagrgtgttatcatattggtgctgagtgctatgtgtgcttatacaatttgttcttgtattttaataaactttgaataaaagaataaagcta

SEQ ID NO: 4096 - DNA, 1082 bp, Homo sapiens
gggcttccttttaatttagttttttttccccttctcccccaacccccaaccttcccccttacctcccccaccccctttatcaccaccccccttttaaataagagggtgaaggggaaccagagcgcacaagggaactgactcaggaggcagagaagatgggcatcctcagcgtagacttgctgatcacactgcaaattctgccagtttttttctccaactgcctcttcctggctctctatgactcggtcattctgctcaagcacgtggtgctgctgttgagccgctccaagtccactcgcggagagtggcggcgcatgctgacctcagagggactgcgctgcgtctggaagagcttcctcctcgatgcctacaaacagctaaattgtcctccatcaggttttagcaaagatggacacattttatgactagtatatgaagcttataaaagcagactactggtctactcacatttggatttatggatgactgacagtgttgtacttactctaaatttcccaaggcaaattagtctgtgttttggaaagaattctgcagctgaactatacattgtttctaagaaggagaaggtgccttaactttccaagaaaatttactgcaggtgaaattgggtgmggatgmccccaattccagtgtggtgcatgtctccagtrcagaaggaggtgacaacagtggcaatggtacccaggagaagatagctgagggagccacatgccaccttcttgactttgccagccctgagcgcccactagtggtcaactttggctcagccacttgacctcctttcacgagccagctgccagccttccgcaaactggtggaagagttctcctcagtggctgacttcctgctggtctacattgatgaggctcatccatcagatggctgggcgataccgggggactcctctttgtcttttgaggtgaagaagcaccagaaccaggaagatcgatgtgcagcagcccagcagcttctggagcgtttctccttgccgccccagtgccgagttgtggctgaccgcatggacaataacgccaacatagcttacggggtagcctttgaac

SEQ ID NO: 4097 - DNA, 1058 bp, Homo sapiens
gggcttccttttaatttagttttttttccccttctcccccaacccccaaccttcccccttacctcccccaccccctttatcaccaccccccttttaaataagagggtgaaggggaaccagagcgcacaagggaactgactcaggaggcagagaagatgggcatcctcagcgtagacttgctgatcacactgcaaattctgccagtttttttctccaactgcctcttcctggctctctatgactcggtcattctgctcaagcacgtggtgctgctgttgagccgctccaagtccactcgcggagagtggcggcgcatgctgacctcagagggactgcgctgcgtctggaagagcttcctcctcgatgcctacaaacagctaaattgtcctccatcaggttttagcaaagatggacacattttatgactagtatatgaagcttataaaagcagactactggtctactcacatttggatttatggatggtgaaattgggtgmggatgmccccaattccagtgtggtgcatgtctccagtrcagaaggaggtgacaacagtggcaatggtacccaggagaagatagctgagggagccacatgccaccttcttgactttgccagccctgagcgcccactagtggtcaactttggctcagccacttgacctcctttcacgagccagctgccagccttccgcaaactggtggaagagttctcctcagtggctgacttcctgctggtctacattgatgaggctcatccatcagatggctgggcgataccgggggactcctctttgtcttttgaggtgaagaagcaccagaaccaggaagatcgatgtgcagcagcccagcagcttctggagcgtttctccttgccgccccagtgccgagttgtggctgaccgcatggacaataacgccaacatagcttacggggtagcctttgaacgtgtgtgcattgtgcagagacagaaaattgcttatctgggaggaaagggccccttctcctacaaccttcaagaagtccggcattggctggagaagaatttcagcaagaga

SEQ ID NO: 4098 - DNA, 6387 bp, Homo sapiens
ggctgcagagagaggcactttgcaccacagacagatagcaagaagggaaagacagagagtgagaaaaaagaggagtcagtcgctcctggggaagggagagagtgagactgggagaaagagaagcacagaaagtgtgtgtaaaacggagtaaagaaagaaaaaaaaaaaactacccttaaagcacatttaaaaaaaaaaaaaactctggcaattcaaraaaraaacaggctacgtttaaagagcatagagacaatgaaaggctaaagaaaattttaaaatytctgccacagtctcataggtgcttggaaatgaaagtagaactgcctgtctttaacggactctgacaragagggtgaaggggaaccagagcgcacaagggaactgactcaggaggcagagaagatgggcatcctcagcgtagacttgctgatcacactgcaaattctgccagtttttttctccaactgcctcttcctggctctctatgactcggtcattctgctcaagcacgtggtgctgctgttgagccgctccaagtccactcgcggagagtggcggcgcatgctgacctcagagggactgcgctgcgtctggaagagcttcctcctcgatgcctacaaacaggtgaaattgggtgmggatgmccccaattccagtgtggtgcatgtctccagtrcagaaggaggtgacaacagtggcaatggtacccaggagaagatagctgagggagccacatgccaccttcttgactttgccagccctgagcgcccactagtggtcaactttggctcagccacttgacctcctttcacgagccagctgccagccttccgcaaactggtggaagagttctcctcagtggctgacttcctgctggtctacattgatgaggctcatccatcagatggctgggcgataccgggggactcctctttgtcttttgaggtgaagaagcaccagaaccaggaagatcgatgtgcagcagcccagcagcttctggagcgtttctccttgccgccccagtgccgagttgtggctgaccgcatggacaataacgccaacatagcttacggggtagcctttgaacgtgtgtgcattgtgcagagacagaaaattgcttatctgggaggaaagggccccttctcctacaaccttcaagaagtccggcattggctggagaagaatttcagcaagagatgaaagaaaactagattagctggttaaaggtatgattataagagagcttattgttttaaaaagttatataaaggcaaggaaattaagaactgaatccatatttcaacagagccctattggcttactgaaagacaggagtttatctatcggaagaacatgaatctctaacagctccatacttctttcactactcaaatggcattgggctgagtaagtaaccatatcacctctcttcttagtaaaaagccctatgtgaaaagatcccaagatggagaggaagaaacgctaattcagcatgtgttcattctgcattgagaaggaactgatacatctgatgcatgctttgagaccagaagaaaagacttacctgaataattactacattagggaagctactgtctacgttaagataaagggtattgccttggctctatttggcatggatggagcccagttggaaaattcccaaatattacaacaagtccttgaacccaggccatgtggttagacgttggtgttaaggttagaccttatgttagagtcatttctgatgttccagcttctagccatgtagtgctctcagtcttcataccccagaaattattggtatatttgtagataccgagaatgatccctcagtctgagaggttagaatgatcatctgtaatctgagggttaatttctaggcaggtggagagagtggtaaaaaagaaatgaaattgacaagctaggaaagaggaggcagaaagatttggaaaattcacagagtttcacccttaagctgtagagagtgggtcacatttgttagccacggaaacatagaaacatacacaaggccagaaaaagaagaaggagctcaactaaaagtggcatagagaatacacatataaaaacaatatatttgtcatatgctcctagagaggagaaaggggtgattgaaagaaaaaaaaatacttaaatatttgtaattgtgaggggtttcttttggaaataattacttttgaaccatgtatgtggtatgtatattttcagtgggttaattataccccatgatacctattaaaggaaaaccagtgggtctggtggtgctggtcttttcctccccattcctacaatttctatgtggcccaagtcattcctaatcttggtctctatagcagtgttctctctgaatgctgagctgaagaaattatacgtacatacacacatacatacatacatacaaatatatgtatatatattctcagctgctgcgggaggtaggtaccatggccattcagcacagccttgatttcctcccaaagtaggtgagctatagtgaagaataggtgcaaacaaacaagcttacttccattgcaaaatagaagaagaggaagttagagataattctgatcaatcattttggaggctttgttataaggcaacccccggtatatcatggaatttccattgacatttgaatttggacttggatcttccyttggtcccattagctgaggtttagtaatctaaagtccctatagtatatgattataatgctattttaaaawatatatatataaaatatttttttctttttaaaatagacactatagttttacccataagtaatatttaaagattatagctcccaaaagaatggaccaaccactttcgtatcataatttctttttggtaaatatgagactattatgaaatcatagtatatgattgtatttaaaggtacaatcaaaggatcttttgtccattccattaataactgaataaaaaataaataaaatggatagaaaaaaactaaagttgaaaatacattcttaaactagttgtctgaawtgagaaaagagtgagaactaggtgtgcaagaaccaaacgtattttattttattttttaaatgggagcaacatatcagtcgtgtcaccagctggtatattgtgtaaatattaaagctccattgggactgatttttcatggcaacatcagctttctaatgttctaaattctataaaaaccacccacaaagaaacaaagcaaatttcattatctaatgagttgctggaaaatcatattgagaataattatttcagattcctcagttgttaacttctacattcaaggcttatctctgcccccattgatttttaacctcaaaatggtgttgagatttacgtggaaccctaaagcagtaaaataaaaaacctggttgcagcacattcacactgttgtccttaaaattccccttttttctctatgtacgataaagtaacagtatgtcagataagccggtggggggatgagattaggctgaggcagtgctagtcaactggggaaaaggatgatggaaaaatcacccagttgtgctatatttttaaagaaggaggtcgtttatgtgtgcagacaattctccctgaggttagcccaatggagaaatgaagcagaggaaggaaacatagaaagacatgggctatcagggaggaagatgttcaatagaacatgcaagaatttctggaagaaaggctgtggaagggccaatggagaaaatgaatggacaaagctcaggaatcctacgctatgtagaatgtcttggtgttatcagggttaagcctgtaattatgtaacctatttatcgcaacatgaatttttatgatttcttgtgatgtattcttttatgaaattaacaagaactcattattttgaggtagaggaaaatcaatgctttatctgatatgctgagaaattattagattgccaatactcatgtgcgtttcatgtgttttataaggtttgttcctttgaagaattgtagttcttagtcccacagggaaatgtgtatctatttatatatcatagtataaatctatgatatatttatatcatatataaaagtctgagttctctttcttagtccctaatcatgtttctcccataggctgtgtttacatggagctatcggtttagccttttaagcttcattagcttgtctattattgaaatagtttccaagaaattttagatattatcataacatctgggtctactcaaacacttattgtttgaaagacttatgtcttggacctatcaaaaactgactttatttattgcttagtgaaaatactagtgggatcaacaatgattttcttgaatgggcatgaatggagatgcccgcacagtaatgtagaaatgtttcatacagctattaaaatgtaactgacctccttagaggcagattagtaactgttcctactttgtatagctaagtgacagtcacttaacttacatgactttcttttttcacattgggtctctggtcctgtgtcttcacctcatttatagcacgtctccttgatttttggtagtatcaacttcccagtgatctgttcagttaagttcttctcccgttaaccaggaagtgcttattctctcatcacagtgggaagaatagcctattgtctttcattttgcctgagtgtattttactatttgggctctgaaataaaaattatgaaatatggtgaggtcacatgttggtgctgccttgctgcataaaattctagagggcaggttagagacagtatgtatgccttcgggaaaattcaaaggtggattacaaggtgtcctcagcatgccctatggcctatgtgcgaagcaagaagaattgactgatttacaggacttctctttatgtcaatcttaagaggatggatgaatctggacatttgttccacccgacctctgactgatggtttggaaaataactttaattaggatcatatgaccattgaaaaaggaaaaatgtagactctgacttccgtcccactgaaggattaatgaaaacctttactagcatttagagcttttcagaacatccccactgtcatgtgtctcagcagtggagactgcaagtaaggcttttaattttaggaggtttttttttttttttttttyyycctaaatggtatggccaaaagtcagagttaaaatatatatagttagattccaacttcctccttcactctaaaaataraatccaaacccactcttcatatatgcttccaraatggggcttaagtaccaatctctgctttgcaatgggcacaatcttggtcatgtcctgaggctctctaaraaaagagaggatctaggatgggagagctagaaagttgctaactgggaagaacaaggccctgagggsttggtctaccaatctgggaagatttgaaaacaaacttctcgcaactgaaggaaggctgaaggctgctgcaagtcattgagtgactttaggatgagcaaaacattgggccacttcctaatgccctatgtgtatagtaccagaagcaaggtctcagacttaacagacccagctctgttccaaggtgagtctgaaccaatagaaagcaaacatgtgcagatatccaaacaagactgctcatgcaagtcggggctggctacccgtcttaggcagcaacagcagagctccagggagcttattcaatatttactgagacttcgaagacccagcagatgtttaatgaagtcactattttggctcaaaccctccacttctccccctcccctcaaaaagccaacaggtaaacacataaatgaaagaaacccacagaaggggatgggaaataaagaaaattctctcaagacttctccaggcccatgtcactggtcagcgtggtttttatgtgtattaggattgggggatgtgaagaaataagtatccagtactttataaccaaagcaattaaatgatattgggtagggaatgttggccagttttgtttagttttgcatcacattgtcaccagactcactagcccaagtaatcgggcgcccgaagagggagacagagatgtgcagagttgaccagtgtgcggatgataactactgacgaaagagtcatcgactcagttagtggttggatgtagtcacattrgtttgcctctccccatctttgtctccctggcaaggagaatatgcgggacatgatgctaagagycctgggtaaatgtggtgagaatgcacgcgtgcatatgctacacatatgtgcttytcagttgcagaaaatgaactgctttgggagattatcagtagaaagrgtgttatcatattggtgctgagtgctatgtgtgcttatacaatttgttcttgtattttaataaactttgaataaaagaataaagcta

SEQ ID NO: 4099 - DNA, 2590 bp, Homo sapiens
tataggccgcgagatggggaagatggcagcggccgtgggctctgtggcgactctggcgactgagcccggggaggacgcctttcggaaacttttccgcttctaccgtcagagccggcccgggaccgcagacctggaaggggtcatcgacttctcggcggcccacgcagcccgtggcaagggtcctggtgcccaaaaggtgatcaaatctcagctaaatgtgtcttctgtcagtgagcagaatgcatatagagcaggtcttcagcccgtcagcaagtggcaagcctatggactcaaaggctatcctgggtttatttttatcccaaaccccttcctcccaggttaccagtggcactgggtgaaacagtgccttaagttatattcccagaaacctaatgtatgtaacctggacaaacacatgtctaaagaagagacccaagatctgtgggaacagagcaaagagttcctgaggtataaagaagcgactaaacggagaccccgaagtttactggagaaactgcgttgggtgaccgtaggctaccattataactgggacagtaagaaatactcagcagatcattacacacctttcccttctgacctgggtttcctctcagagcaagtagccgctgcctgtggatttgaggatttccgagctgaagcagggatcctgaattactaccgcctggactccacactgggaatccacgtagacagatctgagctagatcactccaaacccttgctgtcattcagctttggacagtccgccatcttyctcctgggtggtcttcaaagggatgaggcccccacggccatgtttatgcacagtggtgacatcatgataatgtcgggtttcagccgcctcttgaaccacgcagtccctcgtgtccttccaaatccagaaggggaaggcctgcctcactgcctagaggcacctctccctgctgtcctcccgagagattcaatggtagagccttgttctwtggaggactggcaggtgtgtgccagytacttgaagaccgctcgtrttaacatgactgtccgacaggtcctggccacagaccagaatttccctctagaayccatcgaggatgaaaaaagagacatcagtacagaaggtttctgccatctggatgaccagaatagcgaagtaaaacgggccaggataaaccctgacagctgagacttggagatcccatcctttttactcaggcacctgcttaccgtaaatgatcatgttattgtgtattgccgtggacttcagcacccagacaagccaaaaacagagacagggaagaactcattgttgatcacactgttgccttggaacccacgcagaagtaaactcakccactttgctcagagaagtgtttgacatggtctgttcctagttacatgttggctgtaatgtatgttgagaagtcagtccaaggaggtatgttcttccacaacagccttctcagcctctgctatttcctttgaggaaggtagaagtgagtttccatgtttgcagagtatttaaatacctcagattttattaatgagaaatacagtacccctccctccactccatctggtaatttatggtaaaattgtggttctgtgaaccagctattagtctcatcttcttaactccctcaggcatcatcaaattctttgatcttctcttccacctctctggctctcatggaagaatcctttacacatgaaaacaatggaactggaaaatcttgtcttttagaaaagaaattaatcacaactatctctcttgcctaaaagataaatataggtaaacccaaggaaaggggaatttagtttctctacatgtcatttcggtctccaaactccctgttggctttttaatgcaattttaattgttggaataaaaaagtcccaagggtgttttgttactgttttctccatgaataaactcacttgattttaaattaaagatctatatctgtctttggggtttagtctatctgggattaaggtttttttttctgtttttctttgctgtattgttcatgctattgaagccctctagctgtttctgccctacaccattctgctgtgccctaagtattctttgtggctgtctcacagaagagagaacatttcttaatattccagtcactgctgttattgtctgagggtaggcagcttggaaaaatgtaggcaacaccaagttttaatctttatacccccaacaatttgactgactatatcatggtccaggttactttacatttctctggacctcggtttcctcatcataaaatgaagatactgtagactaccatcttcctaaarggatattggtatttgaaagagaattaagtgctcctttctacaaacatgatgtgccaaaattgttttattataagggctctttgaaacatcctaacttccttgtgtggaggactggctggaagcccatttggtacctactgtttgcaatgcatgttattaagtttacatgtctcctctgtcctgctctgccccttttttaaattactggcattgaatattgagttcatatggtaatagcagggtttttaaatgaataaaaattatggatttatctctt

SEQ ID NO: 4100 - DNA, 3281 bp, Homo sapiens
tgcgggcgtctccgccattttgtgagtctataactcggagccgttgggtcggttcctgctattccggcgcctccactccgtcccccgcgggtctgctctgtgtgccatggacggcattgtcccagatatagccgttggtacaaagcggggatctgacgagcttttctctacttgtgtcactaacggaccgtttatcatgagcagcaactcggcttctgcagcaaacggaaatgacagcaagaagttcaaaggtgacagccgaagygcaggcgtcccctctagagtgatccacatccggaagctccccatcgacgtcacggagggggaagtcatctccctggggctgccctttgggaaggtcaccaacctcctgatgctgaaggggaaaaaccaggccttcatcgagatgaacacggaggaggctgccaayaccatggtgaactactacacctcggtgacccctgtgctgcgcggccagcccatctacatccagttctcyaaccacaaggagctgaagaccgacagctctcccaaccaggcgcgggcccaggcggccctgcaggcggtgaactcggtccagtcggggaacctggccttggctgcctcggcggcggccgtggaygcagggatggcgatggccgggcagagcccygtgctcaggatcatcgtggagaacctcttctaccctgtgaccctggatgtgctgcaccagattttctccaagttcggcacagtgttgaagatcatcaccttcaccaagaacaaccagttccaggccctgctgcagtatgcggaccccgtgagcgcccagcacgccaagctgtcgctggacgggcagaacatctacaacgcctgctgcacgctgcgcatcgacttttccaagctcaccagcctcaacgtcaagtacaacaatgacaagagcygtgactacacacgcccagacctgccttccggggacagccagccctcgctggaccagaccatggccgcggccttcggtgcacctggtataatctcagcctctccgtatgcaggagctggtttccctcccacctttgccattcctcaagctgcaggcctttccgttccgaacgtccacggcgccctggcccccctggccatcccctcggcggcggcggcagctgcggcggcaggtcggatcgccatcccgggcctggcgggggcaggaaattctgtattgctggtcagcaacctcaacccagagagagtcacaccccaaagcctctttattcttttcggcgtctacggtgacgtgcagcgcgtgaagatcctgttcaataagaaggagaacgccctagtgcagatggcggacggcaaccaggcccagctggccatgagccacctgaacgggcacaagctgcacgggaagccsatccgcatcacgctctcgaagcaccagaacgtgcagctgccccgygagggccaggaggaccagggcctgaccaaggactacggcaactcacccctgcaccgcttcaagaagccgggctccaagaacttccagaacatattcccgccctcggccackctgcacctctccaacatcccgccctcagtctccgaggaggatctcaaggtmctgttttccagcaatgggggcgtcgtcaaaggattcaagttcttccagaaggaccgcaagatggcactgatccagatgggctccgtggaggaggcggtccaggccctcattgacctgcacaaccacgacctcggggagaaccaccacctgcgggtctccttctccaagtccaccatctaggggcacaggcccccacggccgggccccctggcgacaacttccatcattccagagaaaagccactttaaaaacagctgaagtgaccttagcagaccagagattttattttttwaaagagaaatcagtttacctgtttttaaaaaaattaaatctagttcaccttgctcaccctgcggtgacagggacagctcaggctcttggtgactgtggcagcgggagttcccggccctccacacccggggccagaccctcggggccatgccttggtggggcctgtgtcgggcgtggggcctgcaggtgggcgccccgaccacgacttggcttccttgtgccttaaaaaacctgccttcctgcagccacacacccacccggggtgtcctggggacccaaggggtgrgggggtyacaccagagagaggcagggggcctggccggctcctgcaggatcatgcagctggggcgcggcggccgcggctgcgacaccccaaccccagccctctaatcaagtcacgtgattctcccttcaccccgcccccagggccttcccttctgcccccaggcgggctccccgctgctccagctgcggagctggtcgacataatctctgtattatatactttgcagttgcagacgtctgtgcctagcaatatttccagttgaccaaatattctaatcttttttcatttatatgcaaaagaaatagttttaagtaactttttatagcaagatgatacaatggtatgagtgtaatctaaacttccttgtggtattaccttgtatgctgttacttttattttattccttgtaattaagtcacaggcaggacccagtttccagagagcaggcggggccgcccagtgggtcaggcacagggagccccggtcctatcttagagcccctgagcttcagggaaggggcgggcgtgtcgccgcctctggcatcgcctccggttgccttacaccacgccttcacctgcagtcgcctagaaaacttgctctcaaacttcagggttttttyttccttcaaattttggaccaaagtctcatttctgtgttttgcctgcctctgatgctgggacccggaargcgggcgctcctcctgtcttctctgtgctctttctaccgcccccgcgtcctgtcccgggggctctcctaggatcccctttccgtaaaagcgtgtaacaagggtgtaaatatttataattttttatacctgttgtgagacccgaggggcggcggcgcggttttttatggtgacacaaatgtatattttgctaacagcaattccaggctcagtattgtgaccgcggagccacaggggaccccacgcacattccgttgccttacycgatggcttgtgacgcggagagaaccgattaaaaccktttgagaaactcctcccttgtctagccctgtgttcgctgtggacgctgtagaggcaggttggccagtctgtacctggacttcgaataaatcttctgtatcctcgctccgttccgcctt

SEQ ID NO: 4101 - DNA, 3260 bp, Homo sapiens
tgcgggcgtctccgccattttgtgagtctataactcggagccgttgggtcggttcctgctattccggcgcctccactccgtcccccgcgggtctgctctgtgtgccatggacggcattgtcccagatatagccgttggtacaaagcggggatctgacgagcttttctctacttgtgtcactaacggaccgtttatcatgagcagcaactcggcttctgcagcaaacggaaatgacagcaagaagttcaaaggtgacagccgaagygcaggcgtcccctctagagtgatccacatccggaagctccccatcgacgtcacggagggggaagtcatctccctggggctgccctttgggaaggtcaccaacctcctgatgctgaaggggaaaaaccaggccttcatcgagatgaacacggaggaggctgccaayaccatggtgaactactacacctcggtgacccctgtgctgcgcggccagcccatctacatccagttctcyaaccacaaggagctgaagaccgacagctctcccaaccaggcgcgggcccaggcggccctgcaggcggtgaactcggtccagtcggggaacctggccttggctgcctcggcggcggccgtggaygcagggatggcgatggccgggcagagcccygtgctcaggatcatcgtggagaacctcttctaccctgtgaccctggatgtgctgcaccagattttctccaagttcggcacagtgttgaagatcatcaccttcaccaagaacaaccagttccaggccctgctgcagtatgcggaccccgtgagcgcccagcacgccaagctgtcgctggacgggcagaacatctacaacgcctgctgcacgctgcgcatcgacttttccaagctcaccagcctcaacgtcaagtacaacaatgacaagagcygtgactacacacgcccagacctgccttccggggacagccagccctcgctggaccagaccatggccgcggccttcgcctctccgtatgcaggagctggtttccctcccacctttgccattcctcaagctgcaggcctttccgttccgaacgtccacggcgccctggcccccctggccatcccctcggcggcggcggcagctgcggcggcaggtcggatcgccatcccgggcctggcgggggcaggaaattctgtattgctggtcagcaacctcaacccagagagagtcacaccccaaagcctctttattcttttcggcgtctacggtgacgtgcagcgcgtgaagatcctgttcaataagaaggagaacgccctagtgcagatggcggacggcaaccaggcccagctggccatgagccacctgaacgggcacaagctgcacgggaagccsatccgcatcacgctctcgaagcaccagaacgtgcagctgccccgygagggccaggaggaccagggcctgaccaaggactacggcaactcacccctgcaccgcttcaagaagccgggctccaagaacttccagaacatattcccgccctcggccackctgcacctctccaacatcccgccctcagtctccgaggaggatctcaaggtmctgttttccagcaatgggggcgtcgtcaaaggattcaagttcttccagaaggaccgcaagatggcactgatccagatgggctccgtggaggaggcggtccaggccctcattgacctgcacaaccacgacctcggggagaaccaccacctgcgggtctccttctccaagtccaccatctaggggcacaggcccccacggccgggccccctggcgacaacttccatcattccagagaaaagccactttaaaaacagctgaagtgaccttagcagaccagagattttattttttwaaagagaaatcagtttacctgtttttaaaaaaattaaatctagttcaccttgctcaccctgcggtgacagggacagctcaggctcttggtgactgtggcagcgggagttcccggccctccacacccggggccagaccctcggggccatgccttggtggggcctgtgtcgggcgtggggcctgcaggtgggcgccccgaccacgacttggcttccttgtgccttaaaaaacctgccttcctgcagccacacacccacccggggtgtcctggggacccaaggggtgrgggggtyacaccagagagaggcagggggcctggccggctcctgcaggatcatgcagctggggcgcggcggccgcggctgcgacaccccaaccccagccctctaatcaagtcacgtgattctcccttcaccccgcccccagggccttcccttctgcccccaggcgggctccccgctgctccagctgcggagctggtcgacataatctctgtattatatactttgcagttgcagacgtctgtgcctagcaatatttccagttgaccaaatattctaatcttttttcatttatatgcaaaagaaatagttttaagtaactttttatagcaagatgatacaatggtatgagtgtaatctaaacttccttgtggtattaccttgtatgctgttacttttattttattccttgtaattaagtcacaggcaggacccagtttccagagagcaggcggggccgcccagtgggtcaggcacagggagccccggtcctatcttagagcccctgagcttcagggaaggggcgggcgtgtcgccgcctctggcatcgcctccggttgccttacaccacgccttcacctgcagtcgcctagaaaacttgctctcaaacttcagggttttttyttccttcaaattttggaccaaagtctcatttctgtgttttgcctgcctctgatgctgggacccggaargcgggcgctcctcctgtcttctctgtgctctttctaccgcccccgcgtcctgtcccgggggctctcctaggatcccctttccgtaaaagcgtgtaacaagggtgtaaatatttataattttttatacctgttgtgagacccgaggggcggcggcgcggttttttatggtgacacaaatgtatattttgctaacagcaattccaggctcagtattgtgaccgcggagccacaggggaccccacgcacattccgttgccttacycgatggcttgtgacgcggagagaaccgattaaaaccktttgagaaactcctcccttgtctagccctgtgttcgctgtggacgctgtagaggcaggttggccagtctgtacctggacttcgaataaatcttctgtatcctcgctccgttccgcctt

SEQ ID NO: 4102 - DNA, 3203 bp, Homo sapiens
tgcgggcgtctccgccattttgtgagtctataactcggagccgttgggtcggttcctgctattccggcgcctccactccgtcccccgcgggtctgctctgtgtgccatggacggcattgtcccagatatagccgttggtacaaagcggggatctgacgagcttttctctacttgtgtcactaacggaccgtttatcatgagcagcaactcggcttctgcagcaaacggaaatgacagcaagaagttcaaaggtgacagccgaagygcaggcgtcccctctagagtgatccacatccggaagctccccatcgacgtcacggagggggaagtcatctccctggggctgccctttgggaaggtcaccaacctcctgatgctgaaggggaaaaaccaggccttcatcgagatgaacacggaggaggctgccaayaccatggtgaactactacacctcggtgacccctgtgctgcgcggccagcccatctacatccagttctcyaaccacaaggagctgaagaccgacagctctcccaaccaggcgcgggcccaggcggccctgcaggcggtgaactcggtccagtcggggaacctggccttggctgcctcggcggcggccgtggaygcagggatggcgatggccgggcagagcccygtgctcaggatcatcgtggagaacctcttctaccctgtgaccctggatgtgctgcaccagattttctccaagttcggcacagtgttgaagatcatcaccttcaccaagaacaaccagttccaggccctgctgcagtatgcggaccccgtgagcgcccagcacgccaagctgtcgctggacgggcagaacatctacaacgcctgctgcacgctgcgcatcgacttttccaagctcaccagcctcaacgtcaagtacaacaatgacaagagcygtgactacacacgcccagacctgccttccggggacagccagccctcgctggaccagaccatggccgcggccttcggcctttccgttccgaacgtccacggcgccctggcccccctggccatcccctcggcggcggcggcagctgcggcggcaggtcggatcgccatcccgggcctggcgggggcaggaaattctgtattgctggtcagcaacctcaacccagagagagtcacaccccaaagcctctttattcttttcggcgtctacggtgacgtgcagcgcgtgaagatcctgttcaataagaaggagaacgccctagtgcagatggcggacggcaaccaggcccagctggccatgagccacctgaacgggcacaagctgcacgggaagccsatccgcatcacgctctcgaagcaccagaacgtgcagctgccccgygagggccaggaggaccagggcctgaccaaggactacggcaactcacccctgcaccgcttcaagaagccgggctccaagaacttccagaacatattcccgccctcggccackctgcacctctccaacatcccgccctcagtctccgaggaggatctcaaggtmctgttttccagcaatgggggcgtcgtcaaaggattcaagttcttccagaaggaccgcaagatggcactgatccagatgggctccgtggaggaggcggtccaggccctcattgacctgcacaaccacgacctcggggagaaccaccacctgcgggtctccttctccaagtccaccatctaggggcacaggcccccacggccgggccccctggcgacaacttccatcattccagagaaaagccactttaaaaacagctgaagtgaccttagcagaccagagattttattttttwaaagagaaatcagtttacctgtttttaaaaaaattaaatctagttcaccttgctcaccctgcggtgacagggacagctcaggctcttggtgactgtggcagcgggagttcccggccctccacacccggggccagaccctcggggccatgccttggtggggcctgtgtcgggcgtggggcctgcaggtgggcgccccgaccacgacttggcttccttgtgccttaaaaaacctgccttcctgcagccacacacccacccggggtgtcctggggacccaaggggtgrgggggtyacaccagagagaggcagggggcctggccggctcctgcaggatcatgcagctggggcgcggcggccgcggctgcgacaccccaaccccagccctctaatcaagtcacgtgattctcccttcaccccgcccccagggccttcccttctgcccccaggcgggctccccgctgctccagctgcggagctggtcgacataatctctgtattatatactttgcagttgcagacgtctgtgcctagcaatatttccagttgaccaaatattctaatcttttttcatttatatgcaaaagaaatagttttaagtaactttttatagcaagatgatacaatggtatgagtgtaatctaaacttccttgtggtattaccttgtatgctgttacttttattttattccttgtaattaagtcacaggcaggacccagtttccagagagcaggcggggccgcccagtgggtcaggcacagggagccccggtcctatcttagagcccctgagcttcagggaaggggcgggcgtgtcgccgcctctggcatcgcctccggttgccttacaccacgccttcacctgcagtcgcctagaaaacttgctctcaaacttcagggttttttyttccttcaaattttggaccaaagtctcatttctgtgttttgcctgcctctgatgctgggacccggaargcgggcgctcctcctgtcttctctgtgctctttctaccgcccccgcgtcctgtcccgggggctctcctaggatcccctttccgtaaaagcgtgtaacaagggtgtaaatatttataattttttatacctgttgtgagacccgaggggcggcggcgcggttttttatggtgacacaaatgtatattttgctaacagcaattccaggctcagtattgtgaccgcggagccacaggggaccccacgcacattccgttgccttacycgatggcttgtgacgcggagagaaccgattaaaaccktttgagaaactcctcccttgtctagccctgtgttcgctgtggacgctgtagaggcaggttggccagtctgtacctggacttcgaataaatcttctgtatcctcgctccgttccgcctt

SEQ ID NO: 4103 - DNA, 3806 bp, Homo sapiens
ggcaggcggcgcgggcgcatgcgcaggcgcgggccggtggggtggcctggagcggcgtgcgtaatgtcggcactttgctggggccgcggagcggcggggctcaaacgagccctacggccttgcggccgcccgggactccccggcaaagaagggaccgccggtggcgtctgcggcyccaggaggagctcgtccgccagcccccaggagcaagaccaagaccgcaggaaggactggggccacgtggagctgctggaggtgctccaggcgcgggtgcggcagctgcaggctgagagcgtgtcggaggtggtggtgaacagggtggatgtggcgcggctcccagaatgtggcagtggagatggtagcctccagccacccaggaaggtccagatgggggccaaggatgccaccccggtgccctgtggccgctgggcaaagatactggagaaggataagcggacccagcagatgcgtatgcagcggttgaaggcgaagctgcagatgccattccagagcggggagttcaaggcgctgaccaggcgcctgcaggtggagccccggctcctgagcaagcagatggcygggtgcctggaggactgcacgcgccaggcccccgagagcccctgggaggagcagctggcccggctgctgcaggaggcccctgggaagctgagcctcgatgtggagcaggccccgtcggggcagcactcgcaggcccagctctcaggtcagcagcagaggctcctggccttcttcaagtgctgcctgctcactgaccagctgcccctygcccaccacctgctggtcgtccaccacggccagcggcagaagcggaagctgctcacgctggacatgtacaacgccgtgatgcttggctgggcgcggcagggtgccttcaaggagctggtatatgtgttattcatggtgaaggatgccggcttgacyccggacctgctgtcctatgcggctgccctccagtgcatggggaggcaggaccaggacgccgggaccatcgaaaggtgtctggaacagatgagccaggaggggctgaagctgcaggcactcttcaccgccgttctgctgtctgaggaggatcgggccactgttctgaaggccgtgcacaaggtgaagcccaccttcagcctcccgccgcagctgccgcccccggtcaacacctccaagctgctcagggacgtgtatgccaaggatgggcgtgtgtcctacccgaagctgcacctgcccttgaagaccctgcagtgcctcyttgagaagcagctccacatggagctggccagcagggtgtgcgtggtgtccgtggagaagcccacgttgccaagcaaggaggtcaagcacgcgcggaagaccctgaagaccctgcgggaccaatgggagaaagcactgtgccgggcgctgcgggagaccaagaaccgcctagagcgcgaggtgtacgagggccggttctcactttaccccttcctgtgcctgctggacgagcgcgaggtggtgcggatgctcctgcaggtcctgcaggcgctgcccgcccaaggtgagtccttcaccaccctggcccgggagctgagtgcgcgyactttcagccggcacgtggtgcagaggcagcgggtcagtggccaggtgcaggcgctgcagaaccactacaggaagtacctctgcttgctggcctccgacgccgaggtgcccgagccctgcctgccgcggcagtactgggaggmgctgggggcscccgaggccctgcgggagcagccctggcccctgccagtgcagatggagctgggcaagctgctggcggagatgctggtgcaggctacgcagatgccatgcagcctggacaagccgcatcrttcctctcggcttgtccccgtgctctaccacgtgtattccttccgcaacgtccagcagatcggcatcctgaagccgcacccggcctacgtgcagctgctggagaaggccgcggarcccacgctgaccttcgaggcggtggatgtacccatgctttgccccccgctgccctggacatcgccgcactctggtgcyttcctgctcagccccaccaagctgatgcgcacggtggaaggcgccacgcagcaccaggagctgctggaaacctgcccgcccaccgcgctgcatggcgcactggacgccctcacccaactgggcaactgcgcctggcgcgtcaacgggcgcgtgctggacctggtgctgcagctcttccaggccaagggctgcccccagctaggcgtgccggccccgccctccgaggcgccccagccgcccgaggcccacctgccgcacagcgccgcgccygcccgcaaggccgagctgcrccgtgagctggcgcactgccagaaggtggcccgggagatgcacagcctgcgggcggaggcgctgtaccgcctctcgctggcgcagcacctgcgggaccgcgtcttctggctgccgcacaacatggacttccgcggccgcacctacccctgcccgccgcacttcaaccacctgggcagcgacgtggcgcgggccctgctggagttcgcccagggccgcccgctcggcccgcacggcctggattggctcaagatccacctggtcaatctcacggggttgaagaagcgggagccgctgcggaagcgcctggcctttgcggaggaggtgatggatgacatcctggactccgcggaccaacccttgacgggccgaaagtggtggatgggcgcggaggaaccctggcagacgctggcctgctgtatggaggtggcgaacgctgtgcgcgcctccgaccctgccgcctatgtctcccacctccccgtccatcaggacggctcttgcaacggcctgcagcattatgctgctctgggccgcgacagcgtgggcgccgcctccgtcaacctggagccctcggatgtgccgcaggacgtgtacagcggcgtggccgcgcaggtggaggtgttccgtaggcaggacgcccagcggggcatgcgggtggcacaggtgctggaaggtttcatcacccgcaaggtggtgaagcagacggtgatgacggtggtgtacggggtcacgcgctatggygggcgcctgcagattgagaagcgcctccgggagctgagcgactttccccaggagttcgtgtgggaggcctctcactatctcgtacgccaggtcttcaagagtctacaggagatgttctcggggacccgggccatccagcactggctgaccgagagtgcccgcctcatctcccacatgggctctgtggtggagtgggtcacacccctgggcgtccccgtcatccagccstatcgcctggactccaaggtcaagcaaataggaggtggaattcagagcatcacctacacccacaayggagacatcagccgaaagcccaacacacgtaagcagaagaacggcttcccgcccaacttcatccactcgctggactcctcccacatgatgctcaccgccctgcactgctacaggaagggcctgaccttcgtctctgtgcacgactgttactggactcacgcagctgatgtctccgtcatgaaccaggtgtgccgggagcagtttgtccgcttgcacagcgagcccatcctgcaggacctgtccagattcctggtcaagcggttctgctctgagccccagaagatcttggaggccagccagctgaaggagacactgcaggcggtgcccaagccaggggccttcgacctggagcaggtgaagcgttccacctacttcttcagctgacaccccgtgagccttgtcagtgtgtaaataaagctcttttgccaccccca

SEQ ID NO: 4104 - DNA, 3902 bp, Homo sapiens
ctttgcacctgggcgtgcgcagcccaccgacccggccccgctttccactcgcccttgcccgcttttcgactgaggctcctccgtgcagtctgacctttgactcgtggtttcttatgcagcctcctgaccccagggaccgccggtggcgtctgcggcyccaggaggagctcgtccgccagcccccaggagcaagaccaagaccgcaggaaggactggggccacgtggagctgctggaggtgctccaggcgcgggtgcggcagctgcaggctgagagcgtgtcggaggtggtggtgaacagggtggatgtggcgcggctcccagaatgtggcagtggagatggtagcctccagccacccaggaaggtccagatgggggccaaggatgccaccccggtgccctgtggccgctgggcaaagatactggagaaggataagcggacccagcagatgcgtatgcagcggttgaaggcgaagctgcagatgccattccagagcggggagttcaaggcgctgaccaggcgcctgcaggtggagccccggctcctgagcaagcagatggcygggtgcctggaggactgcacgcgccaggcccccgagagcccctgggaggagcagctggcccggctgctgcaggaggcccctgggaagctgagcctcgatgtggagcaggccccgtcggggcagcactcgcaggcccagctctcaggtcagcagcagaggctcctggccttcttcaagtgctgcctgctcactgaccagctgcccctygcccaccacctgctggtcgtccaccacggccagcggcagaagcggaagctgctcacgctggacatgtacaacgccgtgatgcttggctgggcgcggcagggtgccttcaaggagctggtatatgtgttattcatggtgaaggatgccggcttgacyccggacctgctgtcctatgcggctgccctccagtgcatggggaggcaggaccaggacgccgggaccatcgaaaggtgtctggaacagatgagccaggaggggctgaagctgcaggcactcttcaccgccgttctgctgtctgaggaggatcgggccactgttctgaaggccgtgcacaaggtgaagcccaccttcagcctcccgccgcagctgccgcccccggtcaacacctccaagctgctcagggacgtgtatgccaaggatgggcgtgtgtcctacccgaagctgcacctgcccttgaagaccctgcagtgcctcyttgagaagcagctccacatggagctggccagcagggtgtgcgtggtgtccgtggagaagcccacgttgccaagcaaggaggtcaagcacgcgcggaagaccctgaagaccctgcgggaccaatgggagaaagcactgtgccgggcgctgcgggagaccaagaaccgcctagagcgcgaggtgtacgagggccggttctcactttaccccttcctgtgcctgctggacgagcgcgaggtggtgcggatgctcctgcaggtcctgcaggcgctgcccgcccaaggtgagtccttcaccaccctggcccgggagctgagtgcgcgyactttcagccggcacgtggtgcagaggcagcgggtcagtggccaggtgcaggcgctgcagaaccactacaggaagtacctctgcttgctggcctccgacgccgaggtgcccgagccctgcctgccgcggcagtactgggaggmgctgggggcscccgaggccctgcgggagcagccctggcccctgccagtgcagatggagctgggcaagctgctggcggagatgctggtgcaggctacgcagatgccatgcagcctggacaagccgcatcrttcctctcggcttgtccccgtgctctaccacgtgtattccttccgcaacgtccagcagatcggcatcctgaagccgcacccggcctacgtgcagctgctggagaaggccgcggarcccacgctgaccttcgaggcggtggatgtacccatgctttgccccccgctgccctggacatcgccgcactctggtgcyttcctgctcagccccaccaagctgatgcgcacggtggaaggcgccacgcagcaccaggagctgctggaaacctgcccgcccaccgcgctgcatggcgcactggacgccctcacccaactgggcaactgcgcctggcgcgtcaacgggcgcgtgctggacctggtgctgcagctcttccaggccaagggctgcccccagctaggcgtgccggccccgccctccgaggcgccccagccgcccgaggcccacctgccgcacagcgccgcgccygcccgcaaggccgagctgcrccgtgagctggcgcactgccagaaggtggcccgggagatgcacagcctgcgggcggaggcgctgtaccgcctctcgctggcgcagcacctgcgggaccgcgtcttctggctgccgcacaacatggacttccgcggccgcacctacccctgcccgccgcacttcaaccacctgggcagcgacgtggcgcgggccctgctggagttcgcccagggccgcccgctcggcccgcacggcctggattggctcaagatccacctggtcaatctcacggggttgaagaagcgggagccgctgcggaagcgcctggcctttgcggaggaggtgatggatgacatcctggactccgcggaccaacccttgacgggccgaaagtggtggatgggcgcggaggaaccctggcagacgctggcctgctgtatggaggtggcgaacgctgtgcgcgcctccgaccctgccgcctatgtctcccacctccccgtccatcaggacggctcttgcaacggcctgcagcattatgctgctctgggccgcgacagcgtgggcgccgcctccgtcaacctggagccctcggatgtgccgcaggacgtgtacagcggcgtggccgcgcaggtggaggtgttccgtaggcaggacgcccagcggggcatgcgggtggcacaggtgctggaaggtttcatcacccgcaaggtggtgaagcagacggtgatgacggtggtgtacggggtcacgcgctatggygggcgcctgcagattgagaagcgcctccgggagctgagcgactttccccaggagttcgtgtgggaggcctctcactatctcgtacgccaggtcttcaagagtctacaggagatgttctcggggacccgggccatccagcactggctgaccgagagtgcccgcctcatctcccacatgggctctgtggtggagtgggtcacacccctgggcgtccccgtcatccagccstatcgcctggactccaaggtcaaggaggtggaattcagagcatcacctacacccacaayggagacatcagccgaaagcccaacacacgtaagcagaagaacggcttcccgcccaacttcatccactcgctggactcctcccacatgatgctcaccgccctgcactgctacaggaagggcctgaccttcgtctctgtgcacgactgttactggactcacgcagctgatgtctccgtcatgaaccaggtgcccccgtagtctgagcctcagtccacccatgggtggggcccccacactggggcgttgggtaggggtggtgcccagagcctgcctgatcacccctggggatcctctgactcctgcccaggtgtgccgggagcagtttgtccgcttgcacagcgagcccatcctgcaggacctgtccagattcctggtcaagcggttctgctctgagccccagaagatcttggaggccagccagctgaaggagacactgcaggcggtgcccaagccaggggccttcgacctggagcaggtgaagcgttccacctacttcttcagctgacaccccgtgagccttgtcagtgtgtaaataaagctcttttgccaccccca

SEQ ID NO: 4105 - DNA, 3012 bp, Homo sapiens
atggatggttcccagtggatggatgggtgggtgatgggtcggtgagtgggtggatgttgggggcataggtgtttgggtggatggaggatgagtgagtgggtgtgtgatgtgtagatggtcgagttacagatggagcatctgtggatggatgaataactcatgggggaaagagtggctgggagcgggttggatctgtggataggtgagtgagacggtggatggccctgaattcatggagggctggacagacgcctccgcgagggagagcagggtgaacctggcccaccttgtccccacagctgcccatagtggcttcttccatcgtatccttgtacttcctggagctgaccgacctcttcaagccggccaaggtgggcttccagtgctatgaccgcactctctccatgccctacgtggagaccaacgaggagctcatcccgctgctgatgctgctcagcttggccttcgcggcccctgccgcctcgatcatggtrgccgagggcatgttgtactgtctgcagtcccggctgtggggccgtgccggggggcccgccggggcggagggcagcatcaacgccggcggctgcaacttcaactccttcctgcggcgtacggtgcggtttgtgggtgtccacgtgttcggcctgtgtgccacagccctggtgacggacgtgatccagctggccacgggttaccacactcccttcttcctcaccgtctgcaagcccaactacactctcctgggcacgtcctgcgaggtcaacccctacatcacgcaggacatctgctccggccacgacayccacgccatcctgtctgcacggaagaccttcccgtcccagcacgccacgctgtcagccttcgccgcggtctatgtgtcgatgtacttcaactcggtcatctcggacaccaccaagctgctgaagcccatcctggtcttcgcctttgccatcgccrcgggcgtatgcgggctcacgcagatcacgcagtaccgcagccaccctgtggacgtgtatgccggcttcctcatcggggcrggcatcgctgcctacctggcctgccacgcggtgggcaacttccaggccccacctgcagagaagcccgcggccycggcccccgccaaggacgcgctgcgggccctgacgcagcggggccacgactcggtttatcagcagaataagtcggtgagcaccgacgagctggggcccccagggcggctggagggcgcgccccggcccgtggcccgcgagaagacctcgctgggcagcctgaagcgcgccagcgtggacgtggacctgctggccccgcgcagccccatggccaaggagaacatggtgaccttcagccacacgctgcccagggccagcgcgccctcgctggacgaccccgcgcgccgccacatgaccatccacgtgccgctggacgcctcgcgctccaagcagctcatcagcgagtggaagcagaagagcctggagggccgcggcctggggctgcccgacgacgccagccccgggcacctgcgcgcgcccgccgaacccatggcggaggaggaggaagaggaggaggacgaagaggaagaggaggaggaggaagaggaggaggacgagggcccggccccgccctcgctctaccccaccgtgcaggcgcggccggggctggggcctcgggtcatcctcccaccgcgcgcggggccgccgccgctggtgcacatcccggaggagggcgcgcagrcgggggccggcctgtcccccaaaagcggcgccggggtgcgcgccaagtggctcatgatggccgagaagagcggggcggcagtggccaaccctccgcggctgctgcaggtcatcgccatgtccaaggctccgggcgcgccgggccccaaggcggccgagacggcgtcgtcgtccagcgccagctccgactcctcgcagtaccggtcgccgtcggaccgcgactccgccagcatcgtgaccatcgacgcgcacgcgccgcaccaccccgtggtgcacctgtcggccggcggcgcgccctgggagtggaaggcggcgggcggcggggccaaggcggaggccgacggcggctacgagctgggggacctggcgcgcggcttccgcggcggggccaagcccccgggcgtgtcccccggctcgtcsgtcagcgacgtggaccaggaggagccgcggttcggggccgtggccaccgtcaacctggccacgggcgaggggctgcccccgctgggcgcggccgatggggcgctgggcccgggcagccgggagtccacgctgcggcgccacgygggcggcctggggctggcggagcgcgaggcggaggcggaggccgagggctacttccgcaagatgcaggcgcgccgcttccccgactagcgcggcggggccgggggcgggcggggggcgggccgagggcgcgggcggccgcgcggatgctcaataaagcggcagaaaccgaggtccggctcttggtcattcgctctggcccgcacgccccacgcagggacccccactctcagggccgggcccaccccgcccgtggccccacctggcgcttcggcggacacccgggcgggagtcggggccgcccgcggcacagaaagaggaagccagcaacgaaggcggaacggagcgaggatacagaagatttattcgaagtccaggtacagactggccaacctgcctctacagcgtccacagcgaacacagggctagacaagggaggagtttctcaaamggttttaatcggttctctccgcgtcacaagccatcgrgtaaggcaacggaatgtgcgtggggtcccctgtggctccgcggtcacaatactgagcctggaattgctgttagcaaaatatacatttgtgtcaccataaaaaaccgcgccgccgcccctcgggtctcacaacaggtataaaaaattataaatatttacacccttgttacacgcttttacggaaaggggatcctaggagagcccccgggacaggacgcgggggcggtagaaaga

SEQ ID NO: 4106 - DNA, 1961 bp, Homo sapiens
atggatggttcccagtggatggatgggtgggtgatgggtcggtgagtgggtggatgttgggggcataggtgtttgggtggatggaggatgagtgagtgggtgtgtgatgtgtagatggtcgagttacagatggagcatctgtggatggatgaataactcatgggggaaagagtggctgggagcgggttggatctgtggataggtgagtgagacggtggatggccctgaattcatggagggctggacagacgcctccgcgagggagagcagggtgaacctggcccaccttgtccccacagctgcccatagtggcttcttccatcgtatccttgtacttcctggagctgaccgacctcttcaagccggccaaggtgggcttccagtgctatgaccgcactctctccatgccctacgtggagaccaacgaggagctcatcccgctgctgatgctgctcagcttggccttcgcggcccctgccgcctcgatcatggtrgccgagggcatgttgtactgtctgcagtcccggctgtggggccgtgccggggggcccgccggggcggagggcagcatcaacgccggcggctgcaacttcaactccttcctgcggcgtacggtgcggtttgtgggtgtccacgtgttcggcctgtgtgccacagccctggtgacggacgtgatccagctggccacgggttaccacactcccttcttcctcaccgtctgcaagcccaactacactctcctgggcacgtcctgcgaggtcaacccctacatcacgcaggacatctgctccggccacgacayccacgccatcctgtctgcacggaagaccttcccgtcccagcacgccacgctgtcagccttcgccgcggtctatgtgtcgatgtacttcaactcggtcatctcggacaccaccaagctgctgaagcccatcctggtcttcgcctttgccatcgccrcgggcgtatgcgggctcacgcagatcacgcagtaccgcagccaccctgtggacgtgtatgccggcttcctcatcggggcrggcatcgctgcctacctggcctgccacgcggtgggcaacttccaggccccacctgcagagaagcccgcggccycggcccccgccaaggacgcgctgcgggccctgacgcagcggggccacgactcggtttatcagcagaataagtcggtgagcaccgacgagctggggcccccagggcggctggagggcgcgccccggcccgtggcccgcgagaagacctcgctgggcagcctgaagcgcgccagcgtggacgtggacctgctggccccgcgcagccccatggccaaggagaacatggtgaccttcagccacacgctgcccagggccagcgcgccctcgctggacgaccccgcgcgccgccacatgaccatccacgtgccgctggacgcctcgcgctccaagcagctcatcagcgagtggaagcagaagagcctggagggccgcggcctggggctgcccgacgacgccagccccgggcacctgcgcgcgcccgccgaacccatggcggaggaggaggaagaggaggaggacgaagaggaagaggaggaggaggaagaggaggaggacgagggcccggccccgccctcgctctaccccaccgtgcaggcgcggccggggctggggcctcgggtcatcctcccaccgcgcgcggggccgccgccgctggtgcacatcccggaggagggcgcgcagrcgggggccggcctgtcccccaaaagcggcgccggggtgcgcgccaagtggctcatgatggccgagaagagcggggcggcagtggccaaccctccgcggctgctgcaggtcatcgccatccgggagtccacgctgcggcgccacgygggcggcctggggctggcggagcgcgaggcggaggcggaggccgagggctacttccgcaagatgcaggcgcgccgcttccccgac

SEQ ID NO: 4107 - DNA, 3148 bp, Homo sapiens
atggatggttcccagtggatggatgggtgggtgatgggtcggtgagtgggtggatgttgggggcataggtgtttgggtggatggaggatgagtgagtgggtgtgtgatgtgtagatggtcgagttacagatggagcatctgtggatggatgaataactcatgggggaaagagtggctgggagcgggttggatctgtggataggtgagtgagacggtggatggccctgaattcatggagggctggacagacgcctccgcgagggagagcagggtgaacctggcccaccttgtccccacagctgcccatagtggcttcttccatcgtatccttgtacttcctggagctgaccgacctcttcaagccggccaaggtgggcttccagtgctatgaccgcactctctccatgccctacgtggagaccaacgaggagctcatcccgctgctgatgctgctcagcttggccttcgcggcccctgccgcctcgatcatggtrgccgagggcatgttgtactgtctgcagtcccggctgtggggccgtgccggggggcccgccggggcggagggcagcatcaacgccggcggctgcaacttcaactccttcctgcggcgtacggtgcggtttgtgggtgtccacgtgttcggcctgtgtgccacagccctggtgacggacgtgatccagctggccacgggttaccacactcccttcttcctcaccgtctgcaagcccaactacactctcctgggcacgtcctgcgaggtcaacccctacatcacgcaggacatctgctccggccacgacayccacgccatcctgtctgcacggaagaccttcccgtcccagcacgccacgctgtcagccttcgccgcggtctatgtgtcggtgagtccggcmcctcactgcccttcccaggccctcttgctgacccgtggggagccctccctgaccccaacccccatgccccagatgtacttcaactcggtcatctcggacaccaccaagctgctgaagcccatcctggtcttcgcctttgccatcgccrcgggcgtatgcgggctcacgcagatcacgcagtaccgcagccaccctgtggacgtgtatgccggcttcctcatcggggcrggcatcgctgcctacctggcctgccacgcggtgggcaacttccaggccccacctgcagagaagcccgcggccycggcccccgccaaggacgcgctgcgggccctgacgcagcggggccacgactcggtttatcagcagaataagtcggtgagcaccgacgagctggggcccccagggcggctggagggcgcgccccggcccgtggcccgcgagaagacctcgctgggcagcctgaagcgcgccagcgtggacgtggacctgctggccccgcgcagccccatggccaaggagaacatggtgaccttcagccacacgctgcccagggccagcgcgccctcgctggacgaccccgcgcgccgccacatgaccatccacgtgccgctggacgcctcgcgctccaagcagctcatcagcgagtggaagcagaagagcctggagggccgcggcctggggctgcccgacgacgccagccccgggcacctgcgcgcgcccgccgaacccatggcggaggaggaggaagaggaggaggacgaagaggaagaggaggaggaggaagaggaggaggacgagggcccggccccgccctcgctctaccccaccgtgcaggcgcggccggggctggggcctcgggtcatcctcccaccgcgcgcggggccgccgccgctggtgcacatcccggaggagggcgcgcagrcgggggccggcctgtcccccaaaagcggcgccggggtgcgcgccaagtggctcatgatggccgagaagagcggggcggcagtggccaaccctccgcggctgctgcaggtcatcgccatgtccaaggctccgggcgcgccgggccccaaggcggccgagacggcgtcgtcgtccagcgccagctccgactcctcgcagtaccggtcgccgtcggaccgcgactccgccagcatcgtgaccatcgacgcgcacgcgccgcaccaccccgtggtgcacctgtcggccggcggcgcgccctgggagtggaaggcggcgggcggcggggccaaggcggaggccgacggcggctacgagctgggggacctggcgcgcggcttccgcggcggggccaagcccccgggcgtgtcccccggctcgtcsgtcagcgacgtggaccaggaggagccgcggttcggggccgtggccaccgtcaacctggccacgggcgaggggctgcccccgctgggcgcggccgatggggcgctgggcccgggcagccgggagtccacgctgcggcgccacgygggcggcctggggctggcggagcgcgaggcggaggcggaggccgagggctacttccgcaagatgcaggcgcgccgcttccccgactagcgcggcggggccgggggcgggcggggggcgggccgagggcgcgggcggccgcgcggatgctcaataaagcggcagaaaccgaggtccggctcttggtcattcgctctggcccgcacgccccacgcagggacccccactctcagggccgggcccaccccgcccgtggccccacctggcgcttcggcggacacccgggcgggagtcggggccgcccgcggcacagaaagaggaagccagcaacgaaggcggaacggagcgaggatacagaagatttattcgaagtccaggtacagactggccaacctgcctctacagcgtccacagcgaacacagggctagacaagggaggagtttctcaaamggttttaatcggttctctccgcgtcacaagccatcgrgtaaggcaacggaatgtgcgtggggtcccctgtggctccgcggtcacaatactgagcctggaattgctgttagcaaaatatacatttgtgtcaccataaaaaaccgcgccgccgcccctcgggtctcacaacaggtataaaaaattataaatatttacacccttgttacacgcttttacggaaaggggatcctaggagagcccccgggacaggacgcgggggcggtagaaagaaggcggcgacacgcccgccccttccctgaagctcaggggctctaagatagga

SEQ ID NO: 4108 - DNA, 3096 bp, Homo sapiens
atggatggttcccagtggatggatgggtgggtgatgggtcggtgagtgggtggatgttgggggcataggtgtttgggtggatggaggatgagtgagtgggtgtgtgatgtgtagatggtcgagttacagatggagcatctgtggatggatgaataactcatgggggaaagagtggctgggagcgggttggatctgtggataggtgagtgagacggtggatggccctgaattcatggagggctggacagacgcctccgcgagggagagcagggtgaacctggcccaccttgtccccacagctgcccatagtggcttcttccatcgtatccttgtacttcctggagctgaccgacctcttcaagccggccaaggtgggcttccagtgctatgaccgcactctctccatgccctacgtggagaccaacgaggagctcatcccgctgctgatgctgctcagcttggccttcgcggcccctgccgcctcgatcatggtrgccgagggcatgttgtactgtctgcagtcccggctgtggggccgtgccggggggcccgccggggcggagggcagcatcaacgccggcggctgcaacttcaactccttcctgcggcgtacggtgcggtttgtgggtgtccacgtgttcggcctgtgtgccacagccctggtgacggacgtgatccagctggccacgggttaccacactcccttcttcctcaccgtctgcaagcccaactacactctcctgggcacgtcctgcgaggtcaacccctacatcacgcaggacatctgctccggccacgacayccacgccatcctgtctgcacggaagaccttcccgtcccagcacgccacgctgtcagccttcgccgcggtctatgtgtcggtgagtccggcmcctcactgcccttcccaggccctcttgctgacccgtggggagccctccctgaccccaacccccatgccccagatgtacttcaactcggtcatctcggacaccaccaagctgctgaagcccatcctggtcttcgcctttgccatcgccrcgggcgtatgcgggctcacgcagatcacgcagtaccgcagccaccctgtggacgtgtatgccggcttcctcatcggggcrggcatcgctgcctacctggcctgccacgcggtgggcaacttccaggccccacctgcagagaagcccgcggccycggcccccgccaaggacgcgctgcgggccctgacgcagcggggccacgactcggtttatcagcagaataagtcggtgagcaccgacgagctggggcccccagggcggctggagggcgcgccccggcccgtggcccgcgagaagacctcgctgggcagcctgaagcgcgccagcgtggacgtggacctgctggccccgcgcagccccatggccaaggagaacatggtgaccttcagccacacgctgcccagggccagcgcgccctcgctggacgaccccgcgcgccgccacatgaccatccacgtgccgctggacgcctcgcgctccaagcagctcatcagcgagtggaagcagaagagcctggagggccgcggcctggggctgcccgacgacgccagccccgggcacctgcgcgcgcccgccgaacccatggcggaggaggaggaagaggaggaggacgaagaggaagaggaggaggaggaagaggaggaggacgagggcccggccccgccctcgctctaccccaccgtgcaggcgcggccggggctggggcctcgggtcatcctcccaccgcgcgcggggccgccgccgctggtgcacatcccggaggagggcgcgcagrcgggggccggcctgtcccccaaaagcggcgccggggtgcgcgccaagtggctcatgatggccgagaagagcggggcggcagtggccaaccctccgcggctgctgcaggtcatcgccatgtccaaggctccgggcgcgccgggccccaaggcggccgagacggcgtcgtcgtccagcgccagctccgactcctcgcagtaccggtcgccgtcggaccgcgactccgccagcatcgtgaccatcgacgcgcacgcgccgcaccaccccgtggtgcacctgtcggccggcggcgcgccctgggagtggaaggcggcgggcggcggggccaaggcggaggccgacggcggctacgagctgggggacctggcgcgcggcttccgcggcggggccaagcccccgggcgtgtcccccggctcgtcsgtcagcgacgtggaccaggaggagccgcggttcggggccgtggccaccgtcaacctggccacgggcgaggggctgcccccgctgggcgcggccgatggggcgctgggcccgggcagccgggagtccacgctgcggcgccacgygggcggcctggggctggcggagcgcgaggcggaggcggaggccgagggctacttccgcaagatgcaggcgcgccgcttccccgactagcgcggcggggccgggggcgggcggggggcgggccgagggcgcgggcggccgcgcggatgctcaataaagcggcagaaaccgaggtccggctcttggtcattcgctctggcccgcacgccccacgcagggacccccactctcagggccgggcccaccccgcccgtggccccacctggcgcttcggcggacacccgggcgggagtcggggccgcccgcggcacagaaagaggaagccagcaacgaaggcggaacggagcgaggatacagaagatttattcgaagtccaggtacagactggccaacctgcctctacagcgtccacagcgaacacagggctagacaagggaggagtttctcaaamggttttaatcggttctctccgcgtcacaagccatcgrgtaaggcaacggaatgtgcgtggggtcccctgtggctccgcggtcacaatactgagcctggaattgctgttagcaaaatatacatttgtgtcaccataaaaaaccgcgccgccgcccctcgggtctcacaacaggtataaaaaattataaatatttacacccttgttacacgcttttacggaaaggggatcctaggagagcccccgggacaggacgcgggggcggtagaaaga

SEQ ID NO: 4109 - DNA, 1480 bp, Homo sapiens
gggcggggcgcgcgggcccggccaaggcaagcgccggtggggcggcggcgccagagctgctggagcgctcggggtccccgggcggcggcggcggcgcagaggaggaggcaggcggcggccccggtggctcccccccggacggtgcgcggcccggcccgtctcgcgaactcgcggtggtcgcgcggccccgcgctgctccgaccccgggcccctccgccgccgccatggctcggccgctagtgcccagctcgcagaaggcgctgctgctggagctcaaggggctgcaggaagagccggtcgagggattccgcgtgacactggtggacgagggcgatctatacaactgggaggtggccatyttcgggccccccaacacctactacgagggcggctacttcaaggcgcgcctcaagttccccatcgactacccatactctccaccagcctttcggttcctgaccaagatgtggcaccctaacatctacgagacgggggacgtgtgtatctccatcctccacccgccggtggacgacccccagagcggggagctgccctcagagaggtggaaccccacgcagaacgtcaggaccattctcctgagtgtgatctccctcctgaacgagcccaacaccttctcgcccgcaaacgtggacgcctccgtgatgtacaggaagtggaaagagagcaaggggaaggatcgggagtacacagacatcatccggaagcaggtcctggggaccaaggtggacgcggagcgtgacggcgtgaaggtscccaccacgctggccgagtactgcgtgaagaccaaggcgccggcgcccgacgagggctcagacctcttctacgacgactactacgaggacggcgaggtggaggaggaggccgacagctgcttcggggacgatgaggatgactctggcacggaggagtcctgacaccaccagaataaacttgccgagtttacctcactagggccggaccmgtggctccttagacgacagactacctcacggaggttttgtgctggtccccgtctcctctggttgtttcgttttggctttttctccytccccatgtctgttctgggttttcacgtgcttcagagaagaggggctgccccaccgccactcacgtcactcggggctcggtggacgggcccagggtgggagcggccggcccacctgtcccctcgggaggggagctgagcccgacttctaccggggtcccccagcttccggactggccgcaccccggaggagccacgggggcrctgctgggaacgtgggcggggggccgtttyctgacactaccagcctgggaggcccaggtgtagcggtccgaggggcccggtcctgcctgtcagctccaggtcctggagccacgtccagcacwgagtggacggattcaccgtggccgactcttttccctgctttggtttgtttgaaatctaaataaaactactttatgagaggccagagaa

SEQ ID NO: 4110 - DNA, 1179 bp, Homo sapiens
gggcggggcgcgcgggcccggccaaggcaagcgccggtggggcggcggcgccagagctgctggagcgctcggggtccccgggcggcggcggcggcgcagaggaggaggcaggcggcggccccggtggctcccccccggacggtgcgcggcccggcccgtctcgcgaactcgcggtggtcgcgcggccccgcgctgctccgaccccgggcccctccgccgccgccatggctcggccgctagtgcccagctcgcagaaggcgctgctgctggagctcaaggggctgcaggaagagccggtcgagggattccgcgtgacactggtggacgagggcgatctatacaactgggaggtggccatyttcgggccccccaacacctactacgagggcggctacttcaaggcgcgcctcaagttccccatcgactacccatactctccaccagcctttcggttcctgaccaagatgtggcaccctaacatctacgagacgggggacgtgtgtatctccatcctccacccgccggtggacgacccccagagcggggagctgccctcagagaggtggaaccccacgcagaacgtcaggaccattctcctgagtgtgatctccctcctgaacgagcccaacaccttctcgcccgcaaacgtggacgcctccgtgatgtacaggaagtggaaagagagcaaggggaaggatcgggagtacacagacatcatccggaagcaggtcctggggaccaaggtggacgcggagcgtgacggcgtgaaggtscccaccacgctggccgagtactgcgtgaagaccaaggcgccggcgcccgacgagggctcagacctcttctacgacgactactacgaggacggcgaggtggaggaggaggccgacagctgcttcggggacgatgaggatgactctggcacggaggagtcctgacaccaccagaataaacttgccgagtttacctcagggggcrctgctgggaacgtgggcggggggccgtttyctgacactaccagcctgggaggcccaggtgtagcggtccgaggggcccggtcctgcctgtcagctccaggtcctggagccacgtccagcacwgagtggacggattcaccgtggccgactcttttccctgctttggtttgtttgaaatctaaataaaactactttatgagaggcc

SEQ ID NO: 4111 - DNA, 5031 bp, Homo sapiens
cagcgattcggctggctctgccacaccaccgcgcgcccccgctccgcccgcccctccgggcgcgtcttttccgggctcgcgctgagtcccgcctccgccggctgtccgggtgcgcgcgcgccgctgcggctttttctctggcctccgccgcgcgctcctcctcgtcccagcgctagcgggcacgcggttcctttttgcgagctttccgagtgccaggcgccggccggctgcgaagacgcggtgggccgcccctccgattgaaatcacagaagatattcgtgttcttcttaagagaaaaagaggacatttaaaaacgctatggcaaagagaataaaagctaagcccacttcagacaaacctggaagtccatatcgctctgtcacacacttcgactcactagctgtaatagacatccctggagcagatactctggataaattatttgaccatgctgtatccaagtttgggaagaaggacagccttgggaccagggaaatcctaagtgaagaaaatgaaatgcagccaaatggaaaagtttttaagaagttaattcttgggaattataaatggatgaactatcttgaagtgaatcgcagagtgaataactttggtagtggactcactgcactgggactaaaaccaaagaacaccattgccatcttctgtgagaccagggccgaatggatgattgcagcacagacctgctttaagtacaactttcctcttgtgactttatatgccacacttggcaaagaagcagtagttcatgggctaaatgaatctgaggcttcctatctgattaccagtgttgaacttctggaaagtaaacttaagactgcattgttagatatcagttgtgttaaacatatcatttatgtggacaataaggctatcaataaagcagagtaccctgaaggatttgagattcacagcatgcaatcagtagaagagttgggatctaacccagaaaacttgggcattcctccaagtagaccaacgccttcagacatggccattgttatgtatactagtggttctactggccgacctaagggagtgatgatgcatcatagcaatttgatagctggaatgacaggccagtgtgaaagaatacctggactgggaccgaaggacacatatattggctacttgcctttggctcatgtgctagaactgacagcagagatatcttgctttacctatggctgcaggattggatattcttctccgcttacactctctgaccagkccagcaaaattaaaaaaggaagcaaaggagactgtactgtactgaagcccacacttatggctgctgttccggaaatcatggatagaatttataagaatgttatgagcaaagtccaagagatgaattatattcagaaaactctgttcaagatagggtatgattacaaattggaacagatcaaaaagggatatgatgcacctctttgcaatctgttactgtttaaaaaggtcaaggccctgctgggagggaatgtccgcatgatgctgtctggaggggccccgctatctcctcagacacaccgattcatgaatgtctgcttctgctgcccaattggccagggttatggactgacagaatcatgtggtgctgggacagttactgaagtaactgactatactactggcagagttggagcacctcttatttgctgtgaaattaagctaaaagactggcaagaaggcggttatacaattaatgacaagccaaaccccagaggtgaaatcgtaattggtggacagaacatctccatgggatattttaaaaatgaagagaaaacagcagaagattattctgtggatgaaaatggacaaaggtggttttgcactggtgatattggagaattccatcccgatggatgtttacagattatagatmgtaagaaagatctagtgaagttacaagcaggagagtatgtatctcttgggaaagtagaagctgcactgaagaattgtccacttattgacaacatctgtgcttttgccaaaagtgatcagtcctatgtgatcagttttgtggttcctaaccagaaaaggttgacacttttggcacaacagaaaggggtagaaggaacttgggttgatatctgcaataatcctgctatggaagctgaaatactgaaagaaattcgagaagctgcaaatgccatgaaattggagcgatttgaaattccaatcaaggttcgattaagcccagagccatggacccctgaaactggtttggtaactgatgctttcaaactgaaaaggaaggagctgaggaaccattacctcaaagacattgaacgaatgtatgggggcaaataaaatgttgttgtcttattgacagttgtgcaggaggtagcctggtggttttcaacytctagaattttaagcctttgttgaactgttagaatgtaaggtatatcattctaaagatagagtaaaaagaaaacaaaaccaaaagttattaaaattgttgtccrgtttactttaacttagttttgcatagttctagtgcagctgaaattgaaaagttatttccctttagctgtgttattatagagcagaaattctgtttttaaaaattagcctaagatatacttgtttttgtaaagaaaaatatttaatgttgaacaaaataaattggagttggagtagaatgtagtttgaggaaatttgcagcttccaatgcctcttgtcttcctatttcagaagtttaaatattaagcatgacagaaaatatgtattaacactactcaaagcaaaagtgctgcagggctttaaaattctcttccaaccatttatcttgaaggaaaaattcaatagtaatataatacacaaaatcaaataataccttagaaggtattaagattataattgttgcataggttagatatagagtcattgtaatgttgtgaataattacagtgcctaaaataagaatagaacaacatatacaacaccaaaaaatatctagtaatatatttaaagggaaattgagctgctttttttgaaactttgagatctaaaaataactgtaattatttgaatgactaagaggaaagtacattttttgaaatgctgaaaattgcctttctgtgtttattcaaactgaaaagctgagaccaagagcaaggaaggtaaaaagttaacaggcaaacattttctcttagaaaaggtgataaaatcataagtatttggaattagaacccttgcacagcactgaacctgggaaagagatttaaactctgaatttatctttgataacagggattgattttaaaatgtacatgtattaaattacatttgtaatttaaggtctgtttgctgttgctgattttattcttgatcagtagtttgcatttcagaaagcctttcattttgctttaaktttagcaaagcgggttataatgaatgacttccccaatatcttgcttgaacttacaggtgattaacttggatgagttttgggaagttaaagggaagaaaacactgttatcattttttcctgtttgggaagagcttagaaactggaaatactagatttgggagaagggcagagttacttgataagggactgatgtttgtgcagtaacttgggagtgtggtttctttttgaatctttaattaaaacctgggattatatatccctgataaatattcacacttgaaccatagttactgtaaaatgcaaaaaatcttaatactgttattctttgcactttttcttaatcattttttatatatatgcatatatatatgtgtgtgtgtgtgttgcttatgttgttttgtacagatgtgggccaccattgcaacaaaatacattctttttgctctaaaatatttatgaagaaaatacttaaatgttatgtatatggtggtaataagggaaaaatcaagtattataaacaagaatgaaggtttttgtaaagatttctgttcagcgttttgcaaggtaaaattttaggcaagttttccctgaagttatgtgtatgtgagtattctcattcttcccaacttgcctttgaagagtgaaataccattattatcaagtagactactgttcagcttttattcctgccctgctgtttatcccttaagaatgagtttcttagacttttccaatatgtgattttttttcccatttagaatggtgattttaaatgtgtgagtgcatgtactatcttatctcagatatttgcacccccaatctgcccccaactcccaaaagctagaacactgccaactgatctgttataggtcctttagaaacacataattaacacttaaggttgggtgctgctaattctttgcaaaaatccaaatattgttaagggaccagggagatgccactaccccttgattttccatctaaaaatatacatgtttatgtaaacaaatctttccatatccatagtgacttttcaagtatttaagcctaaagattttgatctcacatttttatacctgtttaaattgctcacagttattacatacacatcagccatcaactaaagttgtactttaaaaatttactacaatatgtacatttctaagtcaaacacttgtgacttttgctttaattccatgaatgttcctgcctccttgatatttgtatttattctttttttctctagagtagaggtataattgtgtgatatttcagaaatacagataaatgattcaaaaagtcacagttaaggagaatcatgtttctttgatcatgaataactgattagtaagtcttgcctatattttcctgatagcatatgacaaatgtttctaaggtaacaagatgagaacagataaagattgtgtggtgttttggatttggagagaaatattttaatttttaaatgcagttacaaattataatgtattcatatttgtactttctgttaaaatgcatgattgcagaattgtttagattttgtgtttattcttgatgaaaagctttgtttgttcttgtttttaagtttgcactcaaatcttaagaaataaatccacccatgttatcaagccaat

SEQ ID NO: 4112 - DNA, 5248 bp, Homo sapiens
accaccgcgcgcccccgctccgcccgcccctccgggcgcgtcttttccgggctcgcgctgagtcccgcctccgccggctgtccgggtgcgcgcgcgccgctgcggctttttctctggcctccgccgcgcgctcctcctcgtcccagcgctagcgggcacgcggttcctttttgcgagctttccgagtgccaggcgccggccggctgcgaagacgcggtgggccgcccctccggcgtactttattgtcggcttccaaagattactaacttttatctgtatcactaagattgaactgccttggctgtactgctattcttactgctgcttctattattgccttcttcagcacaataaggctttcaaaagccaaagaataacaagaaataagcaccattttagaagcctttccactatgaaacttaagctaaatgtgctcaccattattttgctgcctgtccacttgttaataacaatatacagtgcycttatatttattccatggtattttcttaccaatgccaagaagaaaaacgctatggcaaagagaataaaagctaagcccacttcagacaaacctggaagtccatatcgctctgtcacacacttcgactcactagctgtaatagacatccctggagcagatactctggataaattatttgaccatgctgtatccaagtttgggaagaaggacagccttgggaccagggaaatcctaagtgaagaaaatgaaatgcagccaaatggaaaagtttttaagaagttaattcttgggaattataaatggatgaactatcttgaagtgaatcgcagagtgaataactttggtagtggactcactgcactgggactaaaaccaaagaacaccattgccatcttctgtgagaccagggccgaatggatgattgcagcacagacctgctttaagtacaactttcctcttgtgactttatatgccacacttggcaaagaagcagtagttcatgggctaaatgaatctgaggcttcctatctgattaccagtgttgaacttctggaaagtaaacttaagactgcattgttagatatcagttgtgttaaacatatcatttatgtggacaataaggctatcaataaagcagagtaccctgaaggatttgagattcacagcatgcaatcagtagaagagttgggatctaacccagaaaacttgggcattcctccaagtagaccaacgccttcagacatggccattgttatgtatactagtggttctactggccgacctaagggagtgatgatgcatcatagcaatttgatagctggaatgacaggccagtgtgaaagaatacctggactgggaccgaaggacacatatattggctacttgcctttggctcatgtgctagaactgacagcagagatatcttgctttacctatggctgcaggattggatattcttctccgcttacactctctgaccagkccagcaaaattaaaaaaggaagcaaaggagactgtactgtactgaagcccacacttatggctgctgttccggaaatcatggatagaatttataagaatgttatgagcaaagtccaagagatgaattatattcagaaaactctgttcaagatagggtatgattacaaattggaacagatcaaaaagggatatgatgcacctctttgcaatctgttactgtttaaaaaggtcaaggccctgctgggagggaatgtccgcatgatgctgtctggaggggccccgctatctcctcagacacaccgattcatgaatgtctgcttctgctgcccaattggccagggttatggactgacagaatcatgtggtgctgggacagttactgaagtaactgactatactactggcagagttggagcacctcttatttgctgtgaaattaagctaaaagactggcaagaaggcggttatacaattaatgacaagccaaaccccagaggtgaaatcgtaattggtggacagaacatctccatgggatattttaaaaatgaagagaaaacagcagaagattattctgtggatgaaaatggacaaaggtggttttgcactggtgatattggagaattccatcccgatggatgtttacagattatagatmgtaagaaagatctagtgaagttacaagcaggagagtatgtatctcttgggaaagtagaagctgcactgaagaattgtccacttattgacaacatctgtgcttttgccaaaagtgatcagtcctatgtgatcagttttgtggttcctaaccagaaaaggttgacacttttggcacaacagaaaggggtagaaggaacttgggttgatatctgcaataatcctgctatggaagctgaaatactgaaagaaattcgagaagctgcaaatgccatgaaattggagcgatttgaaattccaatcaaggttcgattaagcccagagccatggacccctgaaactggtttggtaactgatgctttcaaactgaaaaggaaggagctgaggaaccattacctcaaagacattgaacgaatgtatgggggcaaataaaatgttgttgtcttattgacagttgtgcaggaggtagcctggtggttttcaacytctagaattttaagcctttgttgaactgttagaatgtaaggtatatcattctaaagatagagtaaaaagaaaacaaaaccaaaagttattaaaattgttgtccrgtttactttaacttagttttgcatagttctagtgcagctgaaattgaaaagttatttccctttagctgtgttattatagagcagaaattctgtttttaaaaattagcctaagatatacttgtttttgtaaagaaaaatatttaatgttgaacaaaataaattggagttggagtagaatgtagtttgaggaaatttgcagcttccaatgcctcttgtcttcctatttcagaagtttaaatattaagcatgacagaaaatatgtattaacactactcaaagcaaaagtgctgcagggctttaaaattctcttccaaccatttatcttgaaggaaaaattcaatagtaatataatacacaaaatcaaataataccttagaaggtattaagattataattgttgcataggttagatatagagtcattgtaatgttgtgaataattacagtgcctaaaataagaatagaacaacatatacaacaccaaaaaatatctagtaatatatttaaagggaaattgagctgctttttttgaaactttgagatctaaaaataactgtaattatttgaatgactaagaggaaagtacattttttgaaatgctgaaaattgcctttctgtgtttattcaaactgaaaagctgagaccaagagcaaggaaggtaaaaagttaacaggcaaacattttctcttagaaaaggtgataaaatcataagtatttggaattagaacccttgcacagcactgaacctgggaaagagatttaaactctgaatttatctttgataacagggattgattttaaaatgtacatgtattaaattacatttgtaatttaaggtctgtttgctgttgctgattttattcttgatcagtagtttgcatttcagaaagcctttcattttgctttaaktttagcaaagcgggttataatgaatgacttccccaatatcttgcttgaacttacaggtgattaacttggatgagttttgggaagttaaagggaagaaaacactgttatcattttttcctgtttgggaagagcttagaaactggaaatactagatttgggagaagggcagagttacttgataagggactgatgtttgtgcagtaacttgggagtgtggtttctttttgaatctttaattaaaacctgggattatatatccctgataaatattcacacttgaaccatagttactgtaaaatgcaaaaaatcttaatactgttattctttgcactttttcttaatcattttttatatatatgcatatatatatgtgtgtgtgtgtgttgcttatgttgttttgtacagatgtgggccaccattgcaacaaaatacattctttttgctctaaaatatttatgaagaaaatacttaaatgttatgtatatggtggtaataagggaaaaatcaagtattataaacaagaatgaaggtttttgtaaagatttctgttcagcgttttgcaaggtaaaattttaggcaagttttccctgaagttatgtgtatgtgagtattctcattcttcccaacttgcctttgaagagtgaaataccattattatcaagtagactactgttcagcttttattcctgccctgctgtttatcccttaagaatgagtttcttagacttttccaatatgtgattttttttcccatttagaatggtgattttaaatgtgtgagtgcatgtactatcttatctcagatatttgcacccccaatctgcccccaactcccaaaagctagaacactgccaactgatctgttataggtcctttagaaacacataattaacacttaaggttgggtgctgctaattctttgcaaaaatccaaatattgttaagggaccagggagatgccactaccccttgattttccatctaaaaatatacatgtttatgtaaacaaatctttccatatccatagtgacttttcaagtatttaagcctaaagattttgatctcacatttttatacctgtttaaattgctcacagttattacatacacatcagccatcaactaaagttgtactttaaaaatttactacaatatgtacatttctaagtcaaacacttgtgacttttgctttaattccatgaatgttcctgcctccttgatatttgtatttattctttttttctctagagtagaggtataattgtgtgatatttcagaaatacagataaatgattcaaaaagtcacagttaaggagaatcatgtttctttgatcatgaataactgattagtaagtcttgcctatattttcctgatagcatatgacaaatgtttctaaggtaacaagatgagaacagataaagattgtgtggtgttttggatttggagagaaatattttaatttttaaatgcagttacaaattataatgtattcatatttgtactttctgttaaaatgcatgattgcagaattgtttagattttgtgtttattcttgatgaaaagctttgtttgttcttgtttttaagtttgcactcaaatcttaagaaataaatccacccatgttatcaagccaat

SEQ ID NO: 4113 - DNA, 5189 bp, Homo sapiens
accaccgcgcgcccccgctccgcccgcccctccgggcgcgtcttttccgggctcgcgctgagtcccgcctccgccggctgtccgggtgcgcgcgcgccgctgcggctttttctctggcctccgccgcgcgctcctcctcgtcccagcgctagcgggcacgcggttcctttttgcgagctttccgagtgccaggcgccggccggctgcgaagacgcggtgggccgcccctccggcgtactttattgtcggcttccaaagattactaacttttatctgtatcactaagattgaactgccttggctgtactgctattcttactgctgcttctattattgccttcttcagcacaataaggctttcaaaagccaaagaataacaagaaataagcaccattttagaagcctttccactatgaaacttaagctaaatgtgctcaccattattttgctgcctgtccacttgttaataacaatatacagtgcycttatatttattccatggtattttcttaccaatgccaagaagaaaaacgctatggcaaagagaataaaagctaagcccacttcagacaaacctggaagtccatatcgctctgtcacacacttcgactcactagctgtaatagacatccctggagcagatactctggataaattatttgaccatgctgtatccaagtttgggaagaaggacagccttgggaccagggaaatcctaagtgaagaaaatgaaatgcagccaaatggaaaagtttttaagaagttaattcttgggaattataaatggatgaactatcttgaagtgaatcgcagagtgaataactttggtagtggactcactgcactgggactaaaaccaaagaacaccattgccatcttctgtgagaccagggccgaatggatgattgcagcacagacctgctttaagtacaactttcctcttgtgactttatatgccacacttggcaaagaagcagtagttcatgggctaaatgaatctgaggcttcctatctgattaccagtgttgaacttctggaaagtaaacttaagactgcattgttagatatcagttgtgttaaacatatcatttatgtggacaataaggctatcaataaagcagagtaccctgaaggatttgagattcacagcatgcaatcagtagaagagttgggatctaacccagaaaacttgggcattcctccaagtagaccaacgccttcagacatggccattgttatgtatactagtggttctactggccgacctaagggagtgatgatgcatcatagcaatttgatagctggaatgacaggccagtgtgaaagaatacctggactgggaccgaaggacacatatattggctacttgcctttggctcatgtgctagaactgacagcagagatatcttgctttacctatggctgcaggattggatattcttctccgcttacactctctgaccagkccagcaaaattaaaaaaggaagcaaaggagactgtactgtactgaagcccacacttatggctgctgttccggaaatcatggatagaatttataagaatgttatgagcaaagtccaagagatgaattatattcagaaaactctgttcaagatagggtatgattacaaattggaacagatcaaaaagggatatgatgcacctctttgcaatctgttactgtttaaaaaggtcaaggccctgctgggagggaatgtccgcatgatgctgtctggaggggccccgctatctcctcagacacaccgattcatgaatgtctgcttctgctgcccaattggccagggttatggactgacagaatcatgtggtgctgggacagttactgaagtaactgactatactactggcagagttggagcacctcttatttgctgtgaaattaagctaaaagactggcaagaaggcggttatacaattaatgacaagccaaaccccagaggtgaaatcgtaattggtggacagaacatctccatgggatattttaaaaatgaagagaaaacagcagaagattattctgtggatgaaaatggacaaaggtggttttgcactggtgatattggagaattccatcccgatggatgtttacagattatagatmgtaagaaagatctagtgaagttacaagcaggagagtatgtatctcttgggaaagtagaagctgcactgaagaattgtccacttattgacaacatctgtgcttttgccaaaagtgatcagtcctatgtgatcagttttgtggttcctaaccagaaaaggttgacacttttggcacaacagaaaggggtagaaggaacttgggttgatatctgcaataatcctgctatggaagctgaaatactgaaagaaattcgagaagctgcaaatgccatgaaattggagcgatttgaaattccaatcaaggttcgattaagcccagagccatggacccctgaaactggtttggtaactgatgctttcaaactgaaaaggaaggagctgaggaaccattacctcaaagacattgaacgaatgtatgggggcaaataaaatgttgttgtcttattgacagttgtgcaggaggtagcctggtggttttcaacytctagaattttaagcctttgttgaactgttagaatgtaaggtatatcattctaaagatagagtaaaaagaaaacaaaaccaaaagttattaaaattgttgtccrgtttactttaacttagttttgcatagttctagtgcagctgaaattgaaaagttatttccctttagctgtgttattatagagcagaaattctgtttttaaaaattagcctaagatatacttgtttttgtaaagaaaaatatttaatgttgaacaaaataaattggagttggagtagaatgtagtttgaggaaatttgcagcttccaatgcctcttgtcttcctatttcagaagtttaaatattaagcatgacagaaaatatgtattaacactactcaaagcaaaagtgctgcagggctttaaaattctcttccaaccatttatcttgaaggaaaaattcaatagtaatataatacacaaaatcaaataataccttagaaggtattaagattataattgttgcataggttagatatagagtcattgtaatgttgtgaataattacagtgcctaaaataagaatagaacaacatatacaacaccaaaaaatatctagtaatatatttaaagggaaattgagctgctttttttgaaactttgagatctaaaaataactgtaattatttgaatgactaagaggaaagtacattttttgaaatgctgaaaattgcctttctgtgtttattcaaactgaaaagctgagaccaagagcaaggaaggtaaaaagttaacaggcaaacattttctcttagaaaaggtgataaaatcataagtatttggaattagaacccttgcacagcactgaacctgggaaagagatttaaactctgaatttatctttgataacagggattgattttaaaatgtacatgtattaaattacatttgtaatttaaggtctgtttgctgttgctgattttattcttgatcagtagtttgcatttcagaaagcctttcattttgctttaaktttagcaaagcgggttataatgaatgacttccccaatatcttgcttgaacttacaggtgattaacttggatgagttttgggaagttaaagggaagaaaacactgttatcattttttcctgtttgggaagagcttagaaactggaaatactagatttgggagaagggcagagttacttgataagggactgatgtttgtgcagtaacttgggagtgtggtttctttttgaatctttaattaaaacctgggattatatatccctgataaatattcacacttgaaccatagttactgtaaaatgcaaaaaatcttaatactgttattctttgcactttttcttaatcattttttatatatatgcatatatatatgtgtgtgtgtgtgttgcttatgttgttttgtacagatgtgggccaccattgcaacaaaatacattctttttgctctaaaatatttatgaagaaaatacttaaatgttatgtatatggtggtaataagggaaaaatcaagtattataaacaagaatgaaggtttttgtaaagatttctgttcagcgttttgcaagtcttcccaacttgcctttgaagagtgaaataccattattatcaagtagactactgttcagcttttattcctgccctgctgtttatcccttaagaatgagtttcttagacttttccaatatgtgattttttttcccatttagaatggtgattttaaatgtgtgagtgcatgtactatcttatctcagatatttgcacccccaatctgcccccaactcccaaaagctagaacactgccaactgatctgttataggtcctttagaaacacataattaacacttaaggttgggtgctgctaattctttgcaaaaatccaaatattgttaagggaccagggagatgccactaccccttgattttccatctaaaaatatacatgtttatgtaaacaaatctttccatatccatagtgacttttcaagtatttaagcctaaagattttgatctcacatttttatacctgtttaaattgctcacagttattacatacacatcagccatcaactaaagttgtactttaaaaatttactacaatatgtacatttctaagtcaaacacttgtgacttttgctttaattccatgaatgttcctgcctccttgatatttgtatttattctttttttctctagagtagaggtataattgtgtgatatttcagaaatacagataaatgattcaaaaagtcacagttaaggagaatcatgtttctttgatcatgaataactgattagtaagtcttgcctatattttcctgatagcatatgacaaatgtttctaaggtaacaagatgagaacagataaagattgtgtggtgttttggatttggagagaaatattttaatttttaaatgcagttacaaattataatgtattcatatttgtactttctgttaaaatgcatgattgcagaattgtttagattttgtgtttattcttgatgaaaagctttgtttgttcttgtttttaagtttgcactcaaatcttaagaaataaatccacccatgttatcaa

SEQ ID NO: 4114 - DNA, 3701 bp, Homo sapiens
agagtgattttcaaaacatttactaacgctttcaattatttaccccattaatggaatttgtcaacagactggagtccttgacaggattgtgaatgcatagaggatgcaaagaaatggacacactgaggtagctatgccagtggtctgcatgygcaggcagtaaactgaagacatttgagcggtgaattacttggcatttggaaacaccaccgtctgtgtcgggaaagcagaataactctccagtatctcgtcattagcttgctggaagcaggagggctatgttcctgggactcgggcgcttttctcgccttgttctctggtttgcggctttcaggaaactgctgggacaccatggccttgcatctgccaagttcctgtggtgcttgtgccttctgtstgtcatgtcccttccgcagcaggtgtggacactcccctacaagataggggtggtgggcccttgggcttgtgattcgctgttttcaaaggccctgcctgagsttgctgcgcgattagccattgagcgaatcaaccgggacccatcttttgacctgagttattcttttgaatacgtgattctcaatgaagactgccagacttcgagggctctctccagtttcatttcccaccaccagatggcctcaggatttattggacctaccaaccctggctactgcgaggcagcctcgctcctgggaaacagctgggacaaaggaattttctcttgggcttgtgtgaattatgaattagacaataaaawtagctacccgaccttttctcggacactcccttctcccatccgggtgcttgtaactgtcatgaaatatttccagtgggctcatgctggagtcatttcctcagatgaagacatttgggtgcatacagccaatcgagtcgcaagtgctcttcggagccacggcttacctgtaggggtcgtcctgaccacaggacaagacagccaaagcatgyggaaagccctccagaggattcaccaggcagacagaattcgcataatcatcatgtgtatgcattcagctttgattgggggagagactcagatgcatctcttggaatgtgctcatgatctgaaaatgactgatggaacctacgtctttgttccttatgatgcccygctctacagtttaccttataagcacaccccctaccrggtcctaaggaacaacccaaagctccgggaagcctatgatgcagtgttgaccattacagtggagtcccaagaaaagaccttctatcaagccttcacagaggcagcagcaagaggtgaaattcctgagaagctggagttcgatcaagtttcaccgttgtttggaaccatctacaattcaatttactttatcgcacaagccatgaataatgctatgaaagaaaatggacaggctggtgctgccagcctggttcakcattccagaaacatgcagttccatggattcaaccagttgatgaggacagattcaaatggaaatggaatttcagaatatgtaatcctggacaccaacttgaaagaatgggaactccatagcacctacactgtggacatggaaatggagctgctacgtttcggagggacccctattcacttccctggtggcaggccccctagagcagatgcaaaatgctggtttgcagaagggaagatctgccatggaggcatcgaccctgcctttgccatgatggtctgccttactttgcttatagccctgctgtctattaatggatttgcttactttataaggcgtcgtataaataaaatccagttgatcaaaggacccaatagaattctactgactttggaggatgtaacgtttatcaatccccactttggcagtaagagaggaagtcgtgccagtgtaagcttccagattacctcagaggtccaaagtgggaggtccccaagactctccttttcttcagggagtctaactccagctacctatgaaaactccaacatagcgatttatgagggtgattgggtgtggctgaaaaagttctcccttggagattttggagaccttaagtccatcaaatcaagagcaagtgatgtgttcgaaatgatgaaggacttgcgtcatgagaatattaaccctttattgggtttcttctatgattcggggatgtttgccattgtgacagaattctgttcccgagggagcctagaagacatactgacaaatcaagatgtgaaacttgactggatgtttaaatcatcactcttgctggatctcataaagggcatgaagtacttacaccacagagagtttgttcatgggaggctaaagtctcgaaactgtgtggtagatgggcgttttgtactaaaagtgacagattatggctttaacgacatcttagaaatgctgagactctctgaagaggaatcttctatggaagagctgctgtggacggcccctgaactgttgagagctccaagaggcagcaggttaggttcttttgcaggagatgtctatagctttgccatcatcatgcaagaagtgatggtccggggtaccccattctgcatgatggatctgccagctcaagaaatcataaacagacttaagaagcctcctcctgtgtacagaccagtagttcctcctgagcatgcccctccagaatgtctccagctgatgaagcagtgctgggctgaggctgcagaacaacgaccaacttttgatgaaatatttaaccagtttaaaacttttaataaagggaagaagaccaatattattgattctatgcttcggatgttggagcaatattctagcaacttggaagatttgattcgggagcggactgaagagctggaaattgaaaaacagaaaacggaaaagcttctaacacagatgctaccaccatcagttgctgaatctctcaaaaagggctgcacagttgaacctgagggctttgacttggtcaccttgtacttcagcgacattgtgggcttcacaaccatttcagccatgagtgagcccattgaggtcgtggatcttctgaatgacctgtacacactctttgatgcaataattggcagtcatgatgtctacaaggtagagaccattggagatgcctacatggtggcttcaggcctcccaaagaggaatggcagtaggcatgcagctgagattgcaaacatgtccttagatatcctgagctctgtgggcactttcaagatgcggcacatgccagaagtgccggtccgaattcgaattggccttcactcagggccggttgttgctggagtggtgggcctcaccatgcccagatactgcttgtttggagacactgtgaacacagcttctcggatggaatctacaggcttaccttatcgcattcatgtcagtctcagcactgttacaattcttcaaaatctgagtgagggctatgaagtggagcttcgaggaagaacagagctcaagggcaaaggcacagaggaaaccttctggctgattgggaaaaaaggcttcatgaagccccttcctgtgcccccaccagtggacaaagatgggcaagtgggccatggcctgcaaccagtggagattgcagccttccaaagaagaaaagcagaaaggcagttggtgagaaacaagccataaggggcaaagggctccaggatttgaatcttctcttggtgaggcaatgggaaagctcacttcagttcaagaaattgttctgcctgggcaagaaattag

SEQ ID NO: 4115 - DNA, 1793 bp, Homo sapiens
gaattgctgtctgtttttctgttccctgctgccagcactgggtgccagcctcwgttgccctcttccctctctttcttgccaggtgtccaggatgtggaggtgcacttggaggaccagatggtcttggtacacaccactctacccagccaggaggtgcaggctctcctggaaggcacgrggcggcaggcggtactcaagggcatgggcagcggccagttgcagaatctgggggcagcagtggccatcctkggggggcctggcaccgtgcagggggtggtgcgcttcctacagctgacccctgagcgctgcctcatcgagggaactattgacggcctggagcctgggctgcatggactccacgtccatcagtacggggaccttacaaacaactgcaacagctgtgggaatcactttaaccctgatggagcatctcatgggggcccccaggactctgaccggcaccgcggagacctgggcaatgtccgtgctgatgctgacggccgcgccatcttcagaatggaggatgagcagctgaaggtgtgggatgtgattggccgcagcctgattattgatgagggagaagatgacctgggccggggaggccatcccttatccaagatcacagggaactccggggagaggttggcctgtggcatcattgcacgctccsctggccttttccagaaccccaagcagatctgctcttgcgatggcctcaccatytgggaggagcgaggccggcccatcgctggcaagggccgaaaggagtcagcrcagccccctgcccacctttgagcaggacctcaccttggctctgttgctgtcctccagggcgagcactttccacttccagagggggccagagggactttgcctgcccagtctttggagagctcagtacagggcaggagctgctgtggtgttcccttggcaaatgaaagttttattttcgtttgggacttggtgttttgtgcttgtctccatgccccttatgggcttggtgaacatagctctgcttctttcctttgtatcagggccaccccttagcattggagccaaacaaacctgaattcaaacctacacacacactgaagtccccatcttcctccttggagccataatgaagagccactacagtcaaatttctgtttgtggcctcccccaacccctcactatggctgattggaaccaaaatggacacctgacccatggtggcccatgctttccctgagaaatcagggcagatccagctttagttttttcctgtggttggacccataacatgggaatatgggaagttttggtggccctcttctccctgccttattgactgagcatcagaaaaagccagtcggctaaggaggaaaaatgaggcagggagaatctaagagttgctggagaatcccagtcactctggagtcccctctctgagcctttcgtgaggccagctgcctcctgcctgggattgaagagatgctcccgaatcctcctaatgcatccccctgttaaaataatctggcttgaggctgggcacggtagctcacacctgtaatcccagcacttcggaaggccaaggcgggaggatctcttgagcccaggagtttgagaccagctgggggaacagagtaagaccctgtctctacaaaaaaaaaaaatttaattagctgggtgtgatggtgcatgcttgtggtcccagctatttgggaggctgaggtgggaggattgcttcagcctgggaggttgaggctgcagtgaaccatgatcacgccactgcattccagcctgggcaacag

SEQ ID NO: 4116 - DNA, 2774 bp, Homo sapiens
tgccaggtgtccaggatgtggaggtgcacttggaggaccagatggtcttggtacacaccactctacccagccaggaggtgcaggctctcctggaaggcacgrggcggcaggcggtactcaagggcatgggcagcggccagttgcgtgagtgaccactgtggccttggcccctctcggagggaggtggctcagagctggtacaaatctaatcataggattctcaggctctgggttggagtggctttgaggaaggtgtgaaaattatgtgagactccctgcccttcccgagctgctgaagaggtgtgctgggtgaggtggcaagccagcccaagtgtctaataccttgcagagaatctgggggcagcagtggccatcctkggggggcctggcaccgtgcagggggtggtgcgcttcctacagctgacccctgagcgctgcctcatcgagggaactattgacggcctggagcctgggctgcatggactccacgtccatcagtacggggaccttacaaacaactgcaacaggtgagttgtctgaagtctccccagtagcattctcagctacacattttcacactgggccctcaccaatactctgtgaggcacatacacacaggcacaacctccagatgaggaaactgaggctcacagaggttaaatgacttgccaaaggtccacagcaggtaaaaggtagagttggggtttgagtcaagatctgaccttggctgggcacagtagctcacacctgtaatctagcactttgggaggctgaggtgggcggatcacctgaggtcaggagttcaagaccagcctggccaacatggtgaaaccccatctctactaacaatacaaaaaaaaattagccaggtgcagtggcatgtgcccataatcccagctactagggaggcccgtaatctcctgaggcaggagaatcacttgaactcaggaggtggaggttgtggtgagctgagattgcaccacggcactccagctcaggggtgacagggcaaaactctgtctcaagaaaaaaaataaaatctgatcttgaaggtcctgcttataaccaccttactgcctctgagatggaaggggacttctggacacagcaaaggaagggtccccatgccatggtgtttgtcatgctgtgatataactagttgtttactcatctgtgagtcccctgagccagaagcttattcaggacaggacccatgtctgattcttctcggtgccctctacccaaagcccagcacagagtaggcctgtttgttgaatgaatgaatgaatgaatgaatgaagcaaatataaatagatgagagggtagagcacctggcctgtgagctgctttcctgcccacctgtttcctttctttcttagctgtgggaatcactttaaccctgatggagcatctcatgggggcccccaggactctgaccggcaccgcggagacctgggcaatgtccgtgctgatgctgacggccgcgccatcttcagaatggaggatgagcagctgaaggtgtgggatgtgattggccgcagcctgattattgatgagggagaagatgacctgggccggggaggccatcccttatccaagatcacagggaactccggggagaggttggcctgtggcatcattgcacgctccsctggccttttccagaaccccaagcagatctgctcttgcgatggcctcaccatytgggaggagcgaggccggcccatcgctggcaagggccgaaaggagtcagcrcagccccctgcccacctttgagcaggacctcaccttggctctgttgctgtcctccagggcgagcactttccacttccagagggggccagagggactttgcctgcccagtctttggagagctcagtacagggcaggagctgctgtggtgttcccttggcaaatgaaagttttattttcgtttgggacttggtgttttgtgcttgtctccatgccccttatgggcttggtgaacatagctctgcttctttcctttgtatcagggccaccccttagcattggagccaaacaaacctgaattcaaacctacacacacactgaagtccccatcttcctccttggagccataatgaagagccactacagtcaaatttctgtttgtggcctcccccaacccctcactatggctgattggaaccaaaatggacacctgacccatggtggcccatgctttccctgagaaatcagggcagatccagctttagttttttcctgtggttggacccataacatgggaatatgggaagttttggtggccctcttctccctgccttattgactgagcatcagaaaaagccagtcggctaaggaggaaaaatgaggcagggagaatctaagagttgctggagaatcccagtcactctggagtcccctctctgagcctttcgtgaggccagctgcctcctgcctgggattgaagagatgctcccgaatcctcctaatgcatccccctgttaaaataatctggcttgaggctgggcacggtagctcacacctgtaatcccagcacttcggaaggccaaggcgggaggatctcttgagcccaggagtttgagaccagctgggggaacagagtaagaccctgtctctacaaaaaaaaaaaatttaattagctgggtgtgatggtgcatgcttgtggtcccagctatttgggaggctgaggtgggaggattgcttcagcctgggaggttgaggctgcagtgaaccatgatcacgccactgcattccagcctgggcaacag

SEQ ID NO: 4117 - DNA, 1362 bp, Homo sapiens
tgccaggtgtccaggatgtggaggtgcacttggaggaccagatggtcttggtacacaccactctacccagccaggaggtgcaggctctcctggaaggcacgrggcggcaggcggtactcaagggcatgcctgattattgatgagggagaagatgacctgggccggggaggccatcccttatccaagatcacagggaactccggggagaggttggcctgtggcatcattgcacgctccsctggccttttccagaaccccaagcagatctgctcttgcgatggcctcaccatytgggaggagcgaggccggcccatcgctggcaagggccgaaaggagtcagcrcagccccctgcccacctttgagcaggacctcaccttggctctgttgctgtcctccagggcgagcactttccacttccagagggggccagagggactttgcctgcccagtctttggagagctcagtacagggcaggagctgctgtggtgttcccttggcaaatgaaagttttattttcgtttgggacttggtgttttgtgcttgtctccatgccccttatgggcttggtgaacatagctctgcttctttcctttgtatcagggccaccccttagcattggagccaaacaaacctgaattcaaacctacacacacactgaagtccccatcttcctccttggagccataatgaagagccactacagtcaaatttctgtttgtggcctcccccaacccctcactatggctgattggaaccaaaatggacacctgacccatggtggcccatgctttccctgagaaatcagggcagatccagctttagttttttcctgtggttggacccataacatgggaatatgggaagttttggtggccctcttctccctgccttattgactgagcatcagaaaaagccagtcggctaaggaggaaaaatgaggcagggagaatctaagagttgctggagaatcccagtcactctggagtcccctctctgagcctttcgtgaggccagctgcctcctgcctgggattgaagagatgctcccgaatcctcctaatgcatccccctgttaaaataatctggcttgaggctgggcacggtagctcacacctgtaatcccagcacttcggaaggccaaggcgggaggatctcttgagcccaggagtttgagaccagctgggggaacagagtaagaccctgtctctacaaaaaaaaaaaatttaattagctgggtgtgatggtgcatgcttgtggtcccagctatttgggaggctgaggtgggaggattgcttcagcctgggaggttgaggctgcagtgaaccatgatcacgccactgcattccagcctgggcaacaga

SEQ ID NO: 4118 - DNA, 1056 bp, Homo sapiens
gtgggcggtcccaggcaggcccagaagctgggcagcctctgccgggttccgggaaaaggagctcctgctgccactgctcttccggagcctgcagcatggggcccctgccgcgcaccgtggagctcttctatgacgtgctgtccccctactcctggctgggcttcgagatcctgtgccggtatcagaatatctggaacatcaacctgcagttgcggcccagcctcataacagggatcatgaaagacagtggaaacaagcctccaggtctgcttccccgcaaaggactatacatggcaaatgacttaaagctcctgagacaccatctccagattcccatccacttccccaaggatttcttgtctgtgatgcttgaaaaaggaagtttgtctgccatgcgtttcctcaccgccgtgaacttggagcatccagagatgctggagaaagcgtcccgggagctgtggatgcgcgtctggtcaaggaatgaagacatcaccgagccgcagagcatcctggcggctgcagagaaggctggtatgtctgcagaacaagcccagggacttctggaaaagatcgcaacgccaaaggtgaagaaccagctcaaggagaccactgaggcagcctgcagatacggagcctttgggctgcccatcaccgtggcccatgtggatggccaaacccacatgttatttggctctgaccggatggagctgctggcgcacctgctgggagagaagtggatgggccctatacctccagccgtgaatgccagactttaagattgcccggaggaagcaaactcttsktataaaaaaagcaggccatctgcttaacccttggctccaccataaggcactgggactcggatttctctatctgatagaggtattttctgtggccctgggagctgtctgtctttcccctacccccaaggatgccaggaagacgtccaccattagccatgtggcaacctttacttctatgcctcacaagtgcctttcagagagccccaattctgctttcccacaaaataaacctaatgccatcaggcaaaacatt

SEQ ID NO: 4119 - DNA, 1224 bp, Homo sapiens
gtgggcggtcccaggcaggcccagaagctgggcagcctctgccgggttccgggaaaaggagctcctgctgccactgctcttccggagcctgcagcatggggcccctgccgcgcaccgtggagctcttctatgacgtgctgtccccctactcctggctgggcttcgagatcctgtgccggtatcagaatatctggaacatcaacctgcagttgcggcccagcctcataacagggatcatgaaagacagtggaaacaagcctccaggtctgcttccccgcaaaggactatacatggcaaatgacttaaagctcctgagacaccatctccagattcccatccacttccccaaggatttcttgtctgtgatgcttgaaaaaggaagtttgtctgccatgcgtttcctcaccgccgtgaacttggagcatccagagatgctggagaaagcgtcccgggagctgtggatgcgcgtctggtcaagggtgagtgtggggctctgggaatcctctgggaggaccttggatgactttctgaccttccccaggcacgttttcagggtcatgatcctgcccccgcccgggggatctactgtcctcccagtcacacccctctccccgcaccgccttcctgctgtcttctcttcttcccagaatgaagacatcaccgagccgcagagcatcctggcggctgcagagaaggctggtatgtctgcagaacaagcccagggacttctggaaaagatcgcaacgccaaaggtgaagaaccagctcaaggagaccactgaggcagcctgcagatacggagcctttgggctgcccatcaccgtggcccatgtggatggccaaacccacatgttatttggctctgaccggatggagctgctggcgcacctgctgggagagaagtggatgggccctatacctccagccgtgaatgccagactttaagattgcccggaggaagcaaactcttsktataaaaaaagcaggccatctgcttaacccttggctccaccataaggcactgggactcggatttctctatctgatagaggtattttctgtggccctgggagctgtctgtctttcccctacccccaaggatgccaggaagacgtccaccattagccatgtggcaacctttacttctatgcctcacaagtgcctttcagagagccccaattctgctttcccacaaaataaacctaatgccatcaggcaaaacatt

SEQ ID NO: 4120 - DNA, 1678 bp, Homo sapiens
ttccgggaaaaggagctcctgctgccactgctcttccggagcctgcagcatggggcccctgccgcgcaccgtggagctcttctatgacgtgctgtccccctactcctggctgggcttcgaggtgacgctgggaggggtcgcctcggcagtgtctggggagtgagggcggagggaagagtgagcgcagggctccgggacagaggtctcgtgtaactcctggcgccgcccaaggggttaaggcaagcagggagagctccggggctgaaggtcactttgtgcttttaaacggaatagagtcgctggctccaacccgagcctttatatcccgactgcagtttcccacggtggtggaaagaggggcggctccaaacattcagggagaaatgcagaacacggccacctcttagcccaacgatggcagttttggggaaaactggccacaggagcgaagatcctggaatagatttctagtagtgaggagagttttgccaatttcaaaccaaacaatgtagggtgtccgcataacccctgctctgcacttagcgcctcccttccctttccctcggctctttcacttttccatcttgcacactggcaatcgttcttgacctctgcccgcagatcctgtgccggtatcagaatatctggaacatcaacctgcagttgcggcccagcctcataacagggatcatgaaagacagtggaaacaagcctccaggtctgcttccccgcaaaggactatacatggcaaatgacttaaagctcctgagacaccatctccagattcccatccacttccccaaggatttcttgtctgtgatgcttgaaaaaggaagtttgtctgccatgcgtttcctcaccgccgtgaacttggagcatccagagatgctggagaaagcgtcccgggagctgtggatgcgcgtctggtcaagggtgagtgtggggctctgggaatcctctgggaggaccttggatgactttctgaccttccccaggcacgttttcagggtcatgatcctgcccccgcccgggggatctactgtcctcccagtcacacccctctccccgcaccgccttcctgctgtcttctcttcttcccagaatgaagacatcaccgagccgcagagcatcctggcggctgcagagaaggctggtatgtctgcagaacaagcccagggacttctggaaaagatcgcaacgccaaaggtgaagaaccagctcaaggagaccactgaggcagcctgcagatacggagcctttgggctgcccatcaccgtggcccatgtggatggccaaacccacatgttatttggctctgaccggatggagctgctggcgcacctgctgggagagaagtggatgggccctatacctccagccgtgaatgccagactttaagattgcccggaggaagcaaactcttsktataaaaaaagcaggccatctgcttaacccttggctccaccataaggcactgggactcggatttctctatctgatagaggtattttctgtggccctgggagctgtctgtctttcccctacccccaaggatgccaggaagacgtccaccattagccatgtggcaacctttacttctatgcctcacaagtgcctttcagagagccccaattctgctttcccacaaaataaacctaatgccatcaggcaaaacatt

SEQ ID NO: 4121 - DNA, 5163 bp, Homo sapiens
tctcttgggtcagattctcagctcccagctccccgctcccggctcccggcgcccggcgcccggcgcggagctgttcctcaaacgacacgcagccgaggtgggtgggtgtggggacgcgggagccagtgtcgtcggatcggcccgcagtccgctgtcctgctgagcccggaggccgcctggatggagccgccgctcccggtcggagcccagccgcttgcccgcccgcatactgtcgagggtatggagatgaagggtcctctccgggagccctgcgccctgaccctagcccagaggaacgggcaatatgagttaataatccagttgcatgagaaggaacagcatgttcaagatatcattcctataaatagccacttcagatgtgttcaagaagcagaagaaactcttttgattgacatagcttctaacagtggctgcaaaattcgggttcagggggactggatcagagagcgccgctttgaaatccctgatgaggaacactgtttgaagttcctctcagctgtccttgctgctcagaaagctcagtcacagcttcttgttccagagcaaaaggactcatctagctggtaccagaaattagacactaaggacaaaccttctgttttttcagggcttcttggatttgaagacaatttttcttctatgaatttggacaagaaaataaattcacaaaatcagcctactgggattcatcgggaacccccacctccacccttttcagtgaataaaatgcttccacgtgaaaaagaagcttctaacaaggagcagcccaaagtgaccaacaccatgcggaagctctttgtaccaaatacccaatctgggcagcgggagggtctcatcaaacatatcctggcaaagcgagagaaagaatatgtcaacattcagactttcagattttttgttggaacttggaatgtgaatggccagtctccagatagcgggttagaaccttggctgaactgtgatcccaatcctcctgatatctactgcattggattccaagaactggacttgagcacagaagccttcttctactttgaatctgtgaaggaayaagaatrgtccatggctgtagagagaggtttgcattccaaagccaagtataagaaagttcaactggtgcgccttgttgggatgatgcttcttatatttgccagaaaggatcagtgtysatacattcgtgatattgctacagaaacagttggaactggaatcatggggaaaatgggaaacaaaggtgrggtagctgtgagatttgtatttcacaacaccaccttttgcattgkcaattccyatctggctgcacacgtggaggactttgagagaaggaatyaagattataaggacatttgtgcgagaatgagttttgtggtcccaaatcagaccctcccgcagttgaacatcatgaaacatgaggttgtcatttggttggragatttgaattatagactttgcatgcctgatgccaatgaggtgaaaagtcttattaataagaaagaccttcagagactcttgaaattcgrccagctaaatattcagcgcacacagaaaaaagcttttgttgacttcaatgaaggggaaatcaagttcatccccacttataagtatgactctaaaacagaccggtgggattccagtgggaaatgccgggttccagcctggtgtgaccgaattctttggagaggaacaaatgwtaatcagcttaattrtcggagtcacatggaactgaaaaccagcgaccacaagcctgttagcgccctcttccatattggggtgaaggttgtggatgaacgaaggtaccggaaagtctttgaagatagtgtacgcatcatggacagaatggaaaatgacttccttccttccttagaactcagcaggagggagtttgtgtttkaaaatgtgaagtttcggcaactacaaaaggagaagttccagatcagcaacaatggacaggttccctgccatttttctttcatccctaaacttaatgacagccagtastgcaagccatggcttcgggctgaaccttttgagggctacttggagccaaatgagacagtggacatttctcttgatgtgtatgtcagcaaagactctgtaaccatcctgaactcgggagaagataagattgaagatattctcgtccttcacctggatygaggcaaagattacttcttgactatcagtggaaattacctcccaagttgttttggcacatccttagaggctctgtgccgtatgaaaagaccaatccgagaagttcctgttaccaaactcatagacttggagaaatcccttctgcaaatggttcctttggatgaaggtgccagtgagagaccccttcaggttcccaaggagatctggcttctagtagatcacctattcaaatacgcctgtcaccaggaggacctgttcyagacccctggaatgcaggaagagctccagcagatcattgattgtctggataccagcattcctgagacaatccctggcagcaaccactctgtggctgaagcactgctcattttcttggaasccctgccagagccagtcatctgttasgagctgtatcagygatgtcttgactctgcttatgatccccggatctgccgayaggtgatctcccagcttccgagatgccatagaaatgttttccgttacttgatggcattccttygakaactcttaaaattctctgaatacaatagcgtcaatgccaacatgatcgctactctcttcactagtcttctcctgaggcctccacccaaccttatggcaagacagactccaagtgaccgccagcgtgctattcagttccttctgggctttctgcttgggagcgaagaagactaaggcttttactgttctctgatattctagaagcagacgatctcgggctccaagtatttcagaatgatttaaaaagtcatgccacaggaagggtctattgcagaatttcaagttctgtttatagtaaaaaggaagagcgtttcctaatccctcctttaccatatcctacacagaaaaatacttttagacttatattgccaagccaaagttaccatattttggtgtttttgtgttttctctttataaggcaaaaagatctgtatttacactccttcacctarggatgtgtttgttgccctcctacccaattgtcatgattgtccttagtaccctaggcctagattctgagatcttcccattctaggcctacaagcactacttkctgtagctgagacttgtctagagtcctttgttttgcacttttgacccaccccttcctggatcactcctttgcactccactcccctcgttctgtcactttgaacgaagtctgagtgaggctagtgactccttgggtgtcctcaacagtgaattcactgtctgcgtgcagttattacatgcatttgtgcatttctactacaatggcatctttatgtctctgtaacattggccttttcatggctccacactgggtggaaccatattctcttagatcacatttagtagcataactgtagggactattagagatggcatctcatcgatgagagagaatcacaatcagaatggaagcactttgagtatctgaagagtgagagcattcatgtttgacaggtcctgcttcccactatccttttcctgttattattcaaattttacacaaggactaatcctgggtgtctctgagacccatctcctgcctagacatccacctccagagcaacactggccccacagtaaaagaggaagtcttgtacctcaggcaggcccatctagagctattgctccttcccacagcaaaggtattgtggatgacccttagaatccattctctggtcttctgaaataccaagggcagatgtcacctccttcctcagcaggactgactctgggctctacaaccagctccttcacataaagggtttagagactccccttggctcccagtcaccatatccagtgttgtgtaaagagactggccaacaggaccaaccaagcaccttacctctcccatacaagatgaccctctgagcttttcatttattcaagctctgtggtacagcctttttttaaaataaattaatctatattggttgacaaacaagccaccaaccactgactgcaaaactgcctgatgcagttgggttcctcctggttttcttttgttacaaccacccttgcctgtttacattaattgcaaggagcataacgtacaggctgtatgtacaatcctgggcattgactctgtgacatttctagcatatccaaggcaccaccagtgatttctcctgtttcttggtgggggtgggggggaaggtacgtattctgcaatatggctaaaccctttcctgattgagagttaaagcaataggagtcaagttactggtgccacagatctggaggtatgataggtcaggggctaggtgttgaacttagttaatggaagactgagagcagaacaggtttgtcatctccgcaaggccagaaagtgatcacaaaaagaggcagatgatagayactggggtagggtcataccacagggaaatacctttcctgggcttgttttctagcatatcactgacctgggatctttgggtgatcaagggtgtggttagtggaggctctgtgctgcacgtatgcagtatcctatctctttctacatcagatcaaaacactaagttggtgtactgcctcgaccttttttcagctcatcctggaacatatacagagttgagagttttagacaatctctaggtagaggagacaagatgtagacccagacagaagaaatctgcttccctaccatggctattccagcaccccaacctgtaattgccaagtcctctaaggtactaatttgtagctgctctgaagtaaggatttcggattcagctggtagggaaagactctgcacctgctgtcttagggaagaaatggttcaaatccatgtggtgacattgcattagtctccctttcactgttttcttattctgtaattgtttgttatatttcccaaaaacgtcttgatcactaagcaaagctgctagtggsattctatatttcgtgtcatcttttttattataatttattgcaaatttttttctgaataaatatatgttgtgtgaaaaagcaaag

SEQ ID NO: 4122 - DNA, 5154 bp, Homo sapiens
tctcttgggtcagattctcagctcccagctccccgctcccggctcccggcgcccggcgcccggcgcggagctgttcctcaaacgacacgcagccgaggtgggtgggtgtggggacgcgggagccagtgtcgtcggatcggcccgcagtccgctgtcctgctgagcccggaggccgcctggatggagccgccgctcccggtcggagcccagccgcttgccactgtcgagggtatggagatgaagggtcctctccgggagccctgcgccctgaccctagcccagaggaacgggcaatatgagttaataatccagttgcatgagaaggaacagcatgttcaagatatcattcctataaatagccacttcagatgtgttcaagaagcagaagaaactcttttgattgacatagcttctaacagtggctgcaaaattcgggttcagggggactggatcagagagcgccgctttgaaatccctgatgaggaacactgtttgaagttcctctcagctgtccttgctgctcagaaagctcagtcacagcttcttgttccagagcaaaaggactcatctagctggtaccagaaattagacactaaggacaaaccttctgttttttcagggcttcttggatttgaagacaatttttcttctatgaatttggacaagaaaataaattcacaaaatcagcctactgggattcatcgggaacccccacctccacccttttcagtgaataaaatgcttccacgtgaaaaagaagcttctaacaaggagcagcccaaagtgaccaacaccatgcggaagctctttgtaccaaatacccaatctgggcagcgggagggtctcatcaaacatatcctggcaaagcgagagaaagaatatgtcaacattcagactttcagattttttgttggaacttggaatgtgaatggccagtctccagatagcgggttagaaccttggctgaactgtgatcccaatcctcctgatatctactgcattggattccaagaactggacttgagcacagaagccttcttctactttgaatctgtgaaggaayaagaatrgtccatggctgtagagagaggtttgcattccaaagccaagtataagaaagttcaactggtgcgccttgttgggatgatgcttcttatatttgccagaaaggatcagtgtysatacattcgtgatattgctacagaaacagttggaactggaatcatggggaaaatgggaaacaaaggtgrggtagctgtgagatttgtatttcacaacaccaccttttgcattgkcaattccyatctggctgcacacgtggaggactttgagagaaggaatyaagattataaggacatttgtgcgagaatgagttttgtggtcccaaatcagaccctcccgcagttgaacatcatgaaacatgaggttgtcatttggttggragatttgaattatagactttgcatgcctgatgccaatgaggtgaaaagtcttattaataagaaagaccttcagagactcttgaaattcgrccagctaaatattcagcgcacacagaaaaaagcttttgttgacttcaatgaaggggaaatcaagttcatccccacttataagtatgactctaaaacagaccggtgggattccagtgggaaatgccgggttccagcctggtgtgaccgaattctttggagaggaacaaatgwtaatcagcttaattrtcggagtcacatggaactgaaaaccagcgaccacaagcctgttagcgccctcttccatattggggtgaaggttgtggatgaacgaaggtaccggaaagtctttgaagatagtgtacgcatcatggacagaatggaaaatgacttccttccttccttagaactcagcaggagggagtttgtgtttkaaaatgtgaagtttcggcaactacaaaaggagaagttccagatcagcaacaatggacaggttccctgccatttttctttcatccctaaacttaatgacagccagtastgcaagccatggcttcgggctgaaccttttgagggctacttggagccaaatgagacagtggacatttctcttgatgtgtatgtcagcaaagactctgtaaccatcctgaactcgggagaagataagattgaagatattctcgtccttcacctggatygaggcaaagattacttcttgactatcagtggaaattacctcccaagttgttttggcacatccttagaggctctgtgccgtatgaaaagaccaatccgagaagttcctgttaccaaactcatagacttggagaaatcccttctgcaaatggttcctttggatgaaggtgccagtgagagaccccttcaggttcccaaggagatctggcttctagtagatcacctattcaaatacgcctgtcaccaggaggacctgttcyagacccctggaatgcaggaagagctccagcagatcattgattgtctggataccagcattcctgagacaatccctggcagcaaccactctgtggctgaagcactgctcattttcttggaasccctgccagagccagtcatctgttasgagctgtatcagygatgtcttgactctgcttatgatccccggatctgccgayaggtgatctcccagcttccgagatgccatagaaatgttttccgttacttgatggcattccttygakaactcttaaaattctctgaatacaatagcgtcaatgccaacatgatcgctactctcttcactagtcttctcctgaggcctccacccaaccttatggcaagacagactccaagtgaccgccagcgtgctattcagttccttctgggctttctgcttgggagcgaagaagactaaggcttttactgttctctgatattctagaagcagacgatctcgggctccaagtatttcagaatgatttaaaaagtcatgccacaggaagggtctattgcagaatttcaagttctgtttatagtaaaaaggaagagcgtttcctaatccctcctttaccatatcctacacagaaaaatacttttagacttatattgccaagccaaagttaccatattttggtgtttttgtgttttctctttataaggcaaaaagatctgtatttacactccttcacctarggatgtgtttgttgccctcctacccaattgtcatgattgtccttagtaccctaggcctagattctgagatcttcccattctaggcctacaagcactacttkctgtagctgagacttgtctagagtcctttgttttgcacttttgacccaccccttcctggatcactcctttgcactccactcccctcgttctgtcactttgaacgaagtctgagtgaggctagtgactccttgggtgtcctcaacagtgaattcactgtctgcgtgcagttattacatgcatttgtgcatttctactacaatggcatctttatgtctctgtaacattggccttttcatggctccacactgggtggaaccatattctcttagatcacatttagtagcataactgtagggactattagagatggcatctcatcgatgagagagaatcacaatcagaatggaagcactttgagtatctgaagagtgagagcattcatgtttgacaggtcctgcttcccactatccttttcctgttattattcaaattttacacaaggactaatcctgggtgtctctgagacccatctcctgcctagacatccacctccagagcaacactggccccacagtaaaagaggaagtcttgtacctcaggcaggcccatctagagctattgctccttcccacagcaaaggtattgtggatgacccttagaatccattctctggtcttctgaaataccaagggcagatgtcacctccttcctcagcaggactgactctgggctctacaaccagctccttcacataaagggtttagagactccccttggctcccagtcaccatatccagtgttgtgtaaagagactggccaacaggaccaaccaagcaccttacctctcccatacaagatgaccctctgagcttttcatttattcaagctctgtggtacagcctttttttaaaataaattaatctatattggttgacaaacaagccaccaaccactgactgcaaaactgcctgatgcagttgggttcctcctggttttcttttgttacaaccacccttgcctgtttacattaattgcaaggagcataacgtacaggctgtatgtacaatcctgggcattgactctgtgacatttctagcatatccaaggcaccaccagtgatttctcctgtttcttggtgggggtgggggggaaggtacgtattctgcaatatggctaaaccctttcctgattgagagttaaagcaataggagtcaagttactggtgccacagatctggaggtatgataggtcaggggctaggtgttgaacttagttaatggaagactgagagcagaacaggtttgtcatctccgcaaggccagaaagtgatcacaaaaagaggcagatgatagayactggggtagggtcataccacagggaaatacctttcctgggcttgttttctagcatatcactgacctgggatctttgggtgatcaagggtgtggttagtggaggctctgtgctgcacgtatgcagtatcctatctctttctacatcagatcaaaacactaagttggtgtactgcctcgaccttttttcagctcatcctggaacatatacagagttgagagttttagacaatctctaggtagaggagacaagatgtagacccagacagaagaaatctgcttccctaccatggctattccagcaccccaacctgtaattgccaagtcctctaaggtactaatttgtagctgctctgaagtaaggatttcggattcagctggtagggaaagactctgcacctgctgtcttagggaagaaatggttcaaatccatgtggtgacattgcattagtctccctttcactgttttcttattctgtaattgtttgttatatttcccaaaaacgtcttgatcactaagcaaagctgctagtggsattctatatttcgtgtcatcttttttattataatttattgcaaatttttttctgaataaatatatgttgtgtgaaaaagcaaag

SEQ ID NO: 4123 - DNA, 5178 bp, Homo sapiens
tctcttgggtcagattctcagctcccagctccccgctcccggctcccggcgcccggcgcccggcgcggagctgttcctcaaacgacacgcagccgaggtgggtgggtgtggggacgcgggagccagtgtcgtcggatcggcccgcagtccgctgtcctgctgagcccggaggccgcctggatggagccgccgctcccggtcggagcccagccgcttgccactgtcgagggtatggagatgaagggtcctctccgggagccctgcgccctgaccctagcccagaggaacgggcaatatgagttaataatccagttgcatgagaaggaacagcatgttcaagatatcattcctataaatagccacttcagatgtgttcaagaagcagaagaaactcttttgattgacatagcttctaacagtggctgcaaaattcgggttcagggggactggatcagagagcgccgctttgaaatccctgatgaggaacactgtttgaagttcctctcagctgtccttgctgctcagaaagctcagtcacagcttcttgttccagagcaaaaggactcatctagctggtaccagaaattagacactaaggacaaaccttctgttttttcagggcttcttggatttgaagacaatttttcttctatgaatttggacaagaaaataaattcacaaaatcagcctactgggattcatcgggaacccccacctccacccttttcagtgaataaaatgcttccacgtgaaaaagaagcttctaacaaggagcagcccaaagtgaccaacaccatgcggaagctctttgtaccaaatacccaatctgggcagcgggagggtctcatcaaacatatcctggcaaagcgagagaaagaatatgtcaacattcagactttcagattttttgttggaacttggaatgtgaatggccagtctccagatagcgggttagaaccttggctgaactgtgatcccaatcctcctgatatctactgcattggattccaagaactggacttgagcacagaagccttcttctactttgaatctgtgaaggaayaagaatrgtccatggctgtagagagaggtttgcattccaaagccaagtataagaaagttcaactggtgcgccttgttgggatgatgcttcttatatttgccagaaaggatcagtgtysatacattcgtgatattgctacagaaacagttggaactggaatcatggggaaaatgggaaacaaaggtgrggtagctgtgagatttgtatttcacaacaccaccttttgcattgkcaattccyatctggctgcacacgtggaggactttgagagaaggaatyaagattataaggacatttgtgcgagaatgagttttgtggtcccaaatcagaccctcccgcagttgaacatcatgaaacatgaggttgtcatttggttggragatttgaattatagactttgcatgcctgatgccaatgaggtgaaaagtcttattaataagaaagaccttcagagactcttgaaattcgrccagctaaatattcagcgcacacagaaaaaagcttttgttgacttcaatgaaggggaaatcaagttcatccccacttataagtatgactctaaaacagaccggtgggattccagtgggaaatgccgggttccagcctggtgtgaccgaattctttggagaggaacaaatgwtaatcagcttaattrtcggagtcacatggaactgaaaaccagcgaccacaagcctgttagcgccctcttccatattggggtgaaggttgtggatgaacgaaggtaccggaaagtctttgaagatagtgtacgcatcatggacagaatggaaaatgacttccttccttccttagaactcagcaggagggagtttgtgtttkaaaatgtgaagtttcggcaactacaaaaggagaagttccagatcagcaacaatggacaggttccctgccatttttctttcatccctaaacttaatgacagccagtastgcaagccatggcttcgggctgaaccttttgagggctacttggagccaaatgagacagtggacatttctcttgatgtgtatgtcagcaaagactctgtaaccatcctgaactcgggagaagataagattgaagatattctcgtccttcacctggatygaggcaaagattacttcttgactatcagtggaaattacctcccaagttgttttggcacatccttagaggctctgtgccgtatgaaaagaccaatccgagaagttcctgttaccaaactcatagacttggaagaagacagcttcctagaaaaggagaaatcccttctgcaaatggttcctttggatgaaggtgccagtgagagaccccttcaggttcccaaggagatctggcttctagtagatcacctattcaaatacgcctgtcaccaggaggacctgttcyagacccctggaatgcaggaagagctccagcagatcattgattgtctggataccagcattcctgagacaatccctggcagcaaccactctgtggctgaagcactgctcattttcttggaasccctgccagagccagtcatctgttasgagctgtatcagygatgtcttgactctgcttatgatccccggatctgccgayaggtgatctcccagcttccgagatgccatagaaatgttttccgttacttgatggcattccttygakaactcttaaaattctctgaatacaatagcgtcaatgccaacatgatcgctactctcttcactagtcttctcctgaggcctccacccaaccttatggcaagacagactccaagtgaccgccagcgtgctattcagttccttctgggctttctgcttgggagcgaagaagactaaggcttttactgttctctgatattctagaagcagacgatctcgggctccaagtatttcagaatgatttaaaaagtcatgccacaggaagggtctattgcagaatttcaagttctgtttatagtaaaaaggaagagcgtttcctaatccctcctttaccatatcctacacagaaaaatacttttagacttatattgccaagccaaagttaccatattttggtgtttttgtgttttctctttataaggcaaaaagatctgtatttacactccttcacctarggatgtgtttgttgccctcctacccaattgtcatgattgtccttagtaccctaggcctagattctgagatcttcccattctaggcctacaagcactacttkctgtagctgagacttgtctagagtcctttgttttgcacttttgacccaccccttcctggatcactcctttgcactccactcccctcgttctgtcactttgaacgaagtctgagtgaggctagtgactccttgggtgtcctcaacagtgaattcactgtctgcgtgcagttattacatgcatttgtgcatttctactacaatggcatctttatgtctctgtaacattggccttttcatggctccacactgggtggaaccatattctcttagatcacatttagtagcataactgtagggactattagagatggcatctcatcgatgagagagaatcacaatcagaatggaagcactttgagtatctgaagagtgagagcattcatgtttgacaggtcctgcttcccactatccttttcctgttattattcaaattttacacaaggactaatcctgggtgtctctgagacccatctcctgcctagacatccacctccagagcaacactggccccacagtaaaagaggaagtcttgtacctcaggcaggcccatctagagctattgctccttcccacagcaaaggtattgtggatgacccttagaatccattctctggtcttctgaaataccaagggcagatgtcacctccttcctcagcaggactgactctgggctctacaaccagctccttcacataaagggtttagagactccccttggctcccagtcaccatatccagtgttgtgtaaagagactggccaacaggaccaaccaagcaccttacctctcccatacaagatgaccctctgagcttttcatttattcaagctctgtggtacagcctttttttaaaataaattaatctatattggttgacaaacaagccaccaaccactgactgcaaaactgcctgatgcagttgggttcctcctggttttcttttgttacaaccacccttgcctgtttacattaattgcaaggagcataacgtacaggctgtatgtacaatcctgggcattgactctgtgacatttctagcatatccaaggcaccaccagtgatttctcctgtttcttggtgggggtgggggggaaggtacgtattctgcaatatggctaaaccctttcctgattgagagttaaagcaataggagtcaagttactggtgccacagatctggaggtatgataggtcaggggctaggtgttgaacttagttaatggaagactgagagcagaacaggtttgtcatctccgcaaggccagaaagtgatcacaaaaagaggcagatgatagayactggggtagggtcataccacagggaaatacctttcctgggcttgttttctagcatatcactgacctgggatctttgggtgatcaagggtgtggttagtggaggctctgtgctgcacgtatgcagtatcctatctctttctacatcagatcaaaacactaagttggtgtactgcctcgaccttttttcagctcatcctggaacatatacagagttgagagttttagacaatctctaggtagaggagacaagatgtagacccagacagaagaaatctgcttccctaccatggctattccagcaccccaacctgtaattgccaagtcctctaaggtactaatttgtagctgctctgaagtaaggatttcggattcagctggtagggaaagactctgcacctgctgtcttagggaagaaatggttcaaatccatgtggtgacattgcattagtctccctttcactgttttcttattctgtaattgtttgttatatttcccaaaaacgtcttgatcactaagcaaagctgctagtggsattctatatttcgtgtcatcttttttattataatttattgcaaatttttttctgaataaatatatgttgtgtgaaaaagcaaag

SEQ ID NO: 4124 - DNA, 2314 bp, Homo sapiens
tatcagatacacaccggacttcaacattctatcataagacctacccaacccaactgtttacctctggacaatgccaccctacctcagaaactgaaggaggttggatattcaacgcatatggtcggaaaatggcacttgggtttttacagaaaagaatgcatgcccaccagaagaggatttgataccttttttggttcccttttgggaagtggggattactatacacactacaaatgtgacagtcctgggatgaggagatatgctgccatgctttcctgcttagatgaagcaatcaacaacgtgacattggctctaaagacttatggtttctataacaacagcattatcatttactcttcagataatggtggccagcctacggcaggagggagtaactggcctctcagaggtagcaaaggaacatattgggaaggagggatccgggctgtaggctttgtgcatagcccacttctgaaaaacaagggaacagtgtgtaaggaacttgtgcacatcactgactggtaccccactctcatttcactggctgaaggacagattgatgaggacattcaactagatggctatgatatctgggagaccataagtgagggtcttcgctcaccccgagtagatattttgcataacattgaccccatatacaccaaggcaaaaaatggctcctgggcagcaggctatgggatctggaacactgcaatccagtcagccatcagagtgcagcactggaaattgcttacaggaaatcctggctacagcgactgggtcccccctcagtctttcagcaacctgggaccgaaccggtggcacaatgaacggatcaccttgtcaactggcaaragtgtatggcttttcaacatcacagccgacccatatgagagggtggacctatctaacaggtatccakgaatcgtgaagaagctcctacgraggctctcacagttcaacaaaactgcagtgccggtcaggtatccccccaaagaccccagaagtaaccctaggctcaatggaggggtctggggaccatggtataaagaggaaaccaagaaaaagaagccaagsaaaaatcaggctgagaaaaagcaaaagaaaagcaaaaaaaagaagaagaaacagcagaaagcagtctcaggttcaacttgccattcaggtgttacttgtggataagcacaaatatttcctgtttggttaaactttaatcagttcttatctttcatctgtttcctaggtaaaccagcaaatttggctcgataatatcgctggcctaagcgtcaggcttgttttcatgctgtgccactccagagacttctgccacctggccgccacactgaaaactgtcctgctcagtgccaaggtgctactcttgcaagccacacttagagagagtggagatgtttatttctctygctcctttagaaaacgtggtgagtcctgagttccactgctgtgcttcagtcaactgaccaaacactgctttgaattataggaggagaacaataacctaccatccgcaagcatgctaatttgatggaagttacagggtagcvtgatkaaaactacctttgataaattacagtcaaagattgtgtcacctcaaaggccttgaagaatatattttcttggtgaatttttgtatgtctgtcatatgacacttgggttttttaattaattctattttatatatataaatatatgtttcttttcctgtgaaaagctgtttttctcacatgtgaacagcttgcacctcattttaccatgcgtgagggaatggcaaataagaatgtttgagcacactgcccacaatgaatgtaactattttctaaacactttactagaagaacatttcagtataaaaaacctaatttatttttacagaaaaatattttgttgtttttataaaaagttatgcaaatgacttttatttttatttcctgcataccattagaakaattttatttcatttcttcaaattaycaagcactgtaatactataaattaatgtaatactgtgtgaattcagactataaaaaacatcattcagaaaactttataatcgtcattgttcaaycaagattttgaatgtaataagatgaatatattccttacaaattacttggaaattcaatgtttgtgcagagttgagacaactttattgtttctatcataaactatttatgtatcttaattattaaaatgatttactttatggcactagaaaatttactgtggcttttctgatctaacttctagctaaaattgtatcattggtcctaaaaaataaaaatctttactaataggc

SEQ ID NO: 4125 - DNA, 2544 bp, Homo sapiens
ttttcttaaggtatcagatacacaccggacttcaacattctatcataagacctacccaacccaactgtttacctctggacaatgccaccctacctcagaaactgaaggaggttggatattcaacgcatatggtcggaaaatggcacttgggtttttacagaaaagaatgcatgcccaccagaagaggatttgataccttttttggttcccttttgggaagtggggattactatacacactacaaatgtgacagtcctgggatgtgtggctatgacttgtatgaaaacgacaatgctgcctgggactatgacaatggcatatactccacacagatgtacactcagagagtacagcaaatcttagcttcccataaccccacaaagcctatatttttatatattgcctatcaagctgttcattcaccactgcaagctcctggcaggtatttcgaacactaccgatccattatcaacataaacaggaggagatatgctgccatgctttcctgcttagatgaagcaatcaacaacgtgacattggctctaaagacttatggtttctataacaacagcattatcatttactcttcagataatggtggccagcctacggcaggagggagtaactggcctctcagaggtagcaaaggaacatattgggaaggagggatccgggctgtaggctttgtgcatagcccacttctgaaaaacaagggaacagtgtgtaaggaacttgtgcacatcactgactggtaccccactctcatttcactggctgaaggacagattgatgaggacattcaactagatggctatgatatctgggagaccataagtgagggtcttcgctcaccccgagtagatattttgcataacattgaccccatatacaccaaggcaaaaaatggctcctgggcagcaggctatgggatctggaacactgcaatccagtcagccatcagagtgcagcactggaaattgcttacaggaaatcctggctacagcgactgggtcccccctcagtctttcagcaacctgggaccgaaccggtggcacaatgaacggatcaccttgtcaactggcaaragtgtatggcttttcaacatcacagccgacccatatgagagggtggacctatctaacaggtatccakgaatcgtgaagaagctcctacgraggctctcacagttcaacaaaactgcagtgccggtcaggtatccccccaaagaccccagaagtaaccctaggctcaatggaggggtctggggaccatggtataaagaggaaaccaagaaaaagaagccaagsaaaaatcaggctgagaaaaagcaaaagaaaagcaaaaaaaagaagaagaaacagcagaaagcagtctcaggttcaacttgccattcaggtgttacttgtggataagcacaaatatttcctgtttggttaaactttaatcagttcttatctttcatctgtttcctaggtaaaccagcaaatttggctcgataatatcgctggcctaagcgtcaggcttgttttcatgctgtgccactccagagacttctgccacctggccgccacactgaaaactgtcctgctcagtgccaaggtgctactcttgcaagccacacttagagagagtggagatgtttatttctctygctcctttagaaaacgtggtgagtcctgagttccactgctgtgcttcagtcaactgaccaaacactgctttgaattataggaggagaacaataacctaccatccgcaagcatgctaatttgatggaagttacagggtagcvtgatkaaaactacctttgataaattacagtcaaagattgtgtcacctcaaaggccttgaagaatatattttcttggtgaatttttgtatgtctgtcatatgacacttgggttttttaattaattctattttatatatataaatatatgtttcttttcctgtgaaaagctgtttttctcacatgtgaacagcttgcacctcattttaccatgcgtgagggaatggcaaataagaatgtttgagcacactgcccacaatgaatgtaactattttctaaacactttactagaagaacatttcagtataaaaaacctaatttatttttacagaaaaatattttgttgtttttataaaaagttatgcaaatgacttttatttttatttcctgcataccattagaakaattttatttcatttcttcaaattaycaagcactgtaatactataaattaatgtaatactgtgtgaattcagactataaaaaacatcattcagaaaactttataatcgtcattgttcaaycaagattttgaatgtaataagatgaatatattccttacaaattacttggaaattcaatgtttgtgcagagttgagacaactttattgtttctatcataaactatttatgtatcttaattattaaaatgatttactttatggcactagaaaatttactgtggcttttctgatctaacttctagctaaaattgtatcattggtcctaaaaaataaaaatctttactaataggc

SEQ ID NO: 4126 - DNA, 3286 bp, Homo sapiens
aagttctgaacttgtgaggcatctgggcctccccagaagacatttaacacagaaagcacagccctactaactagtattcttacctgtctcttcaagaatttcagaccaatcgaccgtcctgtctctttaaggcttaggaagagcagtgtggctgcccctttaaggaggcgttgcaacaaaccatattggacagacgatgggggcgacccatcgggacccgacgggcctctgactccagcaatacagcgaatcagcggctttcgggaatacatttttcggaaaaagacttcttcctcggttttctgctctgcacacgttgaaattttccccagtttttcctgcagatcgggagtcgagcaatgcctacccccgcgctcccgcaccagttgggcgctcccggatgatgccctacccctttggatccacgtggtctgcaacctggtgcgagcagcccgggctacarggttrcctgaggtgtgggtcccaggatggaggagccccaggccggcgatgctgctcggttctcttgtccccccaactttaccgcgaagcccccagcctcagagtcccctcgtttctccttggaggcgctgacgggtccagatacggagctgtggcttattcaggcccctgcagactttgccccagaatgcttcaatgggcggcatgtgcctctctctggctcccagatcgtcaagggcaaattggcaggcaagcggcaccgctatcgagtcctcagcagctgtccccaagctggagaagcgaccctgctggccccctcaacggaggcaggaggtggactcacctgtgcctcagccccccagggcaccctaaggatccttgagggtccccagcaatccctgtcagggagccctctgcagcccatcccagcaagtcccccaccacagatccctcctggcctgaggcctcggttctgtgcctttgggggcaacccaccagtcacagggcctaggtcagccttggcccccaacctgctcacctcagggaagaagaaaaaggagatgcaggtgacagaggccccagtcactcaggaggcagtgaatgggcacggggccctggaggtggacatggctttggggtcgccagaaatggatgtgcggaagaagaagaagaaaaaaaatcagcagctgaaagaaccagaggcagcagggcctgtggggacagagcccacagtggagacactggagcctctgggagtgctgttcccgtccaccaccaagaagaggaagaagcccaaagggamagaaaccttcgagccagaagacaagacagtgaagcaggaacagattaacactgagcctctagaagacrcagtcctgtccccgaccaaaaagagaaagaggcaaaaggggacggaagggatggagccagaggagggggtgacagttgagtctcagccacaggtgaaggtggagccactggaggaagccatccctctgccccctacgaagaagaggaaaaaagaaaagggacagatggcaatgatggagccagggacggaggcgatggagccagtggagccggagatgaagcctctggagtccccaggggggaccatggcgcctcaacagccagaaggagcgragcctcaggcccaggcagctctggcagctcccaaaaagaagacgaagaaagaaaaacagcaaratgccacagtggagccagagacagaggtggtggggcctgagctgccggatgaccttgagcctcaggcagctcccacmtccaccaagaagaagaagaagaagaaagagagaggtcacacagtgactgagccaattcagccactagagcctgaactgccaggggagggacagcctgaagccagggcaactccgggatccaccaagaagaggaagaagcagagtcaggaaagccggatgccagagacagtgccccaagaggagatgccagggcygccactgaattcagagtctggggaggaggctcccacaggccgggacaagaagcggaagmagcagcagcagcagcctgtgtagtctgcccccgggaaactgaggaactaaagaaagctgaaggtgcccacctgggccaccagaaggtgacacccccagaatccctccccagagactgcaccagcscagccagcaggagcctggcctgggaggacgatttattattacactgggggtttccttggcagctggggtcatcagggtactttcaagaagggctcgtgcaggacatcaaacagcctccgggcctggatgggagggagaaaaaaatgaggaaccagtcattaaaggagctgtttcctgggtaaatctagagtggggttttggttctttattttcccctataccctsaagcatytatccattgagttacaaacaatccagttacaatctttttaagttattattattattattwttttttttttttttgagatggagtctcgctctgtcgcccaggttggagtgcagtggcgcaatctcggctcactgcaagctccgcctcccgggttcacgccattctcctgcctcagcctcctgagtagctgggactacaggcccctgcccagctaaytttttgtatttttttttagtagagatggggtttcaccacgttagccaggatggtctcgatctcctgacctcctgatgcgcctgcctcagcctcccagtgctgggattataggtgtgagccactgcgcctggctaagttattattatwtttytgagacagtctcctggtgtcacccaggctggagtgcagtggtgtgatcttggctcactgcaacctccgcctcctgggttccaacgattctcctgcctcagcctcccgagtagctgggcctaaaggtgcccaccactatacccggctaatttttgtatttttagtagagacaggggtttcaccatattggccaggctggtctcgaactcctgacctcgtgatccacctgccttgacctcccaaastgctaggataacaggtgtgagccaccgcaccctgccaagttattttaaaatgtaccattattattgactatagtcacctggttgtgttatcaaatagtatgtcttattcattctttctttgtgtgtgtgtgtgtgtgtgtgtgtgtgtgtggtacccattaaccttccccatctccctgccagcccctaactaccctccccagcctccaggaactatccatccactcttatctccatgagttcaattgttttgatttttagatacacaaataaataagaacatgcaatgtttgtctttctgtgcctggcttatttcactt

SEQ ID NO: 4127 - DNA, 2826 bp, Homo sapiens
trcctgaggtgtgggtcccaggatggaggagccccaggccggcggtgaggatgctgctcggttctcttgtccccccaactttaccgcgaagcccccagcctcagagtcccctcgtttctccttggaggcgctgacgggtccagatacggagctgtggcttattcaggcccctgcagactttgccccagaatgcttcaatgggcggcatgtgcctctctctggctcccagatcgtcaagggcaaattggcaggcaagcggcaccgctatcgagtcctcagcagctgtccccaagctggagaagcgaccctgctggccccctcaacggaggcaggaggtggactcacctgtgcctcagccccccagggcaccctaaggatccttgagggtccccagcaatccctgtcagggagccctctgcagcccatcccagcaagtcccccaccacagatccctcctggcctgaggcctcggttctgtgcctttgggggcaacccaccagtcacagggcctaggtcagccttggcccccaacctgctcacctcagggaagaagaaaaaggagatgcaggtgacagaggccccagtcactcaggaggcagtgaatgggcacggggccctggaggtggacatggctttggggtcgccagaaatggatgtgcggaagaagaagaagaaaaaaaatcagcagctgaaagaaccagaggcagcagggcctgtggggacagagcccacagtggagacactggagcctctgggagtgctgttcccgtccaccaccaagaagaggaagaagcccaaagggamagaaaccttcgagccagaagacaagacagtgaagcaggaacagattaacactgagcctctagaagacrcagtcctgtccccgaccaaaaagagaaagaggcaaaaggggacggaagggatggagccagaggagggggtgacagttgagtctcagccacaggtgaaggtggagccactggaggaagccatccctctgccccctacgaagaagaggaaaaaagaaaagggacagatggcaatgatggagccagggacggaggcgatggagccagtggagccggagatgaagcctctggagtccccaggggggaccatggcgcctcaacagccagaaggagcgragcctcaggcccaggcagctctggcagctcccaaaaagaagacgaagaaagaaaaacagcaaratgccacagtggagccagagacagaggtggtggggcctgagctgccggatgaccttgagcctcaggcagctcccacmtccaccaagaagaagaagaagaagaaagagagaggtcacacagtgactgagccaattcagccactagagcctgaactgccaggggagggacagcctgaagccagggcaactccgggatccaccaagaagaggaagaagcagagtcaggaaagccggatgccagagacagtgccccaagaggagatgccagggcygccactgaattcagagtctggggaggaggctcccacaggccgggacaagaagcggaagmagcagcagcagcagcctgtgtagtctgcccccgggaaactgaggaactaaagaaagctgaaggtgcccacctgggccaccagaaggtgacacccccagaatccctccccagagactgcaccagcscagccagcaggagcctggcctgggaggacgatttattattacactgggggtttccttggcagctggggtcatcagggtactttcaagaagggctcgtgcaggacatcaaacagcctccgggcctggatgggagggagaaaaaaatgaggaaccagtcattaaaggagctgtttcctgggtaaatctagagtggggttttggttctttattttcccctataccctsaagcatytatccattgagttacaaacaatccagttacaatctttttaagttattattattattattwttttttttttttttgagatggagtctcgctctgtcgcccaggttggagtgcagtggcgcaatctcggctcactgcaagctccgcctcccgggttcacgccattctcctgcctcagcctcctgagtagctgggactacaggcccctgcccagctaaytttttgtatttttttttagtagagatggggtttcaccacgttagccaggatggtctcgatctcctgacctcctgatgcgcctgcctcagcctcccagtgctgggattataggtgtgagccactgcgcctggctaagttattattatwtttytgagacagtctcctggtgtcacccaggctggagtgcagtggtgtgatcttggctcactgcaacctccgcctcctgggttccaacgattctcctgcctcagcctcccgagtagctgggcctaaaggtgcccaccactatacccggctaatttttgtatttttagtagagacaggggtttcaccatattggccaggctggtctcgaactcctgacctcgtgatccacctgccttgacctcccaaastgctaggataacaggtgtgagccaccgcaccctgccaagttattttaaaatgtaccattattattgactatagtcacctggttgtgttatcaaatagtatgtcttattcattctttctttgtgtgtgtgtgtgtgtgtgtgtgtgtgtgtggtacccattaaccttccccatctccctgccagcccctaactaccctccccagcctccaggaactatccatccactcttatctccatgagttcaattgttttgatttttagatacacaaataaataagaacatgcaatgtttgtctttctgtgcctggcttatttcactt

SEQ ID NO: 4128 - DNA, 1674 bp, Homo sapiens
cacgtgataaggcactagcagatgtggttggaatccttgctgtgctgaatcctggctgtgtgaccccaagctccagatggaccctgggaaggacaaagagggggtgccccagccctcagggccgccagcaaggaagaaatttgtgatacccctcgacgaggatgaggtccctcctggagtggccaagcccttattccgatctacacagagccttcccactgtggacacctcggcccaggcggcccctcagacctacgccgaatatgccatctcacagcctctggaaggggctggggccacgtgccmcacagggtcagagcccctggcaggagagacgcccaaccaggccctgaaacccggggcaaaatccaacagcatcattgtgagccctcggcagaggggcaatcccgtactgaagttcgtgcgcaaygtgccctgggaatttggcgacgtaattcccgactatgtgctgggccagagcacctgtgccctgttcctcagcctccgctaccacaacctgcacccagactacatccatgggcggctgcagagcctggggaagaacttcgccttgcgggtcctgcttgtccaggtggatgtgaaagatccccagcaggccctcaaggagctggctaagatgtgtatcctggccgactgcacattgatcctcgcctggagccccgaggaagctgggcggtacctggagacctacaaggcctatgagcagaaaccagcggacctcctgatggagaagctagagcaggacttcgtctcccggtctctggaacagctcatcgccgcatcaagagaagatctggccttatgcccaggcctgggccctcagaaagcccggaggctgtttgatgtcctgcacgagcccttcttgaaagtaccctgatgaccccagctgccaaggaaacccccagtgtaataataaatcgtcctcccaggccaggctcctgctggctgsgctggtgcagtctctggggagggattctgggggtgtcaccttctggtggcccaggtgggcaccttcagctttctttagttcctcagtttcccgggggcagactacacaggctgctgctgctgctkcttccgcttcttgtcccggcctgtgggagcctcctccccagactctgaattcagtggcrgccctggcatctcctcttggggcactgtctctggcatccggctttcctgactctgcttcttcctcttcttggtggatcccggagttgccctggcttcaggctgtccctcccctggcagttcaggctctagtggctgaattggctcagtcactgtgtgacctctctctttcttcttcttcttcttcttggtggakgtgggagctgcctgaggctcaaggtcatccggcagctcaggccccaccacctctgtctctggctccactgtggcatyttgctgtttttctttcttcgtcttctttttgggagctgccagagctgcctgggcctgaggctycgctccttctggctgttgaggcgccatggtcccccctggggactccagaggcttcatctccggctccactggctccatcgcctccgtccctggctccatcattgccatctgtcccttttcttttttcctcttcttcgtagggggcagagggatggcttcctccagtggctccaccttcacctgtgg

SEQ ID NO: 4129 - DNA, 1746 bp, Homo sapiens
cacgtgataaggcactagcagatgtggttggaatccttgctgtgctgaatcctggctgtgtgaccccaagctccagatggaccctgggaaggacaaagagggggtgccccagccctcagggccgccagcaaggaagaaatttgtgatacccctcgacgaggatgaggtccctcctggagtggccaagcccttattccgatctacacagagccttcccactgtggacacctcggcccaggcggcccctcagacctacgccgaatatgccatctcacagcctctggaaggggctggggccacgtgccmcacagggtcagagcccctggcaggagagacgcccaaccaggccctgaaacccggggcaaaatccaacagcatcattgtgagccctcggcagaggggcaatcccgtactgaagttcgtgcgcaaygtgccctgggaatttggcgacgtaattcccgactatgtgctgggccagagcacctgtgccctgttcctcagcctccgctaccacaacctgcacccagactacatccatgggcggctgcagagcctggggaagaacttcgccttgcgggtcctgcttgtccaggtggatgtgaaagatccccagcaggccctcaaggagctggctaagatgtgtatcctggccgactgcacattgatcctcgcctggagccccgaggaagctgggcggtacctggagacctacaaggcctatgagcagaaaccagcggacctcctgatggagaagctagagcaggacttcgtctcccgggtgactgaatgtctgaccaccgtgaagtcagtcaacaaaacggacagtcagaccctcctgaccacatttggatctctggaacagctcatcgccgcatcaagagaagatctggccttatgcccaggcctgggccctcagaaagcccggaggctgtttgatgtcctgcacgagcccttcttgaaagtaccctgatgaccccagctgccaaggaaacccccagtgtaataataaatcgtcctcccaggccaggctcctgctggctgsgctggtgcagtctctggggagggattctgggggtgtcaccttctggtggcccaggtgggcaccttcagctttctttagttcctcagtttcccgggggcagactacacaggctgctgctgctgctkcttccgcttcttgtcccggcctgtgggagcctcctccccagactctgaattcagtggcrgccctggcatctcctcttggggcactgtctctggcatccggctttcctgactctgcttcttcctcttcttggtggatcccggagttgccctggcttcaggctgtccctcccctggcagttcaggctctagtggctgaattggctcagtcactgtgtgacctctctctttcttcttcttcttcttcttggtggakgtgggagctgcctgaggctcaaggtcatccggcagctcaggccccaccacctctgtctctggctccactgtggcatyttgctgtttttctttcttcgtcttctttttgggagctgccagagctgcctgggcctgaggctycgctccttctggctgttgaggcgccatggtcccccctggggactccagaggcttcatctccggctccactggctccatcgcctccgtccctggctccatcattgccatctgtcccttttcttttttcctcttcttcgtagggggcagagggatggcttcctccagtggctccaccttcacctgtgg

SEQ ID NO: 4130 - DNA, 2395 bp, Homo sapiens
cccctgctcagatgtcccttcctccaggaagcccttccggactccggggctgagtcaggcgctccccctgacccccatcccacggctctcccgggatctcccatcccagacctgcccattctgggtcagcactgggaacgtgtctgygtcccttactgaaccgtaagctccgggaggacaacacggggctgtcgttggtcactgctgtgtcaccagcacggactcgcacaggaccgggaagagaggaagcgcgtggggggaataggtgtggaataaatgaatgaatgaggaaactgaagccaagtcaatgtctgagttggattcaaacttaagtctctccttactgagaggagggaccaagttggatctcctgcgatctgttctccactgagccctgccaggattctgggcacacagaagcgctcagtaagggctttgaaacttaacagtttgggagccagatcctcaggccacatctctctcctcccacgacctccgcggtcctccagaaccatagagagttgtacagagatcgccctgctctatgctctactctcctggggagcggggccagagaggccggaagtgctgcgagccctgggccacgctggccgtgctggcagtgggccgcctcgatccctctgcagtctttcccttgaggctccaagaccagcaggtgaggcctcgcggcgctgaaaccgtgaggcccggaccacaggctccagatggaccctgggaaggacaaagagggggtgccccagccctcagggccgccagcaaggaagaaatttgtgatacccctcgacgaggatgaggtccctcctggagtggccaagcccttattccgatctacacagagccttcccactgtggacacctcggcccaggcggcccctcagacctacgccgaatatgccatctcacagcctctggaaggggctggggccacgtgccmcacagggtcagagcccctggcaggagagacgcccaaccaggccctgaaacccggggcaaaatccaacagcatcattgtgagccctcggcagaggggcaatcccgtactgaagttcgtgcgcaaygtgccctgggaatttggcgacgtaattcccgactatgtgctgggccagagcacctgtgccctgttcctcagcctccgctaccacaacctgcacccagactacatccatgggcggctgcagagcctggggaagaacttcgccttgcgggtcctgcttgtccaggtggatgtgaaagatccccagcaggccctcaaggagctggctaagatgtgtatcctggccgactgcacattgatcctcgcctggagccccgaggaagctgggcggtacctggagacctacaaggcctatgagcagaaaccagcggacctcctgatggagaagctagagcaggacttcgtctcccgggtgactgaatgtctgaccaccgtgaagtcagtcaacaaaacggacagtcagaccctcctgaccacatttggatctctggaacagctcatcgccgcatcaagagaagatctggccttatgcccaggcctgggccctcagaaagcccggaggctgtttgatgtcctgcacgagcccttcttgaaagtaccctgatgaccccagctgccaaggaaacccccagtgtaataataaatcgtcctcccaggccaggctcctgctggctgsgctggtgcagtctctggggagggattctgggggtgtcaccttctggtggcccaggtgggcaccttcagctttctttagttcctcagtttcccgggggcagactacacaggctgctgctgctgctkcttccgcttcttgtcccggcctgtgggagcctcctccccagactctgaattcagtggcrgccctggcatctcctcttggggcactgtctctggcatccggctttcctgactctgcttcttcctcttcttggtggatcccggagttgccctggcttcaggctgtccctcccctggcagttcaggctctagtggctgaattggctcagtcactgtgtgacctctctctttcttcttcttcttcttcttggtggakgtgggagctgcctgaggctcaaggtcatccggcagctcaggccccaccacctctgtctctggctccactgtggcatyttgctgtttttctttcttcgtcttctttttgggagctgccagagctgcctgggcctgaggctycgctccttctggctgttgaggcgccatggtcccccctggggactccagaggcttcatctccggctccactggctccatcgcctccgtccctggctccatcattgccatctgtcccttttcttttttcctcttcttcgtagggggcagagggatggcttcctccagtggctccaccttcacctgtgg

SEQ ID NO: 4131 - DNA, 2117 bp, Homo sapiens
ctgttgacagcgccgcgccgcgcccagcggccgcacgggggtgccgaggcgtctgggggcctgcgcttcggggcgagcgcagcgcaaggctggcgcgcgcgcatggaggatgctcactgcacttggctttcgttacctggtctgcccccgggctgggccttgtttgccgtcctcgacggccacggtggggctcgagctgcccgcttcggtgcacgccatttgccaggccatgtgctccaggagctgggcccggagcctagcgagcccgagggcgtgcgcgaggcgctgcgccgagccttcttgagcgccgacgagcgcctgcgctccctctggccccgcgtggaaacgggcggctgcacggccgtggtgttgctggtctccccgcggtttctgtacctggcgcactgcggtgactcccgcgcggtgctgagccgcgctggcgccgtggccttcagcacagaggaccaccggccccttcgaccccgggaacgcgagcgcatccacgccgctggcggcaccatccgccgccgccgcgtcgagggctctctggccgtgtcgcgagcgttgggcgactttacctacaaggaggctcckgggaggccccccgagctacagctcgtttctgcggagccagaggtggccgcactggcacgccaggctgaggacgagttcatgctcctggcctctgatggcgtctgggacactgtgtctggtgctgccctggcgggactggtggcttcacgcctccgcttgggcctggccccagagcttctctgcgcgcagctgttggacacgtgtctgtgcaaggtcctgggggcgtggcgtggtacctttggggcttggtgcagcagagggagagagcctcggggttttggggaggagggctttgatagagaggcaagaktaaagctagcaaaggagggrataggactcaagcgaagggcgtggcctgaagtgggcagggccaaaatacaggggcggagcctgagggatgctttgaggcacgggagagttagtggaagggacttaagagaaagggcgtggtcttttggaaaggggcgattctgggtcgtaggagccgggccggaagtattgattagtgctggaaggtggaagagcaggtaaacatcagagcgggcggagctttagggaaaaggcattgttctctcaattgggagcgcctaggaccgggtttggtcccagkargagaggaytggcaggtgggtgggacgcgaaagaaatgggcataagtagaatgaagtgggggacttgaacctggggattgttgggaagctctgccttggactctcccccaccgggctcctttttctccaccggcttcagggcagcctggacaacatgacctgcatcctggtctgcttccctggggcccctaggccttctgaggagrcgatcaggagggagctagcactggacgcagccctgggctgcagaatcgctgaactgtgtgcctctgctcagaagccccccagcctgaacacagttttcaggactctggcctcagaggacatcccagatttacctcctgggggagggctggactgcaaggccactgtcattgctgaagtttattctcagatctgccaggtctcagaagagtgcggagagaaggggcaggatggggctgggaagtccaaccccacgcatttgggctcagccttggacatggaggcctgacagctgttgtcctttggggatcctttgsttctctggggcctcaacagaactaaagaagaaaaccgaccctttccccaactacatgtaccagcggaaggaaggaaggccaatgtaggaacccaaaatgcttatttcttcttctcttacttccctctcacagaaaagtcttacgaatggggaaattccaccaacatccagaccaaaaagaaaaaagcccaaatcgaaaaaaaaaaaaaaaaaaaaaaaaaacaaaaaaacccaaccaaatgtttttgaaatattcagagccgaacagattctgagagataacccagtccaataacctctttccttcttattactcatctgtttttgaggggaagtagagttttgattattaaactttatttacataagtgattccaaatacattttcttgt

SEQ ID NO: 4132 - DNA, 1415 bp, Homo sapiens
ggtcgaccccgctgcacagtccggccggcgccatgaagctcaacgtggacgggctcctggtctacttcccgtacgactacatctaccccgagcagttctcctacatgcgggagctcaaacgcacgctggacgccaagggtcatggagtcctggagatgccctcaggcaccgggaagacagtatccctgttggccctgatcatggcataccagagagcatatccgctggaggtgaccaaactcatctactgctcaagarctgtgccagagattgagaaggtgattgaagagcttcgaaagttgctcaacttctatgagaagcaggagggcgagaagctgccgtttctgggactggctctgagctcccgcaaaaacttgtgtattcaccctgaggtgacacccctgcgctttgggaaggacgtcgatgggaaatgccacagcctcacagcctcctatgtgcgggcgcagtaccagcatgacaccagcctgccccactgccgmttctatgaggaatttgatgcccatgggcgtgaggtgcccctccccgctggcatctacaacctggatgacctgaaggccctggggcggcgccagggctggtgcccatacttccttgctcgatactcaatsctgyatgccaatgtggtggtttatagctaccactacctcctggaccccaagattgcagacctggtgtccaaggaactggcccgcaaggcygtcgtggtcttcracgaggcccacaacattgacaacgtctgcatcgactccatgagcgtcaacctcacccgccggacccttgaccggtgccagggcaacctggagaccctgcagaagacggtgctcaggatcaaagagacagacgagcagcgcctgcgggacgagtaccggcgtctggtggaggggctgcgggaggccagcgccgcccgggagacggacgcccacctggccaaccccgtgctgcccracgaagtgctgcaggaggcagtgcctggctccatccgcacggccgagcatttcctgggcttcctgaggcggctgctggagtacgtgaagtggcggctgcgtgtgcagcatgtggtgcaggagagcccgcccgccttcctgagcggcctggcccagcgcgtgtgcatccagcgcaagcccctcagattctgtgctgaacgcctccggtccctgctgcatactctggagatcaccgaccttgctgacttctccccgctcaccctccttgctaactttgccacccttgtcagcacctacgccaaaggccaggctcagcactgtggaagcagcaggaaccaaaaaagatctcatccctaaccccccagaacttatattccagatgggaaaaccagtagcaaagatgcagccaaataaacaaggaaataattccagaaagtgacagttatcatg

SEQ ID NO: 4133 - DNA, 2951 bp, Homo sapiens
ggtcgaccccgctgcacagtccggccggcgccatgaagctcaacgtggacgggctcctggtctacttcccgtacgactacatctaccccgagcagttctcctacatgcgggagctcaaacgcacgctggacgccaagggtcatggagtcctggagatgccctcaggcaccgggaagacagtatccctgttggccctgatcatggcataccagagagcatatccgctggaggtgaccaaactcatctactgctcaagarctgtgccagagattgagaaggtgattgaagagcttcgaaagttgctcaacttctatgagaagcaggagggcgagaagctgccgtttctgggactggctctgagctcccgcaaaaacttgtgtattcaccctgaggtgacacccctgcgctttgggaaggacgtcgatgggaaatgccacagcctcacagcctcctatgtgcgggcgcagtaccagcatgacaccagcctgccccactgccgmttctatgaggaatttgatgcccatgggcgtgaggtgcccctccccgctggcatctacaacctggatgacctgaaggccctggggcggcgccagggctggtgcccatacttccttgctcgatactcaatsctgyatgccaatgtggtggtttatagctaccactacctcctggaccccaagattgcagacctggtgtccaaggaactggcccgcaaggcygtcgtggtcttcracgaggcccacaacattgacaacgtctgcatcgactccatgagcgtcaacctcacccgccggacccttgaccggtgccagggcaacctggagaccctgcagaagacggtgctcaggatcaaagagacagacgagcagcgcctgcgggacgagtaccggcgtctggtggaggggctgcgggaggccagcgccgcccgggagacggacgcccacctggccaaccccgtgctgcccracgaagtgctgcaggaggcagtgcctggctccatccgcacggccgagcatttcctgggcttcctgaggcggctgctggagtacgtgaagtggcggctgcgtgtgcagcatgtggtgcaggagagcccgcccgccttcctgagcggcctggcccagcgcgtgtgcatccagcgcaagcccctcagattctgtgctgaacgcctccggtccctgctgcatactctggagatcaccgaccttgctgacttctccccgctcaccctccttgctaactttgccacccttgtcagcacctacgccaaaggcttcaccatcatcatcgagccctttgacgacagaaccccgaccattgccaaccccatcctgcacttcagctgcatggacgcctcgctggccatcaaacccgtatttgagcgtttccagtctgtcatcatcacatctgggacastgtccccgctggacatctaccccaagatcctggacttccaccccgtcaccatggcaaccttcaccatgacgctggcasgggtctgcctctgccctatgatcatcggccgtggcaatgaccaggtggccatcagctccaaatttgagacccrggaggatattgctgtgatccggaactatgggaacctcctgctggagatgtccgctgtggtccctgatggcatcgtggccttcttcaccmgctrccagtacatggagagcaccgtggcctcctggtatgagcaggggatccttgagaacatccagaggaacaagctgctctttattgagacccaggatggtgccgaaaccagtgtcgccctggagaagtaccaggaggcctgcgagaatggccscgggsccatcctgctgtcagtggcccggggcaaagtgtccgagggaatcgactttgtgcaccactacgggysggccgtcatcatgtttggcgtcccctacgtctacacacagagccgcattctcaaggygcggctggaatacctgcgggaccagttccagattcgtgagaatgactttcttaccttcgatgccatgbrccacgcggcccagygtgtgggtygggccatcaggggcaagacggactacggcctcatggtctttgccracaagyrgtttgcccgtggggacaagcgggggaagctgccccgctggatccaggagcacctcacagatgccaacctcaacctgaccgtggaygagsgtgtccaggtggccaagtacttcctgcggcagatgscayagcccttccaccgggaggatcagctgggcctgtccctgctcagcctggagcagctagaatcagaggagacgctgmagaggatagagcagattgctcagcagctctgagtggggcgggtggggccataaacggttcctggtgactcctgagtcttgcctggccctggttcccagcggcggtggtgctagaaggtcttatgaagtcaggtgacatttctcactgtcacgtccacagcctttaatcgcaggagaaggcagctatccaccaggtacccagasgcaagggggggccaggagatgatagaccccctctcaccccaccagcccatccctcctgcactgttcccaagaagctgcggccagcgcagttcactggacgttagtgggggctcaggtcctgggtgctggcgctgagggtccgaggggccttgtccaggtgccagctgggaaactggagacaggcacaggggatggttggaggggdggggcaagtgttacatccaccctccagctccaggtccagcctggcagccaactatccaaccccctcgcctctaccccaagtaaaacccatctttgctcctgtcctgggtctcttctgacaccaacccaccacctgctgactccaccactggcccgaccgccctgcctttgcctcatctctgcacctacccacatggcctcctctatttttgacccagatgtccccctcacctgagtcccaggagcccttggagcatccac

SEQ ID NO: 4134 - DNA, 2914 bp, Homo sapiens
gctcaacgtggacgggctcctggtctacttcccgtacgactacatctaccccgagcagttctcctacatgcgggagctcaaacgcacgctggacgccaagggtcatggagtcctggagatgccctcaggcaccgggaagacagtatccctgttggccctgatcatggcataccagagagcatatccgctggaggtgaccaaactcatctactgctcaagarctgtgccagagattgagaaggtgattgaagagcttcgaaagttgctcaacttctatgagaagcaggagggcgagaagctgccgtttctgggactggctctgagctcccgcaaaaacttgtgtattcaccctgaggtgacacccctgcgctttgggaaggacgtcgatgggaaatgccacagcctcacagcctcctatgtgcgggcgcagtaccagcatgacaccagcctgccccactgccgmttctatgaggaatttgatgcccatgggcgtgaggtgcccctccccgctggcatctacaacctggatgacctgaaggccctggggcggcgccagggctggtgcccatacttccttgctcgatactcaatsctgyatgccaatgtggtggtttatagctaccactacctcctggaccccaagattgcagacctggtgtccaaggaactggcccgcaaggcygtcgtggtcttcracgaggcccacaacattgacaacgtctgcatcgactccatgagcgtcaacctcacccgccggacccttgaccggtgccagggcaacctggagaccctgcagaagacggtgctcaggatcaaagagacagacgagcagcgcctgcgggacgagtaccggcgtctggtggaggggctgcgggaggccagcgccgcccgggagacggacgcccacctggccaaccccgtgctgcccracgaagtgctgcaggaggcagtgcctggctccatccgcacggccgagcatttcctgggcttcctgaggcggctgctggagtacgtgaagtggcggctgcgtgtgcagcatgtggtgcaggagagcccgcccgccttcctgagcggcctggcccagcgcgtgtgcatccagcgcaagcccctcagattctgtgctgaacgcctccggtccctgctgcatactctggagatcaccgaccttgctgacttctccccgctcaccctccttgctaactttgccacccttgtcagcacctacgccaaaggcttcaccatcatcatcgagccctttgacgacagaaccccgaccattgccaaccccatcctgcacttcagctgcatggacgcctcgctggccatcaaacccgtatttgagcgtttccagtctgtcatcatcacatctgggacastgtccccgctggacatctaccccaagatcctggacttccaccccgtcaccatggcaaccttcaccatgacgctggcasgggtctgcctctgccctatgatcatcggccgtggcaatgaccaggtggccatcagctccaaatttgagacccrggaggatattgctgtgatccggaactatgggaacctcctgctggagatgtccgctgtggtccctgatggcatcgtggccttcttcaccmgctrccagtacatggagagcaccgtggcctcctggtatgagcaggggatccttgagaacatccagaggaacaagctgctctttattgagacccaggatggtgccgaaaccagtgtcgccctggagaagtaccaggaggcctgcgagaatggccscgggsccatcctgctgtcagtggcccggggcaaagtgtccgagggaatcgactttgtgcaccactacgggysggccgtcatcatgtttggcgtcccctacgtctacacacagagccgcattctcaaggygcggctggaatacctgcgggaccagttccagattcgtgagaatgactttcttaccttcgatgccatgbrccacgcggcccagygtgtgggtygggccatcaggggcaagacggactacggcctcatggtctttgccracaagyrgtttgcccgtggggacaagcgggggaagctgccccgctggatccaggagcacctcacagatgccaacctcaacctgaccgtggaygagsgtgtccaggtggccaagtacttcctgcggcagatgscayagcccttccaccgggaggatcagctgggcctgtccctgctcagcctggagcagctagaatcagaggagacgctgmagaggatagagcagattgctcagcagctctgagtggggcgggtggggccataaacggttcctggtgactcctgagtcttgcctggccctggttcccagcggcggtggtgctagaaggtcttatgaagtcaggtgacatttctcactgtcacgtccacagcctttaatcgcaggagaaggcagctatccaccaggtacccagasgcaagggggggccaggagatgatagaccccctctcaccccaccagcccatccctcctgcactgttcccaagaagctgcggccagcgcagttcactggacgttagtgggggctcaggtcctgggtgctggcgctgagggtccgaggggccttgtccaggtgccagctgggaaactggagacaggcacaggggatggttggaggggdggggcaagtgttacatccaccctccagctccaggtccagcctggcagccaactatccaaccccctcgcctctaccccaagtaaaacccatctttgctcctgtcctgggtctcttctgacaccaacccaccacctgctgactccaccactggcccgaccgccctgcctttgcctcatctctgcacctacccacatggcctcctctatttttgacccagatgtccccctcacctgagtcccaggagcccttggagcatccac

SEQ ID NO: 4135 - DNA, 1295 bp, Homo sapiens
gaggaacttggctgggcctaaactcaatccgtggtctggtacaggtttcagggcaaagcggccatgcgttccgggggccgcgggcgaccccgcctgcggctgggggaacgtggcctcatggagccactcttgccgccgaagcgccgcctgctaccgcgggttcggctcttgcctctgttgctggcgctggccgtgggctcggcgttctacaccatttggagcggctggcaccgcaggactgaggagctgccgctgggccgggagctgcgggtcccattgatcggaagcctccccgaagcccggctgcggagggtggtgggacaactggatccacagcgtctctggagcacttatctgcgccccctgctggttgtgcgaaccccgggcagcccgggaaatctccaagtcagaaaggcagcccyggtgaccctgcaactgctcttcttggatggtgaagaggcgctgaaggagtggggacccaaggactccctttacggttcccggcacctggcccagctcatggagtctatacctcacagccccggccccaccaggatccaggctattgagctctttatgcttcttgatctcctgggagcccccaatcccaccttctacagccacttccctcgcacggtccgctggttccatcggctgaggagcattgagaagcgtctgcaccgtttgaacctgctgcagtctcatccccaggaagtgatgtacttccaacccggggagccctttggctctgtggaagacgaccacatccccttcctccgcagaggggtacccgtgctccatctcatctccacgcccttccctgctgtctggcacacccctgcggacaccgaggtcaatctccacccacccacggtacacaacttgtgccgcattctcgctgtgttcctggctgaatacctggggctctagcgtgcttggccaatgactgtggagaggactgtgagagagaaggtcccagcgggggccagtgaagctcaggcaggatctgcctagggtgtgctggtttgtccttttcatacctttgtcycctaattgtgctacaattggaagaccttctttcttttgattgtctcaagctgccacccttcaaggacagggaagagaccactgtgggatgacagccagaggaataagaacttgctccctccccagaggtaaacacttggtccaaaggtttgcagggaccaaatactgttctttttttttttgagacggacctgggcaacagagcgagactccatctcwataaataaataaataaataaatatttttt

SEQ ID NO: 4136 - DNA, 1568 bp, Homo sapiens
gaggaacttggctgggcctaaactcaatccgtggtctggtacaggtttcagggcaaagcggccatgcgttccgggggccgcgggcgaccccgcctgcggctgggggaacgtggcctcatggagccactcttgccgccgaagcgccgcctgctaccgcgggttcggctcttgcctctgttgctggcgctggccgtgggctcggcgttctacaccatttggagcggctggcaccgcaggactgaggagctgccgctgggccgggagctgcgggtcccattgatcggaagcctccccgaagcccggctgcggagggtggtgggacaactggatccacagcgtctctggagcacttatctgcgccccctgctggttgtgcgaaccccgggcagcccgggaaatctccaagtcagaaagttcctggaggccacgctgcggtccctgacagcaggttggcacgtggagctggatcccttcacagcctcaacacccctggggccagtggactttggcaatgtggtggccacactggacccaagggctgcccgtcacctcacccttgcctgccattatgactcgaagctcttcccacccggatcgaccccctttgtaggggccacggattcggctgtgccctgtgccctgctgctggagctggcccaagcacttgacctggagctgagcagggccaaaaaacaggcagcccyggtgaccctgcaactgctcttcttggatggtgaagaggcgctgaaggagtggggacccaaggactccctttacggttcccggcacctggcccagctcatggagtctatacctcacagccccggccccaccaggatccaggctattgagctctttatgcttcttgatctcctgggagcccccaatcccaccttctacagccacttccctcgcacggtccgctggttccatcggctgaggagcattgagaagcgtctgcaccgtttgaacctgctgcagtctcatccccaggaagtgatgtacttccaacccggggagccctttggctctgtggaagacgaccacatccccttcctccgcagaggggtacccgtgctccatctcatctccacgcccttccctgctgtctggcacacccctgcggacaccgaggtcaatctccacccacccacggtacacaacttgtgccgcattctcgctgtgttcctggctgaatacctggggctctagcgtgcttggccaatgactgtggagaggactgtgagagagaaggtcccagcgggggccagtgaagctcaggcaggatctgcctagggtgtgctggtttgtccttttcatacctttgtcycctaattgtgctacaattggaagaccttctttcttttgattgtctcaagctgccacccttcaaggacagggaagagaccactgtgggatgacagccagaggaataagaacttgctccctccccagaggtaaacacttggtccaaaggtttgcaatcacaccactgcactccagcctgggcaacagagcgagactccatctcwataaataaataaataaataaatattttttaaaaaga

SEQ ID NO: 4137 - DNA, 1259 bp, Homo sapiens
cagtagttagtgtgggaggctgggaagactgggagcagtctcttaaacaaaagcaaaagaataagcttcgggcgctgtagtacctgccagctttcgccacaggagcctaggctgccacctgtaggtcacttgggctccagctatgtggctgcctcttctgctgggtgccttactctgggcagtgctgtggttgctcagggaccggcagagcctgcccgccagcaatgcctttgtcttcatcaccrgctgtgactcaggctttgggcgccttctggcactgcagctggaccagagaggcttccgagtcctggccarctgcctgaccccctccggggcsgaggacctgcagsgggtggcctyctcccgcctccacaccaccctgttggatatcactgatccccagagcgtccagcaggcagccaagtgggtggagatgcacgttaaggaagcagggctttttsgtctggtgaataatgctggtgtggctggtatcatcggacccacaccrtggctgacccgggacgatttccagcggrtgctgaatgtgaacacaatgggtcccatyggggtcacccttgccctgctgcctctgctgcagcaagcccggggccgggtgatcaacrtcaccagcgtcctgggtcgcctggcagccaatggtgggggctactgtgkctccaaatttggcctggaggccttctctgacagcctgaggcgggatgtagctcattttgggatacgagtstccatcgtggagcctggcttcttccgaacccctgtgaccaacytggagagtctggagaaaaccctgcaggcctgctgggcacggctgcctcctgccacacaggcccactatgggggggccttcctcaccaagtacctgaaaatgcaacagcgcatcatgaacctgatctgtgacccggacctaaccaaggkgagccgatgsctggagcatgccctgactgctcgacacccccgaacccrcyacagcccaggttgggatgccaagctgctctggctgcctscctcctacctgccagccagcctggtggatgctgtgctcacctgggtccttcccaagcctgcccaagcagtctactgaatccagccttccagcaagagattgtttttcaaggacaaggactttgatttatttctgcccccaccctggtactgcctggtgcctgccacaaaataagcactaacaaaagtgtattgtttaaaaaataaaaagaaggtgggcagaaatgtgcccagtggaa

SEQ ID NO: 4138 - DNA, 1239 bp, Homo sapiens
gaggctgggaagactgggagcagtctcttaaacaaaagcaaaagaataagcttcgggcgctgtagtacctgccagctttcgccacaggaggctgccacctgtaggtcacttgggctccagctatgtggctgcctcttctgctgggtgccttactctgggcagtgctgtggttgctcagggaccggcagagcctgcccgccagcaatgcctttgtcttcatcaccrgctgtgactcaggctttgggcgccttctggcactgcagctggaccagagaggcttccgagtcctggccarctgcctgaccccctccggggcsgaggacctgcagsgggtggcctyctcccgcctccacaccaccctgttggatatcactgatccccagagcgtccagcaggcagccaagtgggtggagatgcacgttaaggaagcagggctttttsgtctggtgaataatgctggtgtggctggtatcatcggacccacaccrtggctgacccgggacgatttccagcggrtgctgaatgtgaacacaatgggtcccatyggggtcacccttgccctgctgcctctgctgcagcaagcccggggccgggtgatcaacrtcaccagcgtcctgggtcgcctggcagccaatggtgggggctactgtgkctccaaatttggcctggaggccttctctgacagcctgaggcgggatgtagctcattttgggatacgagtstccatcgtggagcctggcttcttccgaacccctgtgaccaacytggagagtctggagaaaaccctgcaggcctgctgggcacggctgcctcctgccacacaggcccactatgggggggccttcctcaccaagtacctgaaaatgcaacagcgcatcatgaacctgatctgtgacccggacctaaccaaggkgagccgatgsctggagcatgccctgactgctcgacacccccgaacccrcyacagcccaggttgggatgccaagctgctctggctgcctscctcctacctgccagccagcctggtggatgctgtgctcacctgggtccttcccaagcctgcccaagcagtctactgaatccagccttccagcaagagattgtttttcaaggacaaggactttgatttatttctgcccccaccctggtactgcctggtgcctgccacaaaataagcactaacaaaagtgtattgtttaaaaaataaaaagaaggtgggcagaaatgtgcccagtggaa

SEQ ID NO: 4139 - DNA, 1966 bp, Homo sapiens
gtcacggggcgggcggacgctggcgcgggtaggtaagagcagcggcgggcggtggcgctcactcccggcttccaaccgcgcggagcctctgccttggagattctcagtgctgcggatcatgtccctaaggggcagcctctcgcgtctcctccagacgcgagtgcattccatcctgaagaaatccgtccactccgtggctgtgataggagccccgttctcacaagggcagaaaagaaaaggagtggagcatggtcccgctgccataagagaagctggcttgatgaaaaggctctccagtttgggctgccacctaaaagactttggagatttgagttttactccagtccccaaagatgatctctacaacaacctgatagtgaatccacgctcagtgggtcttgccaaccaggaactggctgaggtggttagcagagctgtgtcagatggctacagctgtgtcacactgggaggagaccacagcctggcaatcggtaccattagtggccatgcccgacactgcccagacctttgtgttgtctgggttgatgcccatgctgacatcaacacaccccttaccacttcatcaggaaatctccatggacagccagtttcatttctcctcagagaactacaggataaggtaccacaactcccaggattttcctggatcaaaccttgtatctcttctgcaagtattgtgtatattggtctgagagacgtggaccctcctgaacattttattttaaagaactatgatatccagtatttttccatgagagatattgatcgacttggtatccagaaggtcatggaacgaacatttgatctgctgattggcaagagacaaagaccaatccatttgagttttgatattgatgcatttgaccctacactggctccagccacaggaactcctgttgtcgggggactaacctatcgagaaggcatgtatattgctgaggaaatacacaatacagggttgctatcagcactggatcttgttgaagtcaatcctcagttggccacctcagaggaagaggcgaagactacagctaacctggcagtagatgtgattgcttcaagctttggtcagacaagagaaggagggcatattgtctatgaccaacttcctactcccagttcaccagatgaatcagaaaatcaagcacgtgtgagaatttaggagacactgtgcactgacatrtttcacaacaggcattccagaattatgaggcattgaggggatagatgaatactaaatggttgtctgggtcaatactgccttaatkagaacatttacacattctcacaattgtaaagtttcccctctattttggtgaccaatactactgtaaatgtatttggttttttgcagttcacagggtattaatatgctacagtactatgtaaatttaaagaagtcataaacagcatttattaccttggtatatcatactggtcttgttgctgttgttccttcacatttaagtggtttttcatctttcctccctcctcccacagcctggctatacagtgcatccttgaactgtcagcccacagcagcaatatgcttattctatccacatccctaacatcatgcattcacaaggtcaaagttctggtccacaaacccttccctatagaagttcaatggctgcgaaagaatttgtagtaaacyaggcctcccaggatggcgagctccagtaaratgataatggaaagcagcagcttgttggttgtcactctacaaagagaagcaaagtggggagtagtcagaagtttggataaccttccttctaaacattttggggttagacctgggaccacggctggatactctgaggctgtatgtttgatcacacagccacttagcaggaagtactcataaggttctttagctgtcacttagkgataacactgtctacctcacagaaatgttaaactgagacaataaaaaccaaagcat

SEQ ID NO: 4140 - DNA, 1941 bp, Homo sapiens
gtcacggggcgggcggacgctggcgcgggtaggtaagagcagcggcgggcggtggcgctcactcccggcttccaaccgcgcggagcctctgccttggagattctcagtgctgcggatcatgtccctaaggggcagcctctcgcgtctcctccagacgcgagtgcattccatcctgaagaaatccgtccactccgtggctgtgataggagccccgttctcacaagggcagaaaagaaaaggagtggagcatggtcccgctgccataagagaagctggcttgatgaaaaggctctccagtttgggctgccacctaaaagactttggagatttgagttttactccagtccccaaagatgatctctacaacaacctgatagtgaatccacgctcagtgggtcttgccaaccaggaactggctgaggtggttagcagagctgtgtcagatggctacagctgtgtcacactgggaggagaccacagcctggcaatcggtaccattagtggccatgcccgacactgcccagacctttgtgttgtctgggttgatgcccatgctgacatcaacacaccccttaccacttcatcaggaaatctccatggacagccagtttcatttctcctcagagaactacaggataaggtaccacaactcccaggattttcctggatcaaaccttgtatctcttctgcaagtattgtgtatattggtctgagagacgtggaccctcctgaacattttattttaaagaactatgatatccagtatttttccatgagagatattgatcgacttggtatccagaaggtcatggaacgaacatttgatctgctgattggcaagagacaaagaccaatccatttgagttttgatattgatgcatttgaccctacactggctccagccacaggaactcctgttgtcgggggactaacctatcgagaaggcatgtatattgctgaggaaatacacaatacagggttgctatcagcactggatcttgttgaagtcaatcctcagttggccacctcagaggaagaggcgaagactacagctaacctggcagtagatgtgattgcttcaagctttggtcagacaagagaaggagggcatattgtctatgaccaacttcctactcccagttcaccagatgaatcagaaaatcaagcacgtgtgagaatttaggagacactgtgcactgacatrtttcacaacaggcattccagaattatgaggcattgaggggatagatgaatactaaatggttgtctgggtcaatactgccttaatkagaacatttacacattctcacaattgtaaagtttcccctctattttggtgaccaatactactgtaaatgtatttggttttttgcagttcacagggtattaatatgctacagtactatgtaaatttaaagaagtcataaacagcatttattaccttggtatatcatactggtcttgttgctgttgttccttcacatttaagtggtttttcatctttcctccctcctcccacagcctggctatacagtgcatccttgaactgtcagcccacagcagcaatatgcttattctatccacatccctaacatcatgcattcacaaggtcaaagttctggtccacaaacccttccctatagaagttcaatggctgcgaaagaatttgtagtaaacyaggcctcccaggatggcgagctccagtaaratgataatggaaagcagcagcttgttggttacttactttctggacattgaacggagaatcttccgacttttgctcaagttttcacttgtgtttaccaacttactctactcttggtacgttctaactggtctcgttgttcccccagctcttctatgatttctgagccaatctggtcagtctctgtggcaatccgatgagaacgttcaatactttgggtggcccggttcaggctt

SEQ ID NO: 4141 - DNA, 3245 bp, Homo sapiens
agagtcgttgttttttctgattcttcttgctcctcatcctatttcctttgtcttaatttccccacaaagacaccctctccagagcccagcaattgtgagggactgatggagaagtatgtggctgctatggtgctgagtgcagctggagatgccctggggtactacaatgggaagtgggagttcctccaggatggggagaagatacaccggcagttggcccagctgggyggcttggatgccctagacgtgggaaggtggagagttagtgacgacacagtgatgcacttggccacagcagaagctcttgtggaagctgggaaagcccctaagttgactcaactgtattacctccttgctaagcattaccaagactgcatggaagacatggatgggcgggcaccaggtggtgcctcggtgcacaacgccatgcagctgaagccrggcaagcccaatggctggaggattcccttcaacagccatgagggcggctgtggggctgccatgcgggccatgtgcatcggtctcaggttcccacaccatagccaactggacacactgatccaagtgagcatcgagagtggtcggatgacccaccaccacccaacaggctacctgggggcccttgcgtctgctctttttacagcctatgcwgtgaatagcagaccacccttgcagtggggaaaaggactgatggagctgctaccagaagctaaaaagtacattgtccaatcaggctactttgtagaggaaaatcttcaacactggtcctacttccaaaccaaatgggaaaattacctaaaacttagagggattttggatggagaatcagcccctaccttccctgagtctttcggtgtgaaggagagggatcagttctacacctccctgagctactctggctggggtggcagcagtgggcacgatgcccccatgattgcctacgatgctgttcttgctgcaggagactcctggaaggagcttgcccaccgagcctttttccatggtggagacagtgattctacagctgccattgctggctgctggtggggagttatgtatggttttaaaggagtgagtccctccaactatgagaaactagaatacagaaaccggctggaagagacagctagggctttatattctctcgggtcaaaagaagacactgtaatttccctttagggagacgtgatgttcacttctgatggattcttcttttgtgtatttccttttctgctatttcttttcagtttttccaaagtcaagagtcttaaccttgtactcagggaattttgagataacaagtcccttgggcaccttaagctcagttttttcaggctcatcctgttcttccagaatctatcccttttcttacactgaagagtcctttagctcaattgatagggtcagcgtctcgcaagcaaaaaatctcatgacctcatatttgagtcttcattttcatcatctacttgttctaaaagttttttctgtttgtctcaagttgggttcccacaaagtggactttgagacaaagatctgaatgcaagcagtttatatgggagatgattccaggaaataccgatatgagaatggggaaatgaaaccaggaagggaagagagctagtatggggtatgttaatgagcaggtttccactgtgggcggttggcactctgccatctgagtcctctgcctaaagcattcctcagaactgtcccatttgaagggcaagcaaacctggggtatttatccactgacttccatctgacactggttgaggaccactgccagggatgctaactccctggtaattcttggcttaccctttgtacaaaccaaaccttagtgtcttcaggtaaagactcagagatacttgcaggggcaagctgtaaagggcatgggaacagtgagggacatatgtggggtcctaacaatatctgctaggctggtctacctcctaaatatactctgaatctatcacctctattgccttcttgcactgaggatttttcagctggatttctgcaatccaagctactcaagtctgggagatgctgctctgagctgctctcagtactctcctcatcatggcagttaacacattaccaattttgttattgtctgtttgcttgtttgcattatttctaaacagaacctagcacagtgcttgggcagccaataggcattaatcagtatctattgagtgttatgaactagcctcctagctcgtgcttccctcattaccctccagagttatgtttacgaataacaaattgaccatgctaaactaatcatgttccaatgaatacatcacctttcttcatttcttgatgctcttcccaatccttgtctacctgataataaattcttacttgtccttcaagacccaactcagatagatagagcttcctgagtgaaacctgctttgattgttcaggcacttggccaccttctcctcactcctcccacagccttctgtcttggccttgtcatcacatcaatcctgttgtgtggtgctgtgtgtcttctgggtcagtcctaggcacatgctgcccagcacatgtccacctgggaaatgagatgccatcgtcacattcatttggtcaccctcagtccagccagtgggcttgctctcatttggcctgttctcaggggtgggaaggaagagcgtcccttccttctccttttgagaaaaccacakaactatgactctcatgatttttcctttgtgaaatccctggttttcagctggaagcggtgggtaaatgaggtctgatgatagcagtcctgccaccttctagttcatcccatargaatgtttttccaagtccttccagtctttttagaacgtggtggaggagggttgtgtgtgccccagggggtcgggggtaggggatgcagggaggatcttagcatttgttgttttctagtgcagggctttagccacaattgtraacaacaggaaaaggctctttagagatcctattagatttgctttgccgattgtcactcttcatcacaggcacatttcaaaaagaggttagactttcagacttcttttttctcaaacctcaaaacttccaccccaaacttcgctctcagctggtgactttgcttctttatgtgtgtgtatgtgtgtcagagaaagagagagagagagagagaagggaggatgagaacgaatggggggaagagataaactttatgcataacattagggtaaatcaataaagatggtctgacacatmrt

SEQ ID NO: 4142 - DNA, 3889 bp, Homo sapiens
gcttttatttacgatcaggatacaagaattctacgctgctgccaaataaatgactagttaaaattaactaactgaatccttaacaaccattctaagaggcagatattattatcccactttatgcgtgagggcccagaaccctggcaagggcggcacactcagtacgctcttcaagcatctgggcacacccggtccactacagtcctacaaagtcggacgtgagcacgggcgaaggcgtcagccggggccacacgggagtcactgaccacagccaggcgagagccggctttccggtgccgccacattccgggcaccaggctccgggctcttcagagcatttggggcgggcgacggaggtcccktccactctcgcttgggtgcagaagggcgcggcggtgccaggaagccgccttggaggctccaagattagctcactcagcgcggccaagcgcaggtgcgggggccctcgccgccaccctgcttatctggggacagtcccggaacccggtgacccggctccgccccaacccgcgccctcgtccacccgcagcagccaaggcctcttccccggccccgggagcccgcgccacgcccgtcgctcgcgcgttccagtccaggctacagcaggggctctccagcctgcattccatggccaacagcagtgcagctgcagaagcacttctggaagcctcctgacttgaactagaccttggacaccctctccagagcccagcaattgtgagggactgatggagaagtatgtggctgctatggtgctgagtgcagctggagatgccctggggtactacaatgggaagtgggagttcctccaggatggggagaagatacaccggcagttggcccagctgggyggcttggatgccctagacgtgggaaggtggagagttagtgacgacacagtgatgcacttggccacagcagaagctcttgtggaagctgggaaagcccctaagttgactcaactgtattacctccttgctaagcattaccaagactgcatggaagacatggatgggcgggcaccaggtggtgcctcggtgcacaacgccatgcagctgaagccrggcaagcccaatggctggaggattcccttcaacagccatgagggcggctgtggggctgccatgcgggccatgtgcatcggtctcaggttcccacaccatagccaactggacacactgatccaagtgagcatcgagagtggtcggatgacccaccaccacccaacaggctacctgggggcccttgcgtctgctctttttacagcctatgcwgtgaatagcagaccacccttgcagtggggaaaaggactgatggagctgctaccagaagctaaaaagtacattgtccaatcaggctactttgtagaggaaaatcttcaacactggtcctacttccaaaccaaatgggaaaattacctaaaacttagagggattttggatggagaatcagcccctaccttccctgagtctttcggtgtgaaggagagggatcagttctacacctccctgagctactctggctggggtggcagcagtgggcacgatgcccccatgattgcctacgatgctgttcttgctgcaggagactcctggaaggagcttgcccaccgagcctttttccatggtggagacagtgattctacagctgccattgctggctgctggtggggagttatgtatggttttaaaggagtgagtccctccaactatgagaaactagaatacagaaaccggctggaagagacagctagggctttatattctctcgggtcaaaagaagacactgtaatttccctttagggagacgtgatgttcacttctgatggattcttcttttgtgtatttccttttctgctatttcttttcagtttttccaaagtcaagagtcttaaccttgtactcagggaattttgagataacaagtcccttgggcaccttaagctcagttttttcaggctcatcctgttcttccagaatctatcccttttcttacactgaagagtcctttagctcaattgatagggtcagcgtctcgcaagcaaaaaatctcatgacctcatatttgagtcttcattttcatcatctacttgttctaaaagttttttctgtttgtctcaagttgggttcccacaaagtggactttgagacaaagatctgaatgcaagcagtttatatgggagatgattccaggaaataccgatatgagaatggggaaatgaaaccaggaagggaagagagctagtatggggtatgttaatgagcaggtttccactgtgggcggttggcactctgccatctgagtcctctgcctaaagcattcctcagaactgtcccatttgaagggcaagcaaacctggggtatttatccactgacttccatctgacactggttgaggaccactgccagggatgctaactccctggtaattcttggcttaccctttgtacaaaccaaaccttagtgtcttcaggtaaagactcagagatacttgcaggggcaagctgtaaagggcatgggaacagtgagggacatatgtggggtcctaacaatatctgctaggctggtctacctcctaaatatactctgaatctatcacctctattgccttcttgcactgaggatttttcagctggatttctgcaatccaagctactcaagtctgggagatgctgctctgagctgctctcagtactctcctcatcatggcagttaacacattaccaattttgttattgtctgtttgcttgtttgcattatttctaaacagaacctagcacagtgcttgggcagccaataggcattaatcagtatctattgagtgttatgaactagcctcctagctcgtgcttccctcattaccctccagagttatgtttacgaataacaaattgaccatgctaaactaatcatgttccaatgaatacatcacctttcttcatttcttgatgctcttcccaatccttgtctacctgataataaattcttacttgtccttcaagacccaactcagatagatagagcttcctgagtgaaacctgctttgattgttcaggcacttggccaccttctcctcactcctcccacagccttctgtcttggccttgtcatcacatcaatcctgttgtgtggtgctgtgtgtcttctgggtcagtcctaggcacatgctgcccagcacatgtccacctgggaaatgagatgccatcgtcacattcatttggtcaccctcagtccagccagtgggcttgctctcatttggcctgttctcaggggtgggaaggaagagcgtcccttccttctccttttgagaaaaccacakaactatgactctcatgatttttcctttgtgaaatccctggttttcagctggaagcggtgggtaaatgaggtctgatgatagcagtcctgccaccttctagttcatcccatargaatgtttttccaagtccttccagtctttttagaacgtggtggaggagggttgtgtgtgccccagggggtcgggggtaggggatgcagggaggatcttagcatttgttgttttctagtgcagggctttagccacaattgtraacaacaggaaaaggctctttagagatcctattagatttgctttgccgattgtcactcttcatcacaggcacatttcaaaaagaggttagactttcagacttcttttttctcaaacctcaaaacttccaccccaaacttcgctctcagctggtgactttgcttctttatgtgtgtgtatgtgtgtcagagaaagagagagagagagagagaagggaggatgagaacgaatggggggaagagataaactttatgcataacattagggtaaatcaataaagatggtctgacacatmrt

SEQ ID NO: 4143 - DNA, 1250 bp, Homo sapiens
atggtgaaggtgaaggtggaagtcaacggatttggccayactgggcgcctggtcaccagggctgcttttaactctggtaaagtagatattgtcaccatcaatgaccccttcattgacctcaactaccccttcattgacctcaactacatgatctacatgttccagtatgattccatggcaaattccatggcaccatcaaggctgagaatgggaagcttgtcatcaagggaaatcccatcaccatcttccaggagtgagatccctccaaaatcaaatggggtgacactggggctgagtacatggtgaagtccaccagcatcttcaccaccatggaaaaggctggggcttacttgcagggagragccaaaaggatcataatctctgctccctctgctgacgcccccatgttcatgatgggcataaaccgtgagaagtatgacaacagcctcgagatcatcagcaatgcctcctgcaccaccaactgcttagcacctctggccaaggtcatccatgacaattttggtatcatggaaggactcatgaccacagtccatgccatcgctgcaacccagaagactgtggatagcmcctctgggaaactgkggtgtgatggatgcagggctctccagaacatcatccctgcctctactggtgctgccaaggctgtggacaagccaaggtgctgccaaggctgtgtcatccctgagctgaacaggaagctcactggcaaagccttctgtcgtccccaccaccaacgtgtcggtagtggacctgacctgccatctggaaaaacctgccaaatatgatgacatcaagaagtggtgtagcaggcatcagaaggccccttcaagggcatcctgggctacactgagcacttggtagtctcctccaacttcaacagtgacacccactcttccgcctttgatgctggggctggcattgccctcaacaaccactttatcaagctcatttcctggcatgacaatgaattggctacagcaatagggtggtagacctcatggcacacatggcctccaaggagtaagacccctggactgccaacccgagcgagagcatgagaggaagagagaggccttcactgctggggagtccttgctgcactcagttccccaccacactgagaatctcccctcctcacagtttccatgcagaccccctgaagagggagatgcctagggagcccctccttgtcaygaaccatcaataaagtcccctgtgctcagccaaaa

SEQ ID NO: 4144 - DNA, 1142 bp, Homo sapiens
gcccctccccgccccgcctcccggcgcgggtggccgaggcgtagcgctgcgacccccgcacccctgctaacatggcgctgcgagtggtgcggagcgtgcgggctctgctctgcaccctgcgcgcggtcccgtcacccgccgcgccctgcccgccraggccctggcagctgggggtgggcgccgtccgtacgctgcgcactggacccgctctgctctcggtgcgtaaattcacagagaaacacgaatgggtaacaacagaaaatggcattggaacagtgggaatcagcaattttgcacaggaagcgttgggagatgttgtttactgtagtctgcctgaagttgggacaaaattgaacaaacaagatgagtttggtgctttggaaagtgtgaaagctgctagtgaactctattctcctttatcaggagaagtaactgaaattaatgaagctcttgcagaaaatccaggactcgtaaacaaatcttgttgtgaagatggttggctgatcaagatgacactgagtaacccttcagaactagatgaacttatgagtgaagaagcatatgagaaatacataaaatctattgaggagtgaaaatggaactcctaaataaactagtatgaaataacgcaagccagcagagttgtcttaaattagtggtggatagaagacttagaatagaaacttttaatattaccgatggggraaaaaaactactgttaacactgctaatgaaagaaaatgcctttaactttctaatgattatagataaatataatatgcatctttttcacaatatcctatgatttttagactaggctctagtgttcagaattcatgaaattatccatggtaaaaactagttataaaaattacataattcaaagataacattgttattcttaagccttatataatattgtaacttgcatgtatccatacctggatttgggatgaaatacttaatgatctttccattggaaataactggaagtgaagaggttttgttgcttgtacagtgtcagatgaggaacamcactatcttaattttgcratacactgcatttgctggtgctatttttatacagtgaagcaacagctttgcagcaaaataataaaatacttctttgttaaaaaaaaaaa

SEQ ID NO: 4145 - DNA, 733 bp, Homo sapiens
ggcccctccccgccccgcctcccggcgcgggtggccgaggcgtagcgctgcgacccccgcacccctgctaacatggcgctgcgagtggtgcggagcgtgcgggctctgctctgcaccctgcgcgcggtcccgtcacccgccgcgccctgcccgccraggccctggcagctgggggtgggcgccgtccgtacgctgcgcactggacccgctctgctctcggtgcgtaaattcacagagaaacacgaatgggtaacaacagaaaatggcattggaacagtgggaatcagcaattttgcacaggaagcatggttggctgatcaagatgacactgagtaacccttcagaactagatgaacttatgagtgaagaagcatatgagaaatacataaaatctattgaggagtgaaaatggaactcctaaataaactagtatgaaataacgcaagccagcagagttgtcttaaattagtggtggatagaagacttagaatagaaacttttaatattaccgatggggraaaaaaactactgttaacactgctaatgaaagaaaatgcctttaactttctaatgattatagataaatataatatgcatctttttcacaatatcctatgatttttagactaggctctagtgttcagaattcatgaaattatccatggtaaaaactagttataaaaattacataattcaaagataacattgttattcttaagccttatataatatt

SEQ ID NO: 4146 - DNA, 3191 bp, Homo sapiens
acctttgaggcccaagggggagcgagccggtgctgcygcaggctgaggctgcggcagaggcggcgaggcgcgggcggtgaggacggacagtcaccgacttagtccagttccctgtgatctcaaaacaattgttgcagcaggctcctggcagtctcaagcagttcatcttcttggtgtactggtttcctattgtgattttatcatggaaaatcaattggctaaatcaactgaagaacgaacatttcagtaccaggattctcttccatcactgcctgttccttcacttgaagaatcattaaaaaaataccttgaatcagtgaaaccatttgcaaakcaagaagaatataagaaaactgaagaaatagttcaaaaatttcaaagtgggattggagaaaaattgcaccagaaattgcttgaaagagcaaaaggaaaaagaaattggctggaagagtggtggctgaatgttgcctatctggatgttcrtataccatcacaattgaatgtcaactttgcgggtcctgcagctcattttgaacactactggcctccaaaggaagggactcaattagaaagaggaagtataactctttggcataacttgaactactggcagctattaagaaaagaaaaagtgcctgttcataaagttggaaatactcctctagatatgaatcaattccgaatgctattttctacctgcaaggttccaggaattactagagactccattatgaattattttaggactgagagtgaagggcgttccccaaaccacattgtagtgctgtgtcgaggccgagcttttgtctttgatgtaatacatgaaggatgtttggtcaccccgccagagcttctcagacaactgacatatatccacaagaagtgccatagtgaacctgatggacctgggattgcagcattaactagtgaggagcgaactcgatgggctaaggcacgagaatatctgattggtcttgatccagagaacttggctttgttagaaaaaattcagagtagtttactggtatattccatggaggatagcagtccacatgtaacaccagaggattattctgagattattgcagccatccttattggagatccaacagtacgctggggtgacaaatcctataacttgatttccttttctaatggagtatttggctgtaattgtgatcatgctccttttgatgcaatgattatggtgaacatcagttattatgtggatgagaaaatttttcagaatgaaggaagatggaagggttcagagaaggtacgagatataccacttccagaagagctcattttcattgtggatgagaaagttttaaatgacatcaaccaagctaaagcccagtatctcagggaggcatctgatctacagattgcggcttatgcctttacatcttttggcaaaaagctaaccaagaacaagatgcttcacccggatacgtttattcagcttgcacttcagctggcctattacagacttcatggacaccctggttgttgctatgaaacagctatgacaagacatttttatcatggccgtacagagactatgcgatcatgcacagttgaagcagtgaggtggtgccagtccatgcaggatccttctstcaatcttcgtgagcggcagcaaaagatgttacaagcttttgcaaagcataataaaatgatgaaagattgttcagctggaaaaggatttgatcgtcaccttttaggtctcttactcatagcaaaagaggaaggtcttcctgttccagaactctttacggacccacttttttccaaaagcggaggaggtggaaattttgttctctcaacaagtctggttggctatttacgagtccagggagtggtagttcccatggtacacaatggttatggatttttctaccatatcagagatgacaggtttgttgtggcctgttcagcctggaaatcctgtcccgagactgatgcggaaaagctagttcagctgactttttgtgcttttcatgatatgatacagctgatgaactctactcatctttagagatgaatcatctattaagcacttaccaaaacatatcattaaactgagtgctgggagtgagttggtaatatgagatgggaaggaatgttgacttgctaacattcctttaacaagttaagaaaacttgttaaatgtagaaattagtagaatcatgctctctaaatttattctgccatagaaggtagaaatatttttaagctcctctgatgcagcagcaatgcaaattatgacatagtgaatatagaactatgcagtatttaagcctcaacaatccaaatctacaaactttaacaatgcaagtcttactctaatttttaagtatttttgttggtacttacatgggttataaatcctctctctggacatcaatgtagagtccatctttcaagcactttaatttttttagctgccaaagggtatgaattacattattgtatgctaatttccctgaaatcaatgccttctatgttcaccacagggatacaagcctgttatgtttgatgggaaagaccactacaatctaatggtgatctaaaataacttttttgggctgggtgcagtggctcatgcctataatcttagcactttgggaggccaaggtaggaggattgcttgaagctaggagtttgagaccagcctgggcaacagggtaaggtcctgtctctacaagatcaaaaacttagccgggtatggtggtgcatgtgtgcctgtagtccaagctacttgaaggctgagacaggaggatcggttgagcccaggaggttgtggctgcagtgagctgtgatgtgcccttatgctatagcctgggcaagagcgtgagaccctgtctcaaagaagaaaaaaagagaaaaataactcttttgaacaaacagacaaattagctagtagtatggagatgtataccctctattacacacataaaaccgtaacaaaattcattktggtgtattataattagttttgtgaatagaaaaataaagcacttatgtttaaatttgttacagtgacttttaaaggattaatgttgaatcacattgtcagaattttttcctcctcgctgttcaattttgtagtttttactctcaaaaaatgaaattctcaaaattatatagctttttgttttgtttgaataaatgattcattcctgttt

SEQ ID NO: 4147 - DNA, 3101 bp, Homo sapiens
tcaccgacttagtccagttccctgtgatctcaaaacaattgttgcagcaggctcctggcagtctcaagcagttcatcttcttggtgtactggtttcctattgtgattttatcatggaaaatcaattggctaaatcaactgaagaacgaacatttcagtaccaggattctcttccatcactgcctgttccttcacttgaagaatcattaaaaaaataccttgaatcagtgaaaccatttgcaaakcaagaagaatataagaaaactgaagaaatagttcaaaaatttcaaagtgggattggagaaaaattgcaccagaaattgcttgaaagagcaaaaggaaaaagaaattggctggaagagtggtggctgaatgttgcctatctggatgttcrtataccatcacaattgaatgtcaactttgcgggtcctgcagctcattttgaacactactggcctccaaaggaagggactcaattagaaagaggaagtataactctttggcataacttgaactactggcagctattaagaaaagaaaaagtgcctgttcataaagttggaaatactcctctagatatgaatcaattccgaatgctattttctacctgcaaggttccaggaattactagagactccattatgaattattttaggactgagagtgaagggcgttccccaaaccacattgtagtgctgtgtcgaggccgagcttttgtctttgatgtaatacatgaaggatgtttggtcaccccgccagagcttctcagacaactgacatatatccacaagaagtgccatagtgaacctgatggacctgggattgcagcattaactagtgaggagcgaactcgatgggctaaggcacgagaatatctgattggtcttgatccagagaacttggctttgttagaaaaaattcagagtagtttactggtatattccatggaggatagcagtccacatgtaacaccagaggattattctgagattattgcagccatccttattggagatccaacagtacgctggggtgacaaatcctataacttgatttccttttctaatggagtatttggctgtaattgtgatcatgctccttttgatgcaatgattatggtgaacatcagttattatgtggatgagaaaatttttcagaatgaaggaagatggaagggttcagagaaggtacgagatataccacttccagaagagctcattttcattgtggatgagaaagttttaaatgacatcaaccaagctaaagcccagtatctcagggaggcatctgatctacagattgcggcttatgcctttacatcttttggcaaaaagctaaccaagaacaagatgcttcacccggatacgtttattcagcttgcacttcagctggcctattacagacttcatggacaccctggttgttgctatgaaacagctatgacaagacatttttatcatggccgtacagagactatgcgatcatgcacagttgaagcagtgaggtggtgccagtccatgcaggatccttctstcaatcttcgtgagcggcagcaaaagatgttacaagcttttgcaaagcataataaaatgatgaaagattgttcagctggaaaaggatttgatcgtcaccttttaggtctcttactcatagcaaaagaggaaggtcttcctgttccagaactctttacggacccacttttttccaaaagcggaggaggtggaaattttgttctctcaacaagtctggttggctatttacgagtccagggagtggtagttcccatggtacacaatggttatggatttttctaccatatcagagatgacaggtttgttgtggcctgttcagcctggaaatcctgtcccgagactgatgcggaaaagctagttcagctgactttttgtgcttttcatgatatgatacagctgatgaactctactcatctttagagatgaatcatctattaagcacttaccaaaacatatcattaaactgagtgctgggagtgagttggtaatatgagatgggaaggaatgttgacttgctaacattcctttaacaagttaagaaaacttgttaaatgtagaaattagtagaatcatgctctctaaatttattctgccatagaaggtagaaatatttttaagctcctctgatgcagcagcaatgcaaattatgacatagtgaatatagaactatgcagtatttaagcctcaacaatccaaatctacaaactttaacaatgcaagtcttactctaatttttaagtatttttgttggtacttacatgggttataaatcctctctctggacatcaatgtagagtccatctttcaagcactttaatttttttagctgccaaagggtatgaattacattattgtatgctaatttccctgaaatcaatgccttctatgttcaccacagggatacaagcctgttatgtttgatgggaaagaccactacaatctaatggtgatctaaaataacttttttgggctgggtgcagtggctcatgcctataatcttagcactttgggaggccaaggtaggaggattgcttgaagctaggagtttgagaccagcctgggcaacagggtaaggtcctgtctctacaagatcaaaaacttagccgggtatggtggtgcatgtgtgcctgtagtccaagctacttgaaggctgagacaggaggatcggttgagcccaggaggttgtggctgcagtgagctgtgatgtgcccttatgctatagcctgggcaagagcgtgagaccctgtctcaaagaagaaaaaaagagaaaaataactcttttgaacaaacagacaaattagctagtagtatggagatgtataccctctattacacacataaaaccgtaacaaaattcattktggtgtattataattagttttgtgaatagaaaaataaagcacttatgtttaaatttgttacagtgacttttaaaggattaatgttgaatcacattgtcagaattttttcctcctcgctgttcaattttgtagtttttactctcaaaaaatgaaattctcaaaattatatagctttttgttttgtttgaataaatgattcattcctgttt

SEQ ID NO: 4148 - DNA, 3121 bp, Homo sapiens
catttcagaagagttacagccgtgaaaattactcagcagtgcagttggctgagaagaggaaaaaagaatgagagcgctsgctgtgctgtctgtcacgctggttatggcctgcacagaagccttcttccccttcatctcgagagggaaagaactcctttggggaaagcctgaggagtctcgtgtctctagcgtcttggaggaaagcaagcgcctggtggacaccgccatgtacgccacgatgcagagaaacctcaagaaaagaggaatcctttctscagctcagcttctgtctttttccaaacttcctgagccaacaagcggagtgattgcccgagcagcagagataatggaaacatcaatacaagcgatgaaaagaaaagtcaacctgaaaactcaacaatcacagcatccaacggatgctttatcagaagatctgctgagcatcattgcaaacatgtctggatgtctcccttacatgctgcccccaaaatgcccaaacacttgcctggcgaacaaatacaggcccatcacaggagcttgcaacaacagagaccaccccagatggggcgcctccaacacggccctggcacgatggctccctccagtctatgaggacggcttcagtcagccccgaggctggaaccccggcttcttgtacaacgggttcccactgcccccrgtccgggaggtgacaagacatgtcattcaagtttcaaatgaggttgtcacagatgatgaccgctattctgacctcctgatggcatggggacaatacatcgaccacracatcgcgttcacaccacagagcaccagcaaagctgccttcgggggagggkctgactgccagatgacttgtgagaaccaaaacccatgttttcccatacaactcccggaggaggcccggccggccgcgggcaccgcctgtctgcccttctaccgctcttcggccgcctgcggcaccggggaccaaggcgcgctctttgggaacctgtccacggccaacccgcggcagcagatgaacgkgttgacctcgttcctggacrcgtccaccgtgtatggcagctccccggccctagagaggcagctgcggaactggacsagtgccgaagggctgctccgcgtccacgcgcgcctccgggactccggccgcgcctacctgcccttcgtgccgccacgcgcgcctkcggcctgtgcgcccgagcccggcatccccggagagacccgcgggccctgcttcctggccggagacggccgcgccascgaggtcccctccctgacggcactgcacacgctgtggctgcgcgagcacaaccgcctggccgcggcgctcaaggccctcaatgcgcactggagcgcggacgccgtgtaccaggaggcgcgcaaggtcgtgggcgctctgcaccagatcatcaccctgagggattacatccccaggatcctgggacccgaggccttccagcagtacgtgggtccctatgaaggctatgactccaccgccaaccccactgtgtccaacgtgttctccacagccgccttccrcttcrgccatgccacgatccacccgctggtgaggaggctggacgccagcttccaggagcaccccgacctgcccgggctgtggctgcaccaggctttcttcagcccatgkacattactccgtggaggtggtttggacccactaataygaggccttcttgcaagaccagccaaactgcaggtgcaggatcagctgatgaacgaggagctgacggaaaggctctttgtgctgtccaattccagcaccttggatctggcgtccatcaacctgcagaggggccgggaccacgggctgccaggttacaatgagtggagggagttctgcggcctgcctcgcctggagwcccccgctgacctgagcacagccatcgccagcaggagcrtggccgacaagatcctggacttgtacaagcatcctgacaacatcgatgtctggctgggaggcttagctgaaaacttcctccccagggctcrgacagggcccctgtttgcctgtctcattgggaagcagatgaaggctctgygggayggtgactggttttggtgggagaacagccacgtcttcacggatgcacagaggcgtgagctggagaagcactccctgtctygggtcatctgtgacaacactggcctcaccagggtgcccrtggatgccttccaagtcggcaaattcccygaagactttgagtcttgtgacagcatcmctggcatgaacctggaggcctggagggaaacctttcctcaagacgacaagtgtggcttcccagagagcgtggagaatggggactttgtgcactgtgaggagtctgggaggcgygtgctggtgtattcctgccggcacrggtatgagctccaaggccgggagcagctcacttgcacccaggaaggatgggatttccagcctcccctctgcaaagatgtgaacgagtgtgcagacggtgcccaccccccctgccacgcctctgcgaggtgcagaaacaccaaaggcggcttccagtgtctctgcgcggacccctacgagttaggagacgatgggagaacctgcgtagactccgggaggctccctcgggyracttggatctccatgtcgctggctgctctgctgatcggaggcttcgcaggtctcacctcgacggtgatttgcaggtggacacgcactggcactaaatccacactgcccatctcggagacaggcggaggaactcccgagctgagatgcggaaagcaccaggccgtagggacctcaccgcagcgggccgcagctcaggactcggagcaggagagtgctgggatggaaggccgggatactcacaggctgccgagagccctctgagggcaaagtggcaggacactgcagaacagcttcatgttcccaaaatcaccgtacgactcttttccaaacacaggcaaatcsgaaatcagcaggacgactgttttcccaacacggktaaatctagtaccatgtcgtagttactctcaggcatggatgaataaatgttatagctgcatttgtctggccttttcttgtaaacattgcctgayttgttccttctggggctttgccattaaaatgtatttacagatt

SEQ ID NO: 4149 - DNA, 2755 bp, Homo sapiens
catttcagaagagttacagccgtgaaaattactcagcagtgcagttggctgagaagaggaaaaaagaatgagagcgctsgctgtgctgtctgtcacgctggttatggcctgcacagaagccttcttccccttcatctcgagagggaaagaactcctttggggaaagcctgaggagtctcgtgtctctagcgtcttggaggaaagcaagcgcctggtggacaccgccatgtacgccacgatgcagagaaacctcaagaaaagaggaatcctttctscagctcagcttctgtctttttccaaacttcctgagccaacaagcggagtgattgcccgagcagcagagataatggaaacatcaatacaagcgatgaaaagaaaagtcaacctgaaaactcaacaatcacagcatccaacggatgctttatcagaagatctgctgagcatcattgcaaacatgtctggatgtctcccttacatgctgcccccaaaatgcccaaacacttgcctggcgaacaaatacaggcccatcacaggagcttgcaacaacagagaccaccccagatggggcgcctccaacacggccctggcacgatggctccctccagtctatgaggacggcttcagtcagccccgaggctggaaccccggcttcttgtacaacgggttcccactgcccccrgtccgggaggtgacaagacatgtcattcaagtttcaaatgaggttgtcacagatgatgaccgctattctgacctcctgatggcatggggacaatacatcgaccacracatcgcgttcacaccacagagcaccagcaaagctgccttcgggggagggkctgactgccagatgacttgtgagaaccaaaacccatgttttcccatacaactcccggaggaggcccggccggccgcgggcaccgcctgtctgcccttctaccgctcttcggccgcctgcggcaccggggaccaaggcgcgctctttgggaacctgtccacggccaacccgcggcagcagatgaacgkgttgacctcgttcctggacrcgtccaccgtgtatggcagctccccggccctagagaggcagctgcggaactggacsagtgccgaagggctgctccgcgtccacgcgcgcctccgggactccggccgcgcctacctgcccttcgtgccgccacgcgcgcctkcggcctgtgcgcccgagcccggcatccccggagagacccgcgggccctgcttcctggccggagacggccgcgccascgaggtcccctccctgacggcactgcacacgctgtggctgcgcgagcacaaccgcctggccgcggcgctcaaggccctcaatgcgcactggagcgcggacgccgtgtaccaggaggcgcgcaaggtcgtgggcgctctgcaccagatcatcaccctgagggattacatccccaggatcctgggacccgaggccttccagcagtacgtgggtccctatgaaggctatgactccaccgccaaccccactgtgtccaacgtgttctccacagccgccttccrcttcrgccatgccacgatccacccgctggtgaggaggctggacgccagcttccaggagcaccccgacctgcccgggctgtggctgcaccaggctttcttcagcccatgkacattactccgtggaggttacaatgagtggagggagttctgcggcctgcctcgcctggagwcccccgctgacctgagcacagccatcgccagcaggagcrtggccgacaagatcctggacttgtacaagcatcctgacaacatcgatgtctggctgggaggcttagctgaaaacttcctccccagggctcrgacagggcccctgtttgcctgtctcattgggaagcagatgaaggctctgygggayggtgactggttttggtgggagaacagccacgtcttcacggatgcacagaggcgtgagctggagaagcactccctgtctygggtcatctgtgacaacactggcctcaccagggtgcccrtggatgccttccaagtcggcaaattcccygaagactttgagtcttgtgacagcatcmctggcatgaacctggaggcctggagggaaacctttcctcaagacgacaagtgtggcttcccagagagcgtggagaatggggactttgtgcactgtgaggagtctgggaggcgygtgctggtgtattcctgccggcacrggtatgagctccaaggccgggagcagctcacttgcacccaggaaggatgggatttccagcctcccctctgcaaagatgtgaacgagtgtgcagacggtgcccaccccccctgccacgcctctgcgaggtgcagaaacaccaaaggcggcttccagtgtctctgcgcggacccctacgagttaggagacgatgggagaacctgcgtagactccgggaggctccctcgggyracttggatctccatgtcgctggctgctctgctgatcggaggcttcgcaggtctcacctcgacggtgatttgcaggtggagagtgctgggatggaaggccgggatactcacaggctgccgagagccctctgagggcaaagtggcaggacactgcagaacagcttcatgttcccaaaatcaccgtacgactcttttccaaacacaggcaaatcsgaaatcagcaggacgactgttttcccaacacggktaaatctagtaccatgtcgtagttactctcaggcatggatgaataaatgttatagctgcatttgtctggcct

SEQ ID NO: 4150 - DNA, 2950 bp, Homo sapiens
catttcagaagagttacagccgtgaaaattactcagcagtgcagttggctgagaagaggaaaaaagaatgagagcgctsgctgtgctgtctgtcacgctggttatggcctgcacagaagccttcttccccttcatctcgagagggaaagaactcctttggggaaagcctgaggagtctcgtgtctctagcgtcttggaggaaagcaagcgcctggtggacaccgccatgtacgccacgatgcagagaaacctcaagaaaagaggaatcctttctscagctcagcttctgtctttttccaaacttcctgagccaacaagcggagtgattgcccgagcagcagagataatggaaacatcaatacaagcgatgaaaagaaaagtcaacctgaaaactcaacaatcacagcatccaacggatgctttatcagaagatctgctgagcatcattgcaaacatgtctggatgtctcccttacatgctgcccccaaaatgcccaaacacttgcctggcgaacaaatacaggcccatcacaggagcttgcaacaacagagaccaccccagatggggcgcctccaacacggccctggcacgatggctccctccagtctatgaggacggcttcagtcagccccgaggctggaaccccggcttcttgtacaacgggttcccactgcccccrgtccgggaggtgacaagacatgtcattcaagtttcaaatgaggttgtcacagatgatgaccgctattctgacctcctgatggcatggggacaatacatcgaccacracatcgcgttcacaccacagagcaccagcaaagctgccttcgggggagggkctgactgccagatgacttgtgagaaccaaaacccatgttttcccatacaactcccggaggaggcccggccggccgcgggcaccgcctgtctgcccttctaccgctcttcggccgcctgcggcaccggggaccaaggcgcgctctttgggaacctgtccacggccaacccgcggcagcagatgaacgkgttgacctcgttcctggacrcgtccaccgtgtatggcagctccccggccctagagaggcagctgcggaactggacsagtgccgaagggctgctccgcgtccacgcgcgcctccgggactccggccgcgcctacctgcccttcgtgccgccacgcgcgcctkcggcctgtgcgcccgagcccggcatccccggagagacccgcgggccctgcttcctggccggagacggccgcgccascgaggtcccctccctgacggcactgcacacgctgtggctgcgcgagcacaaccgcctggccgcggcgctcaaggccctcaatgcgcactggagcgcggacgccgtgtaccaggaggcgcgcaaggtcgtgggcgctctgcaccagatcatcaccctgagggattacatccccaggatcctgggacccgaggccttccagcagtacgtgggtccctatgaaggctatgactccaccgccaaccccactgtgtccaacgtgttctccacagccgccttccrcttcrgccatgccacgatccacccgctggtgaggaggctggacgccagcttccaggagcaccccgacctgcccgggctgtggctgcaccaggctttcttcagcccatgkacattactccgtggaggttacaatgagtggagggagttctgcggcctgcctcgcctggagwcccccgctgacctgagcacagccatcgccagcaggagcrtggccgacaagatcctggacttgtacaagcatcctgacaacatcgatgtctggctgggaggcttagctgaaaacttcctccccagggctcrgacagggcccctgtttgcctgtctcattgggaagcagatgaaggctctgygggayggtgactggttttggtgggagaacagccacgtcttcacggatgcacagaggcgtgagctggagaagcactccctgtctygggtcatctgtgacaacactggcctcaccagggtgcccrtggatgccttccaagtcggcaaattcccygaagactttgagtcttgtgacagcatcmctggcatgaacctggaggcctggagggaaacctttcctcaagacgacaagtgtggcttcccagagagcgtggagaatggggactttgtgcactgtgaggagtctgggaggcgygtgctggtgtattcctgccggcacrggtatgagctccaaggccgggagcagctcacttgcacccaggaaggatgggatttccagcctcccctctgcaaagatgtgaacgagtgtgcagacggtgcccaccccccctgccacgcctctgcgaggtgcagaaacaccaaaggcggcttccagtgtctctgcgcggacccctacgagttaggagacgatgggagaacctgcgtagactccgggaggctccctcgggyracttggatctccatgtcgctggctgctctgctgatcggaggcttcgcaggtctcacctcgacggtgatttgcaggtggacacgcactggcactaaatccacactgcccatctcggagacaggcggaggaactcccgagctgagatgcggaaagcaccaggccgtagggacctcaccgcagcgggccgcagctcaggactcggagcaggagagtgctgggatggaaggccgggatactcacaggctgccgagagccctctgagggcaaagtggcaggacactgcagaacagcttcatgttcccaaaatcaccgtacgactcttttccaaacacaggcaaatcsgaaatcagcaggacgactgttttcccaacacggktaaatctagtaccatgtcgtagttactctcaggcatggatgaataaatgttatagctgcatttgtctggccttttcttgtaaacattgcctgayttgttccttctggggctttgccattaaaatgtatttacagatt

SEQ ID NO: 4151 - DNA, 356 bp, Homo sapiens
gaagggctgctccgcgtccacgcgcgcctccgggactccggccgcgcctacctgcccttcgtgccgccacgcgcgcctkcggcctgtgcgcccgagcccggcatccccggagagacccgcgggccctgcttcctggccggagacggccgcgccascgaggtcccctccctgacggcactgcacacgctgtggctgcgcgagcacaaccgcctggccgcggcgctcaaggccctcaatgcgcactggagcgcggacgccgtgtaccaggaggcgcgcaaggtcgtgggcgctctgcaccagccgccttccrcttcrgccatgccacgatccacccgctggtgaggaggctggacgcc

SEQ ID NO: 4152 - DNA, 2602 bp, Homo sapiens
catttcagaagagttacagccgtgaaaattactcagcagtgcagttggctgagaagaggaaaaaagaatgagagcgctsgctgtgctgtctgtcacgctggttatggcctgcacagaagccttcttccccttcatctcgagagggaaagaactcctttggggaaagcctgaggagtctcgtgtctctagcgtcttggaggaaagcaagcgcctggtggacaccgccatgtacgccacgatgcagagaaacctcaagaaaagaggaatcctttctscagctcagcttctgtctttttccaaacttcctgagccaacaagcggagtgattgcccgagcagcagagataatggaaacatcaatacaagcgatgaaaagaaaagtcaacctgaaaactcaacaatcacagcatccaacggatgctttatcagaagatctgctgagcatcattgcaaacatgtctggatgtctcccttacatgctgcccccaaaatgcccaaacacttgcctggcgaacaaatacaggcccatcacaggagcttgcaacaacagagaccaccccagatggggcgcctccaacacggccctggcacgatggctccctccagtctatgaggacggcttcagtcagccccgaggctggaaccccggcttcttgtacaacgggttcccactgcccccrgtccgggaggtgacaagacatgtcattcaagtttcaaatgaggttgtcacagatgatgaccgctattctgacctcctgatggcatggggacaatacatcgaccacracatcgcgttcacaccacagagcaccagcaaagctgccttcgggggagggkctgactgccagatgacttgtgagaaccaaaacccatgttttcccatacaaatcatcaccctgagggattacatccccaggatcctgggacccgaggccttccagcagtacgtgggtccctatgaaggctatgactccaccgccaaccccactgtgtccaacgtgttctccacagccgccttccrcttcrgccatgccacgatccacccgctggtgaggaggctggacgccagcttccaggagcaccccgacctgcccgggctgtggctgcaccaggctttcttcagcccatgkacattactccgtggaggtggtttggacccactaataygaggccttcttgcaagaccagccaaactgcaggtgcaggatcagctgatgaacgaggagctgacggaaaggctctttgtgctgtccaattccagcaccttggatctggcgtccatcaacctgcagaggggccgggaccacgggctgccaggttacaatgagtggagggagttctgcggcctgcctcgcctggagwcccccgctgacctgagcacagccatcgccagcaggagcrtggccgacaagatcctggacttgtacaagcatcctgacaacatcgatgtctggctgggaggcttagctgaaaacttcctccccagggctcrgacagggcccctgtttgcctgtctcattgggaagcagatgaaggctctgygggayggtgactggttttggtgggagaacagccacgtcttcacggatgcacagaggcgtgagctggagaagcactccctgtctygggtcatctgtgacaacactggcctcaccagggtgcccrtggatgccttccaagtcggcaaattcccygaagactttgagtcttgtgacagcatcmctggcatgaacctggaggcctggagggaaacctttcctcaagacgacaagtgtggcttcccagagagcgtggagaatggggactttgtgcactgtgaggagtctgggaggcgygtgctggtgtattcctgccggcacrggtatgagctccaaggccgggagcagctcacttgcacccaggaaggatgggatttccagcctcccctctgcaaagatgtgaacgagtgtgcagacggtgcccaccccccctgccacgcctctgcgaggtgcagaaacaccaaaggcggcttccagtgtctctgcgcggacccctacgagttaggagacgatgggagaacctgcgtagactccgggaggctccctcgggyracttggatctccatgtcgctggctgctctgctgatcggaggcttcgcaggtctcacctcgacggtgatttgcaggtggacacgcactggcactaaatccacactgcccatctcggagacaggcggaggaactcccgagctgagatgcggaaagcaccaggccgtagggacctcaccgcagcgggccgcagctcaggactcggagcaggagagtgctgggatggaaggccgggatactcacaggctgccgagagccctctgagggcaaagtggcaggacactgcagaacagcttcatgttcccaaaatcaccgtacgactcttttccaaacacaggcaaatcsgaaatcagcaggacgactgttttcccaacacggktaaatctagtaccatgtcgtagttactctcaggcatggatgaataaatgttatagctgcatttgtctggccttttcttgtaaacattgcctgayttgttccttctggggctttgccattaaaatgtatttacagatt

SEQ ID NO: 4153 - DNA, 3055 bp, Homo sapiens
aatgagagcgctsgctgtgctgtctgtcacgctggttatggcctgcacagaagccttcttccccttcatctcgagagggaaagaactcctttggggaaagcctgaggagtctcgtgtctctagcgtcttggaggaaagcaagcgcctggtggacaccgccatgtacgccacgatgcagagaaacctcaagaaaagaggaatcctttctscagctcagcttctgtctttttccaaacttcctgagccaacaagcggagtgattgcccgagcagcagagataatggaaacatcaatacaagcgatgaaaagaaaagtcaacctgaaaactcaacaatcacagcatccaacggatgctttatcagaagatctgctgagcatcattgcaaacatgtctggatgtctcccttacatgctgcccccaaaatgcccaaacacttgcctggcgaacaaatacaggcccatcacaggagcttgcaacaacagagaccaccccagatggggcgcctccaacacggccctggcacgatggctccctccagtctatgaggacggcttcagtcagccccgaggctggaaccccggcttcttgtacaacgggttcccactgcccccrgtccgggaggtgacaagacatgtcattcaagtttcaaatgaggttgtcacagatgatgaccgctattctgacctcctgatggcatggggacaatacatcgaccacracatcgcgttcacaccacagagcaccagcaaagctgccttcgggggagggkctgactgccagatgacttgtgagaaccaaaacccatgttttcccatacaactcccggaggaggcccggccggccgcgggcaccgcctgtctgcccttctaccgctcttcggccgcctgcggcaccggggaccaaggcgcgctctttgggaacctgtccacggccaacccgcggcagcagatgaacgkgttgacctcgttcctggacrcgtccaccgtgtatggcagctccccggccctagagaggcagctgcggaactggacsagtgccgaagggctgctccgcgtccacgcgcgcctccgggactccggccgcgcctacctgcccttcgtgccgccacgcgcgcctkcggcctgtgcgcccgagcccggcatccccggagagacccgcgggccctgcttcctggccggagacggccgcgccascgaggtcccctccctgacggcactgcacacgctgtggctgcgcgagcacaaccgcctggccgcggcgctcaaggccctcaatgcgcactggagcgcggacgccgtgtaccaggaggcgcgcaaggtcgtgggcgctctgcaccagatcatcaccctgagggattacatccccaggatcctgggacccgaggccttccagcagtacgtgggtccctatgaaggctatgactccaccgccaaccccactgtgtccaacgtgttctccacagccgccttccrcttcrgccatgccacgatccacccgctggtgaggaggctggacgccagcttccaggagcaccccgacctgcccgggctgtggctgcaccaggctttcttcagcccatgkacattactccgtggaggtggtttggacccactaataygaggccttcttgcaagaccagccaaactgcaggtgcaggatcagctgatgaacgaggagctgacggaaaggctctttgtgctgtccaattccagcaccttggatctggcgtccatcaacctgcagaggggccgggaccacgggctgccaggttacaatgagtggagggagttctgcggcctgcctcgcctggagwcccccgctgacctgagcacagccatcgccagcaggagcrtggccgacaagatcctggacttgtacaagcatcctgacaacatcgatgtctggctgggaggcttagctgaaaacttcctccccagggctcrgacagggcccctgtttgcctgtctcattgggaagcagatgaaggctctgygggayggtgactggttttggtgggagaacagccacgtcttcacggatgcacagaggcgtgagctggagaagcactccctgtctygggtcatctgtgacaacactggcctcaccagggtgcccrtggatgccttccaagtcggcaaattcccygaagactttgagtcttgtgacagcatcmctggcatgaacctggaggcctggagggaaacctttcctcaagacgacaagtgtggcttcccagagagcgtggagaatggggactttgtgcactgtgaggagtctgggaggcgygtgctggtgtattcctgccggcacrggtatgagctccaaggccgggagcagctcacttgcacccaggaaggatgggatttccagcctcccctctgcaaagatgtgaacgagtgtgcagacggtgcccaccccccctgccacgcctctgcgaggtgcagaaacaccaaaggcggcttccagtgtctctgcgcggacccctacgagttaggagacgatgggagaacctgcgtagactccgggaggctccctcgggyracttggatctccatgtcgctggctgctctgctgatcggaggcttcgcaggtctcacctcgacggtgatttgcaggtggacacgcactggcactaaatccacactgcccatctcggagacaggcggaggaactcccgagctgagatgcggaaagcaccaggccgtagggacctcaccgcagcgggccgcagctcaggactcggagcaggagagtgctgggatggaaggccgggatactcacaggctgccgagagccctctgagggcaaagtggcaggacactgcagaacagcttcatgttcccaaaatcaccgtacgactcttttccaaacacaggcaaatcsgaaatcagcaggacgactgttttcccaacacggktaaatctagtaccatgtcgtagttactctcaggcatggatgaataaatgttatagctgcatttgtctggccttttcttgtaaacattgcctgayttgttccttctggggctttgccattaaaatgtatttacagatt

SEQ ID NO: 4154 - DNA, 2929 bp, Homo sapiens
gccaatctctatctctcctcccgaagtgaagctatccactccccgattaatgccgctgccaggctgccctcacttactatggctactccggctcatgtctcactatggcctcgaagccgccactaaccggccgggttccgggaggcgccgttcaggatgcagccacccccgcccgcctgtcccctcccccacggccgcggcggcggcggcggcggcggctgctggagcccggatgcggcgccgtgaggcaggcccgggagagcggcgcggatggatccaacatggcggcgccgagcctgagccgagagaagagacctgggaaattaagtttcttgcggagtacggtggggattgcagctgctgagcagggattctggaaagcattgcgtacctgagcccccagcatggcgggcctaaagcggcgggcaagccaggtgtggccagaagagcatggtgagcaggaacaygggctgtacagcctgcaccgcatgtttgacatcgtgggcactcatctgacacacagagatgtgcgcgtgctttctttcctctttgttgatgtcattgatgaccacgagcgtggactcatccgaaatggacgtgacttcttattggcactggagcgccagggccgctgtgatgaaagtaactttcgccaggtgctgcagctgctgcgcatcatcactcgccacgacctgctgccctacgtcaccctcaagaggagacgggctgtgtgccctgatcttgtagacaagtatctggaggagacatcaattcgctatgtgacccccagagccctcagtgatccagaaccaaggcctccccagccctctaaaacagtgcctccccactatcctgtggtgtgttgccccacttcgggtcctcagatgtgtagcaagcggccagcccgagggagagccacacttgggagccagcgaaaacgccggaagtcagtgacaccagatcccaaggagaagcagacatgtgacatcagactgcgggttcgggctgaatactgccagcatgagactgctctgcagggcaatgtcttctctaacaagcaggacccacttgagcgccagtttgagcgctttaaccaggccaacaccatcctcaagtcccgggacctgggctccatcatctgtgacatcaagttctctgagctcacctacctcgatgcattctggcgtgactacatcaatggctctttattagaggcacttaaaggtgtcttcatcacagactccctcaagcaagctgtgggccatgaagccatcaagctgctggtaaatgtagacgaggaggactatgagctgggccgacagaaactcctgaggaacttgatgctgcaagcwttgccctgacctattccctcttctcactttggggactgttcccatcacccacctctggagcttacactgttctggggtttgttctctacccttccaaccaatcacacccctgcctttttttttttttttttaaagaaaaagacaaaagaaagtggaagtggtattccccacccctccctgcacccatgtgcctgggcttcccctttatttcccttttccatttaccccgtaatgtgtctctacagctaccttaccactgagccgtaagacaaatgtataggaagaagcaaagtctacagcacatagtctttgtaagggattgatgtgaacacttttttttggatgcactaaggagttatcaatacttctggctttatgagagctcttaaattttgtctaaaaaaccaaagggctgtgagtaagggagctatgtggaaagtgggactctgaagtgtattttgaaaattaatcgccaccctcttccaaattatagaattttttaaaaacaagctgtggccctttccactctctcctggcctctggtgctgctcctctctgccgcctttcctccattccatggcttgaaacctctgcctgatgtggctccttcctttttcccatttgtcaaaccctcttcaaaggaggaacagataagactgggtcagcctagtcatgcctcccaactgtggtggtatatgtgtacacacatacacagggtggatggagaagaggttgctgattaaaatacactccccctataaaggggaagggggagtgtgacactttctttccatgttcaagtgaaaataaataatgtaccctgcagcccttttcccctttgctttcttctggcttgggcaaagggcatcataggtgtaagtgaagtaattcctttttccttccccctcctccactcctacgcccactcccatgcttgggagaatggggctgggacatgcactgagtgttgcacttttatttaggtagggaggcatgttgaatgagccaggaggtctagaactggagcttagtccagctggtacaataccaactccccttctagttcccaaaggcgatgtccagacacagactttatgattattatatttttcaatgccagtgctgctcagccctcagcagaacttcagtttccatgaaataaacaatgactatataaaattccacctttctgaaactgcagtctgacctcaggtgaagctcaggtgaaagtttctttcccaagcagcccatctgtgttccatcaagagagtcaaggttctccaagtgaggggagctgtgcctggatcctgcctccaagtcacatgagcactagctcatagtggcagggtgggggtgggaggggcaggtctaaactcacagaagtcaagtcttaagacagtgggtgacccagattgccatagagstcaggcctgcggtgctggaacacaggcaggtgtcggcgcaactgtcgcagatagytgaggtctattcgggcaaggcagaggcctggcccctcagagcagcgggccaccactgttccccaggggtctaccaccatgctgtggccataacttgct

SEQ ID NO: 4155 - DNA, 2673 bp, Homo sapiens
gcggatggatccaacatggcggcgccgagcctgagccgagacttgtgctaggaagagacctgggaaattaagtttcttgcggagtacggtggggattgcagctgctgagcagggattctggaaagcattgcgtacctgagcccccagcatggcgggcctaaagcggcgggcaagccaggtgtggccagaagagcatggtgagcaggaacaygggctgtacagcctgcaccgcatgtttgacatcgtgggcactcatctgacacacagagatgtgcgcgtgctttctttcctctttgttgatgtcattgatgaccacgagcgtggactcatccgaaatggacgtgacttcttattggcactggagcgccagggccgctgtgatgaaagtaactttcgccaggtgctgcagctgctgcgcatcatcactcgccacgacctgctgccctacgtcaccctcaagaggagacgggctgtgtgccctgatcttgtagacaagtatctggaggagacatcaattcgctatgtgacccccagagccctcagtgatccagaaccaaggcctccccagccctctaaaacagtgcctccccactatcctgtggtgtgttgccccacttcgggtcctcagatgtgtagcaagcggccagcccgagggagagccacacttgggagccagcgaaaacgccggaagtcagtgacaccagatcccaaggagaagcagacatgtgacatcagactgcgggttcgggctgaatactgccagcatgagactgctctgcagggcaatgtcttctctaacaagcaggacccacttgagcgccagtttgagcgctttaaccaggccaacaccatcctcaagtcccgggacctgggctccatcatctgtgacatcaagttctctgagctcacctacctcgatgcattctggcgtgactacatcaatggctctttattagaggcacttaaaggtgtcttcatcacagactccctcaagcaagctgtgggccatgaagccatcaagctgctggtaaatgtagacgaggaggactatgagctgggccgacagaaactcctgaggaacttgatgctgcaagcwttgccctgacctattccctcttctcactttggggactgttcccatcacccacctctggagcttacactgttctggggtttgttctctacccttccaaccaatcacacccctgcctttttttttttttttttaaagaaaaagacaaaagaaagtggaagtggtattccccacccctccctgcacccatgtgcctgggcttcccctttatttcccttttccatttaccccgtaatgtgtctctacagctaccttaccactgagccgtaagacaaatgtataggaagaagcaaagtctacagcacatagtctttgtaagggattgatgtgaacacttttttttggatgcactaaggagttatcaatacttctggctttatgagagctcttaaattttgtctaaaaaaccaaagggctgtgagtaagggagctatgtggaaagtgggactctgaagtgtattttgaaaattaatcgccaccctcttccaaattatagaattttttaaaaacaagctgtggccctttccactctctcctggcctctggtgctgctcctctctgccgcctttcctccattccatggcttgaaacctctgcctgatgtggctccttcctttttcccatttgtcaaaccctcttcaaaggaggaacagataagactgggtcagcctagtcatgcctcccaactgtggtggtatatgtgtacacacatacacagggtggatggagaagaggttgctgattaaaatacactccccctataaaggggaagggggagtgtgacactttctttccatgttcaagtgaaaataaataatgtaccctgcagcccttttcccctttgctttcttctggcttgggcaaagggcatcataggtgtaagtgaagtaattcctttttccttccccctcctccactcctacgcccactcccatgcttgggagaatggggctgggacatgcactgagtgttgcacttttatttaggtagggaggcatgttgaatgagccaggaggtctagaactggagcttagtccagctggtacaataccaactccccttctagttcccaaaggcgatgtccagacacagactttatgattattatatttttcaatgccagtgctgctcagccctcagcagaacttcagtttccatgaaataaacaatgactatataaaattccacctttctgaaactgcagtctgacctcaggtgaagctcaggtgaaagtttctttcccaagcagcccatctgtgttccatcaagagagtcaaggttctccaagtgaggggagctgtgcctggatcctgcctccaagtcacatgagcactagctcatagtggcagggtgggggtgggaggggcaggtctaaactcacagaagtcaagtcttaagacagtgggtgacccagattgccatagagstcaggcctgcggtgctggaacacaggcaggtgtcggcgcaactgtcgcagatagytgaggtctattcgggcaaggcagaggcctggcccctcagagcagcgggccaccactgttccccaggggtctaccaccatgctgtggccataacttgct

SEQ ID NO: 4156 - DNA, 2723 bp, Homo sapiens
ggcggggccgcaaagggcttggggaaggaaagtggagggggaggcggtggcgacgtccagcctgagaacctcaagagagggaggtgacgggacgctgagaggaagagacctgggaaattaagtttcttgcggagtacggtggggattgcagctgctgagcagggattctggaaagcattgcgtacctgagcccccagcatggcgggcctaaagcggcgggcaagccaggtgtggccagaagagcatggtgagcaggaacaygggctgtacagcctgcaccgcatgtttgacatcgtgggcactcatctgacacacagagatgtgcgcgtgctttctttcctctttgttgatgtcattgatgaccacgagcgtggactcatccgaaatggacgtgacttcttattggcactggagcgccagggccgctgtgatgaaagtaactttcgccaggtgctgcagctgctgcgcatcatcactcgccacgacctgctgccctacgtcaccctcaagaggagacgggctgtgtgccctgatcttgtagacaagtatctggaggagacatcaattcgctatgtgacccccagagccctcagtgatccagaaccaaggcctccccagccctctaaaacagtgcctccccactatcctgtggtgtgttgccccacttcgggtcctcagatgtgtagcaagcggccagcccgagggagagccacacttgggagccagcgaaaacgccggaagtcagtgacaccagatcccaaggagaagcagacatgtgacatcagactgcgggttcgggctgaatactgccagcatgagactgctctgcagggcaatgtcttctctaacaagcaggacccacttgagcgccagtttgagcgctttaaccaggccaacaccatcctcaagtcccgggacctgggctccatcatctgtgacatcaagttctctgagctcacctacctcgatgcattctggcgtgactacatcaatggctctttattagaggcacttaaaggtgtcttcatcacagactccctcaagcaagctgtgggccatgaagccatcaagctgctggtaaatgtagacgaggaggactatgagctgggccgacagaaactcctgaggaacttgatgctgcaagcwttgccctgacctattccctcttctcactttggggactgttcccatcacccacctctggagcttacactgttctggggtttgttctctacccttccaaccaatcacacccctgcctttttttttttttttttaaagaaaaagacaaaagaaagtggaagtggtattccccacccctccctgcacccatgtgcctgggcttcccctttatttcccttttccatttaccccgtaatgtgtctctacagctaccttaccactgagccgtaagacaaatgtataggaagaagcaaagtctacagcacatagtctttgtaagggattgatgtgaacacttttttttggatgcactaaggagttatcaatacttctggctttatgagagctcttaaattttgtctaaaaaaccaaagggctgtgagtaagggagctatgtggaaagtgggactctgaagtgtattttgaaaattaatcgccaccctcttccaaattatagaattttttaaaaacaagctgtggccctttccactctctcctggcctctggtgctgctcctctctgccgcctttcctccattccatggcttgaaacctctgcctgatgtggctccttcctttttcccatttgtcaaaccctcttcaaaggaggaacagataagactgggtcagcctagtcatgcctcccaactgtggtggtatatgtgtacacacatacacagggtggatggagaagaggttgctgattaaaatacactccccctataaaggggaagggggagtgtgacactttctttccatgttcaagtgaaaataaataatgtaccctgcagcccttttcccctttgctttcttctggcttgggcaaagggcatcataggtgtaagtgaagtaattcctttttccttccccctcctccactcctacgcccactcccatgcttgggagaatggggctgggacatgcactgagtgttgcacttttatttaggtagggaggcatgttgaatgagccaggaggtctagaactggagcttagtccagctggtacaataccaactccccttctagttcccaaaggcgatgtccagacacagactttatgattattatatttttcaatgccagtgctgctcagccctcagcagaacttcagtttccatgaaataaacaatgactatataaaattccacctttctgaaactgcagtctgacctcaggtgaagctcaggtgaaagtttctttcccaagcagcccatctgtgttccatcaagagagtcaaggttctccaagtgaggggagctgtgcctggatcctgcctccaagtcacatgagcactagctcatagtggcagggtgggggtgggaggggcaggtctaaactcacagaagtcaagtcttaagacagtgggtgacccagattgccatagagstcaggcctgcggtgctggaacacaggcaggtgtcggcgcaactgtcgcagatagytgaggtctattcgggcaaggcagaggcctggcccctcagagcagcgggccaccactgttccccaggggtctaccaccatgctgtggccataacttgct

SEQ ID NO: 4157 - DNA, 2833 bp, Homo sapiens
gccaatctctatctctcctcccgaagtgaagctatccactccccgattaatgccgctgccaggctgccctcacttactatggctactccggctcatgtctcactatggcctcgaagccgccactaaccggccgggttccgggaggcgccgttcaggatgcagccacccccgcccgcctgtcccctcccccacggccgcggcggcggcggcggcggcggctgctggagcccggatgcggcgccgtgaggcaggcccgggagagcggcgcggatggatccaacatggcggcgccgagcctgagccgagagaagagacctgggaaattaagtttcttgcggagtacggtggggattgcagctgctgagcagggattctggaaagcattgcgtacctgagcccccagcatggcgggcctaaagcggcgggcaagccaggtgtggccagaagagcatggtgagcaggaacaygggctgtacagcctgcaccgcatgtttgacatcgtgggcactcatctgacacacagagatgtgcgcgtgctttctttcctctttgttgatgtcattgatgaccacgagcgtggactcatccgaaatggacgtgacttcttattggcactggagcgccagggccgctgtgatgaaagtaactttcgccaggtgctgcagctgctgcgcatcatcactcgccacgacctgctgccctacgtcaccctcaagaggagacgggctgtgtgccctgatcttgtagacaagtatctggaggagacatcaattcgctatgtgacccccagagccctcagtgatccagaaccaaggcctccccagccctctaaaacagtgcctccccactatcctgtggtgtgttgccccacttcgggtcctcagatgtgtagcaagcggccagcccgagggagagccacacttgggagccagcgaaaacgccggaagtcagtgacaccagatcccaaggagaagcagacatgtggtgaggaagttcaagggttccagagatggagcagacttgaaggagaatataaagaactgctgggacactgggcagtttatgctattcagtacatcagactgcgggttcgggctgaatactgccagcatgagactgctctgcagggcaatgtcttctctaacaagcaggacccacttgagcgccagtttgagcgctttaaccaggccaacaccatcctcaagtcccgggacctgggctccatcatctgtgacatcaagttctctgagctcacctacctcgatgcattctggcgtgactacatcaatggctctttattagaggcacttaaaggtgtcttcatcacagactccctcaagcaagctgtgggccatgaagccatcaagctgctggtaaatgtagacgaggaggactatgagctgggccgacagaaactcctgaggaacttgatgctgcaagcwttgccctgacctattccctcttctcactttggggactgttcccatcacccacctctggagcttacactgttctggggtttgttctctacccttccaaccaatcacacccctgcctttttttttttttttttaaagaaaaagacaaaagaaagtggaagtggtattccccacccctccctgcacccatgtgcctgggcttcccctttatttcccttttccatttaccccgtaatgtgtctctacagctaccttaccactgagccgtaagacaaatgtataggaagaagcaaagtctacagcacatagtctttgtaagggattgatgtgaacacttttttttggatgcactaaggagttatcaatacttctggctttatgagagctcttaaattttgtctaaaaaaccaaagggctgtgagtaagggagctatgtggaaagtgggactctgaagtgtattttgaaaattaatcgccaccctcttccaaattatagaattttttaaaaacaagctgtggccctttccactctctcctggcctctggtgctgctcctctctgccgcctttcctccattccatggcttgaaacctctgcctgatgtggctccttcctttttcccatttgtcaaaccctcttcaaaggaggaacagataagactgggtcagcctagtcatgcctcccaactgtggtggtatatgtgtacacacatacacagggtggatggagaagaggttgctgattaaaatacactccccctataaaggggaagggggagtgtgacactttctttccatgttcaagtgaaaataaataatgtaccctgcagcccttttcccctttgctttcttctggcttgggcaaagggcatcataggtgtaagtgaagtaattcctttttccttccccctcctccactcctacgcccactcccatgcttgggagaatggggctgggacatgcactgagtgttgcacttttatttaggtagggaggcatgttgaatgagccaggaggtctagaactggagcttagtccagctggtacaataccaactccccttctagttcccaaaggcgatgtccagacacagactttatgattattatatttttcaatgccagtgctgctcagccctcagcagaacttcagtttccatgaaataaacaatgactatataaaattccacctttctgaaactgcagtctgacctcaggtgaagctcaggtgaaagtttctttcccaagcagcccatctgtgttccatcaagagagtcaaggttctccaagtgaggggagctgtgcctggatcctgcctccaagtcacatgagcactagctcatagtggtctattcgggcaaggcagaggcctggcccctcagagcagcgggccacc

SEQ ID NO: 4158 - DNA, 1191 bp, Homo sapiens
tgtggtacccagtcctcaggtgcaaccccctgcgtggtcctctgtggcagccttctctcattcagagctaaaaagaaaactcagtagaagataatggcaagtccagactggggatatgatgacaaaaatggtcctgaacaatggagcaagctgtatcccattgccaatggaaataaccartcccctgttgatattaaaaccagtgaaaccaaacatgacacctctctgaaacctattagtgtctcctacaacccagccacagccaaagaaattatcaatgtggggcattccttccatgtaaattttgaggacaacgataaccgatcagtgctgaaaggtggtcctttctctgacagctacaggctctttcagttycattttcactggggcagtacaaatgagcatggttcagaacatacagtggatggagtcaaatattctgccgagcttcacgtagctcactggaattctgcaaagtactccagccttgctgaagctgcctcaaaggctgatggtttggyagttattggtgttttgatgaaggttggtgaggccaacccaaagctgcagaaagtacttgatgccctccaagyaattaaaaccaagggcaaacgagccccattcacaaattttgacccctctactctccttccttcatccctggatttctggacctaccytggctctctgactcatcctcctctttatgagagtgtaacttggatcatctgtaaggagagcatcagtgtcagctcagagcagctggcacaattccgcagccttctatcaaatgttgaaggtgataacgctgtccccatgcagcacaacaaccgcccaacccaacctctgaagggcagaacagtgagagcttcattttgatgattctgagaagaaacttgtccttcctcaagaacacagccctgcttctgacataatccagtaaaataataatttttaagaaataaatttatttcaatattagcaagacagtgtaaaactaagaaacttaaattttagttcttactgcttaattcaaataataattagtaagctagcaaatagtaatctgtaagcataagcttatgcttaaattcaagtttagtttgaggaattctttaaaattacaactaagtgatttgtatgtctatttttttcagtttatttgaaccaataaaataattttatctcttt

SEQ ID NO: 4159 - DNA, 1266 bp, Homo sapiens
gtggtacccagtcctcaggtgcaaccccctgcgtggtcctctgtggcagccttctctcattcagagctgttttccacagaggtagtgaaaagaactggattttcaagttcactttgcaagagaaaaagaaaactcagtagaagataatggcaagtccagactggggatatgatgacaaaaatggtcctgaacaatggagcaagctgtatcccattgccaatggaaataaccartcccctgttgatattaaaaccagtgaaaccaaacatgacacctctctgaaacctattagtgtctcctacaacccagccacagccaaagaaattatcaatgtggggcattccttccatgtaaattttgaggacaacgataaccgatcagtgctgaaaggtggtcctttctctgacagctacaggctctttcagttycattttcactggggcagtacaaatgagcatggttcagaacatacagtggatggagtcaaatattctgccgagcttcacgtagctcactggaattctgcaaagtactccagccttgctgaagctgcctcaaaggctgatggtttggyagttattggtgttttgatgaaggttggtgaggccaacccaaagctgcagaaagtacttgatgccctccaagyaattaaaaccaagggcaaacgagccccattcacaaattttgacccctctactctccttccttcatccctggatttctggacctaccytggctctctgactcatcctcctctttatgagagtgtaacttggatcatctgtaaggagagcatcagtgtcagctcagagcagctggcacaattccgcagccttctatcaaatgttgaaggtgataacgctgtccccatgcagcacaacaaccgcccaacccaacctctgaagggcagaacagtgagagcttcattttgatgattctgagaagaaacttgtccttcctcaagaacacagccctgcttctgacataatccagtaaaataataatttttaagaaataaatttatttcaatattagcaagacagcatgccttcaaatcaatctgtaaaactaagaaacttaaattttagttcttactgcttaattcaaataataattagtaagctagcaaatagtaatctgtaagcataagcttatgcttaaattcaagtttagtttgaggaattctttaaaattacaactaagtgatttgtatgtctatttttttcagtttatttgaaccaataaaataattttatctctttcttt

SEQ ID NO: 4160 - DNA, 1190 bp, Homo sapiens
atgcacagttgcagttagttattccaggtattatttttgttttcagaaaaagaaaactcagtagaagataatggcaagtccagactggggatatgatgacaaaaatggtcctgaacaatggagcaagctgtatcccattgccaatggaaataaccartcccctgttgatattaaaaccagtgaaaccaaacatgacacctctctgaaacctattagtgtctcctacaacccagccacagccaaagaaattatcaatgtggggcattccttccatgtaaattttgaggacaacgataaccgatcagtgctgaaaggtggtcctttctctgacagctacaggctctttcagttycattttcactggggcagtacaaatgagcatggttcagaacatacagtggatggagtcaaatattctgccgagcttcacgtagctcactggaattctgcaaagtactccagccttgctgaagctgcctcaaaggctgatggtttggyagttattggtgttttgatgaaggttggtgaggccaacccaaagctgcagaaagtacttgatgccctccaagyaattaaaaccaagggcaaacgagccccattcacaaattttgacccctctactctccttccttcatccctggatttctggacctaccytggctctctgactcatcctcctctttatgagagtgtaacttggatcatctgtaaggagagcatcagtgtcagctcagagcagctggcacaattccgcagccttctatcaaatgttgaaggtgataacgctgtccccatgcagcacaacaaccgcccaacccaacctctgaagggcagaacagtgagagcttcattttgatgattctgagaagaaacttgtccttcctcaagaacacagccctgcttctgacataatccagtaaaataataatttttaagaaataaatttatttcaatattagcaagacagcatgccttcaaatcaatctgtaaaactaagaaacttaaattttagttcttactgcttaattcaaataataattagtaagctagcaaatagtaatctgtaagcataagcttatgcttaaattcaagtttagtttgaggaattctttaaaattacaactaagtgatttgtatgtctatttttttcagtttatttgaaccaataaaataattttatctctttcttt

SEQ ID NO: 4161 - DNA, 908 bp, Homo sapiens
atgcagcagaataaacaggatccaccacctttctctctaggtcaaattcctggaaatatctggaggaacattcacgactccaggccagaaattcaagactctgcagctagttctgactccagtcctagggtaacaagcccaccaagaatccagggcagatgtcctgaaaacccttcttgcggggtcaggagggcagcagaattttgggaccaaatctcaacaactggttttggtttcctcactcaccaagccacaagcctgcagagtgagaagagtcacatctttctcttccttccaccccgagggaccatgtcgaggctcagctggggataccgcgagcacaacggtcctattcactggaaggaatttttccctattgctgatggtgatcagcaatctccaattgagattaaaaccaaagaagtgaaatatgactcttccctccgaccacttagtatcaagtatgacccaagctcagctaaaatcatcagcaacagcggccattccttcaatgttgactttgatgacacagagaacaaatcagttctgcgtggtggtcctctcactggaagctacaggttacggcaggttcaccttcactgggggtccgctgatgaccacggctccgagcacatagtagatggagtgagctatgctgcagagctccatgttgttcactggaattcagacaaataccccagctttgttgaggcagctcatgaaccagatggactggctgtcttgggagtgtttttacagattggygaacctaattcccaactgcaaaagattactgacactttggattccattaaagaaaagggtaaacaaactcgattcacaaattttgacctattgtctctgcttccaccatcctgggactactggacatatcctggttytcttac

SEQ ID NO: 4162 - DNA, 3834 bp, Homo sapiens
ctttcccgagtccgtttgaggaagtccccgaggcgcacagagcaagcccacgcgagggcacctctggasgggagcgcctgcaggaccttgtaaagtcaaaaatgtcagaaacttccaggaccgcctttggaggcagaagagcagttccacccaataactctaatgcagcggaagatgacctgcccacagtggagcttcagggcktggtgccccggggcrtcaacctgcaagagtttcttaatgtcacgagcgttcacctgttcaaggagagatgggacactaamaaggtggaccaccacactgacaagtatgaaaacaacaagctgattgtcygcagagggcagtctttctatgtgcagattgacytcagtcgtccatatgaccccagaagggatctcttcagggtggaatacgtcattggtcgctacccacaggagaacaagggaacctacatcccagtgcctatagtctcagagttacaaagtggaaagtggggggccaagattgtcatgagagaggacaggtctgtgcggctgtccatccagtcttcccccaaatgtattgtggggaaattccgcatgtatgttgctgtctggactccctatggcgtacttygaaccagtcgaaacccagaaacagacacgtacattctcttcaatccttggtgtgaagatgatgctgtgtatctggacaatgagaaagaaagagaagagtwtgtcctgaatgacatcggggtaattttttatggagaggtcaatgacatcaagaccagaagctggagctatggtcagtttgaagatggcatcctggacacttgcctgtatgtgatggacagagcacaaatggacctctctggaakagggaatcccatcaaagtcagccgtgtggggtctgcaatggtgaatgccaaagatgacgaaggtgtcctcgttggatcctgggacaatatctrtgcctatggcgtccccccatcggcctggactggaagsgttgacattctattggaataccggagctctgagaatccagtccggtatggccaatgctgggtttttgctggtgtctttaacacatttttacratgccttggaataccmgcaagaattgttaccaattatttctctgcccatgataatgatgccaatttgcaaatggacatcttccyggaagaagatgggaacgtgaattccaaactcaccaaggattcagtgtggaactaccactgctggaatgaagcatggatgacaaggcctgaccttcctgttggatttggaggctggcaagctgtggacagcacccccyaggaaaatagcgatggcatgtatcrgtgtggccccgcctcggttcaagccatcaagcacrgccatgtctgcttccaatttgatgcaccttttgtttttgcagaggtcaacagcgacctcatttacattacagctaagaaagatggcactcatgtggtggaaaatgtggatgccacccacattgggaaattaattgtgaccaaacaaattggaggagayggcatgatggatattactgatacttacaaattccaagaaggtcaagaagaagagagattggccctagaaactgccctgatgtacrgagctaaaaagcccctcaacacagaaggtgtcatgaaatcaaggtccaacgttgacatggactttgaagtggaaaatgctgtgctgggaaaagacttcaagctctccatcaccttccggaavaacagccacaaccgttacaccatcayagcttatctctcagccaacatcaccttctacaccrgggtccygaaggcagarttcaagaaggagacgttcgacrtgacgctggagcccttgtccttcaagaaagaggcggtgcwgatccaagccggcgagtacatgggtcagctgctggaacaagcgtccctgcacttctttgtcacagctcgcatcaatgagaccagggatgttctggccaagcaaaagtccaccgtgctaaccatccctgagatcatcatcaaggtccgtggcactcaggtagttggttctgacatgactgtgacarttsagtttaccaatcctttaaaagaaacccygygaaatgtctgggtacaccyggatggtcctggagtaacaagaccaatgaagaagatgttccgtgaaatccggcccaactccaccgtgcagtgggaagaagtgtgccggccctgggtctctgggcatcggaagctgatagccagcatgagcagtgactccctgagacatgtgtatggcgagctggaygtgcagattcaaagacgaccttccatgtgaatgcacaggaagctgagatgaaccctggcatttggcctcttgtagtcttggctaaggaaattctaacgcaaaaatagctcttgctttgrcttaggtgtgaagacccagacakgactgcagagggcyccagagtggagatcccacatatttcaaaaacatrcttttccaaacccaggctattcggcaaggaagttagtttttaatctctccaccttccaaaragtgctaagcattagctttaattaagctctcatagctcataagagtaacagtcatcatttatcatcacaaatggctacatctccaaatatcagtgggctctcttaccagggagatttgctcaatacctggcctcatttaaaacaagacttcagattccccactcagccttttgggaataatagcacatgatttgggctctagaattccagtcccctttctcrgggtcaggttctaccctccatgtgagaatatttttcccaggactagagcacaacataatttttatttttggcaaagccagaaaaagatctttcattttgcacctgcagccaagcaaatgcctgccaaattttagatttaccwtgttagaagaggtggccccatattaacaaattgcatttgtgggaaacttaaccacctacaaggagataagaaagcaggtgcaacactcaagtctattgaataatgtagttttgtgatgcattttatagaatgtgtcacactgtggcctgatcagcagragccaatatcccttactttaaccctttctgggatgcaatactaggaagtaaagtgaagaatttatctctttagttagtgattatatttcacccatctctcaggaatcatctcctttgcagaatgatgcaggttcaggtcccctttcagagatataataagcccaacaagttgaagaagctggcggatctagtgaccagatatatagaaggactgcagccactgattctctcttgtccttcacatcacccatkttgagacctcagcttggcactcaggtgctgaagggtaatatggactcagscttgcaaatagccagtgctagytctgacccaaccacagaggatgctgacatcatttgtattatgttccaaggctactacagagaaggctgcctgctatgtatttgcaaggctgatttatggtcagaatttccctctgatatgtctagggtgtgatttaggtcagtagactgtgattcttagcaaaaaatgaacagtgataagtatacwgggggcaaaatcagaatggaatgctctggtctatataaccacatttctaagcctttgagactgttcctgagccttcagcactaacctatgagggtgagctggtcccctctatatatacatcatacttaactttaytaagtaatctcacagcatttgccaagtctcccaatatccaattttaaaatgaaatgcattttgctagacagttaaactggcttaacttagtatattattattaattacaatgtaatagaagcttaaaataaagttaaactgattat

SEQ ID NO: 4163 - DNA, 2044 bp, Homo sapiens
aagattgcctttgatgtctacacgtcaacagtgaaaggggttccagagaaaaacaaagcctctggtaaaaagggcaagctcatcccaagattgagtatgcacgaagagggagcagaaacaggagatgggtgcctctggaacaaacatgcttatgcaggtcgctacccacaggagaacaagggaacctacatcccagtgcctatagtctcagagttacaaagtggaaagtggggggccaagattgtcatgagagaggacaggtctgtgcggctgtccatccagtcttcccccaaatgtattgtggggaaattccgcatgtatgttgctgtctggactccctatggcgtacttygaaccagtcgaaacccagaaacagacacgtacattctcttcaatccttggtgtgaagggatttctgacttcatggctgcctctgcctctaggagtcctactcacacttgtgctgctgcaagtgagaaacttgaccgtcaccttcaatttcaatgttggcaacaacaacaaaagcagccacacacaacayctgtgaatgcccagaccttaactgcagtttgggatggaggtggtgctcagcttttatataaagggggaagcaagtatgatgctgtgtatctggacaatgagaaagaaagagaagagtwtgtcctgaatgacatcggggtaattttttatggagaggtcaatgacatcaagaccagaagctggagctatggtcagtttgaagatggcatcctggacacttgcctgtatgtgatggacagagcacaaatggacctctctggaakagggaatcccatcaaagtcagccgtgtggggtctgcaatgggctttctcacttacgaagtgggtattgattctttgcaggatcctgtgtgcctggtcatagaggctagaaatcccattcgcaggttgcaaatgccagagcagcggtataggtggcatgtggactctccagaagaaatagcacatagatctcagttcatccccaggatctggcagcaactatgggcagagaatttcccccaaggagatgcagctgcttctgcaaaggctgccgytactgcagataaaggctcgttattcactgtgacacacctacatgtaccacctccatccatatttgctccagtgaatgccaaagatgacgaaggtgtcctcgttggatcctgggacaatatctrtgcctatggcgtccccccatcggcctggactggaagsgttgacattctattggaataccggagctctgagaatccagtccggtatggccaatgctgggtttttgctggtgtctttaacacatttttacratgccttggaataccmgcaagaattgttaccaattatttctctgcccatgataatgatgccaatttgcaaatggacatcttccyggaagaagatgggaacgtgaattccaaactcaccaaggattcagtgtgcaaggatctcaggagctattggcctcatacttacctccctccacaggctctggtcaaacacacccacctcaacctgtcttccccgctcctggttggtttgtggctggggcccctctcctctccaagtcccaatggtccacagtttgtgatgaatcagtttgtccagttaggtctcagtgactcagggtgtcctcttctccatgactcagccaaatcccagcctgccgaaaccagaaatcagccagcagggaggctcagaggaaaagtacaagagggtgtgagaggtgtattctgctcgccacactccagagccaggagtgacaagtttggctctgtctcttgctgtgacccttctcgccttactactgcagaccatcaaggacagactgcttcctggtttgccaccgtaggtcccctgcatgaaggatgtttccttccaagagggagcctcacctcaggggggctacagttttgcacagagcggccccactgttgacgccaacagaggccatggtctgagctccttagctgttcaggagagggmtggggactcaggaacctcagaagggcagagcagggcagag

SEQ ID NO: 4164 - DNA, 2610 bp, Homo sapiens
akgccacgagcacgggcgcgtgckyaagtcagcgcgcgcccgctccgacgcsaggaggccccgccctccagccccgccccgctcgctggcctgccctcctcttgctaccytcccggcgcagagaaccccggctgctcagcgcgctccgcggtcatggagatccccgggagcytgtgcaagaaagtcaarctgagcaataacgcgcagaactggggaatgcagagagcaaccaatgtcacctaccaagcccatcatgtcagcaggaacaaragaggtcaggtggtggggaccagaggtggctttcgtggttgcacagtttggctaacaggcttgtctggagcgggaaagactactgtgagcatggccttggaggagtacctggtttgtcatggtattccrtgctacactctggatggtgacaatattcgtcaaggtctcaataaaaatcttggctttagtcctgaagacagagaagagaatgttcgacgcatcgcagaagttgctaaactgtttgcagatgctggcttagtgtgcatcacaagtttcatatcaccttacactcaggatcgcaacaatgcaaggcaaattcatgaaggtgcaagtttaccgttttttgaagtatttgttgatgctcctctgcatgtttgtgaacagagggatgtcaaaggactctacaaaaaagcccgggcaggagaaattaaaggtttcactgggatcgattctgaatatgaaaagccagaggcccctgagttggtgctgaaaacagactcctgtgatgtaaatgactgtgtccagcaagttgtggaacttctacaggaacgggatatygtacctgtggatgcatcttatgaagtaaaagaactatatgtgccagaaaataaacttcatttggcaaaaacagatgcggaaacattaccagcactgaaaattaataaagtggatatgcagtgggtgcaggttttggcagaaggttgggcaaccccattgaatggctttatgagagagagggagtacttgcagtgccttcattttgattgtcttctggatggaggtgtcattaacttgtcagtacctatagttctgactgcgactcatgaagataaagagaggctggayggctgtacagcatttgctctgatgtatgagggccgccgtgtggccattcttcgcaatccagagttttttgagcacaggaaagaggagcgctgtgccagacrgtggggaacgacatgcaagaaccacccctatattaagatggtgatggaacaaggagattggctgattggaggagatcttcaagtcttggatcgagtttattggaatgatggtcttgatcagtatcgtcttactcctactgagctaaagcagaaatttaaagatatgaatgctgatgctgtctttgcatttcaactrcgcaacccagtgcacaatggacatgccctgttaatgcaggatacccataagcaacttctagagaggggctaccggcgccctgtcctcctcctccaccctctgggtggctggacaaaggatgacgatgttcctttgatgtggcgtatgaagcagcatgctgcagtgttggaggaaggagttctgaatcctgagacgacagtggtggccatcttcccatctcccatgatgtatgctggaccaactgaggtccagtggcattgcagagcacggatggttgcaggagccaacttttacattgttggacgagaccctgctggcatgcctcatccagaaacagggaaggatctttatgagccaagtcatggtgccaaagtgctgacgatggcccctggtttaatcactttggaaatagttccctttcgagttgcagcttacaacaagaaaaagaagcgtatggactactatgactctgaacaccatgaagactttgaatttatttcaggaacacgaatgcgcaaacttgctcgagaaggccagaaaccacctgaaggtttcatggctcccaaggcttggaccgtgctgacagaatactacaaatccttggagaaagcttaggctgttaacccagtcactccacctttgacacattactagtaacaagaggggaccacatagtctctgttgrcatttctttgtggtgtctgtctggacatgcttcctaaaaacagaccattttccttaacttgcatcagttttggtctgccttatgagttctgttttgaacaagtgtaacacactgatggttttaatgtatcttttccacttattatagttatattcctacaatacaattttaaaattgtctttttatattatatttatgcttctgtgtcatgattttttcaagctgytatattagttgtaaccagtagtattcacattaaatcttgcttttttyccccttaaaaaaagaaaaaaattaccaaacaataaacttggctagaccttgttttgaggattttacaagacctttgtagcgattagattttttttctacattgaaaatagaaactgcttcctttcttctttccagtcagctattggtctttccagctgttataatctaaagtattcttatgatctgtgtaagctctgaatgaacttctttactcaataaaattaattttttggcttctt

SEQ ID NO: 4165 - DNA, 965 bp, Homo sapiens
ccgcgcaggtcccgactccagccgcacctcctccggctctgcagtggcggcgaggaggcgagccggagcgacggcggggctggggccggagccgagccggggtcgggcagcagcagggaccccccagaggcggggcctgtgggaccgctatgggcgtggagatcgagaccatctcccccggagacggaaggacattccccaagaagggccaaacgtgtgtggtgcactacacaggaatgctccaaaatgggaagaagtttgattcatccagagacagaaacaaacctttcaagttcagaattggcaaacaggaagtcatcaaaggttttgaagagggtgcagcccagatgagcttggggcagagggcgaagctgacctgcacccctgatgtggcatatggagccacgggccaccccggtgtcatccctcccaatgccaccctcatctttgacgtggagctgctcaacttagagtgaaggcaggaaggaactcaaggtggctggagatggctgctgctcaccctcctagcctgctctgccactgggacggctcctgcttttggggctcttgatcagtgtgctaacctcactgcctcatggcatyatccattctctctgcccaagttgctctgtatgtgttcgtcagtgttcatgcgaattcttgcttgaggaaacttcggttgcagattgaagcatttcaggttgtgcattttgtgtgatgcatgtagtagcctttcctgatracagaacacagatctcttgttcgcacaatctacactgccttaccttcacttaaaccacacayacaaggtgctcagacatgaaatgtacatggcgtaccgtacacagagggacttgagccagttacctttgctgtcactttctctcttataaattctgttagctgctcacttaaacaatgtcctctttgagaaaatgtaaaataaaggctctgtgcttgacaaa

SEQ ID NO: 4166 - DNA, 1010 bp, Homo sapiens
ccgcgcaggtcccgactccagccgcacctcctccggctctgcagtggcggcgaggaggcgagccggagcgacggcggggctggggccggagccgagccggggtcgggcagcagcagggaccccccagaggcggggcctgtgggaccgctatgggcgtggagatcgagaccatctcccccggagacggaaggacattccccaagaagggccaaacgtgtgtggtgcactacacaggaatgctccaaaatgggaagaagtttgattcatccagagacagaaacaaacctttcaagttcagaattggcaaacaggaagtcatcaaaggttttgaagagggtgcagcccagctgggtcctctttctcctctccccatctgcccccatccctgctagatgagcttggggcagagggcgaagctgacctgcacccctgatgtggcatatggagccacgggccaccccggtgtcatccctcccaatgccaccctcatctttgacgtggagctgctcaacttagagtgaaggcaggaaggaactcaaggtggctggagatggctgctgctcaccctcctagcctgctctgccactgggacggctcctgcttttggggctcttgatcagtgtgctaacctcactgcctcatggcatyatccattctctctgcccaagttgctctgtatgtgttcgtcagtgttcatgcgaattcttgcttgaggaaacttcggttgcagattgaagcatttcaggttgtgcattttgtgtgatgcatgtagtagcctttcctgatracagaacacagatctcttgttcgcacaatctacactgccttaccttcacttaaaccacacayacaaggtgctcagacatgaaatgtacatggcgtaccgtacacagagggacttgagccagttacctttgctgtcactttctctcttataaattctgttagctgctcacttaaacaatgtcctctttgagaaaatgtaaaataaaggctctgtgcttgacaaa

SEQ ID NO: 4167 - DNA, 1044 bp, Homo sapiens
gacgagggtgtcggcatgagggggtggagcaaggagcgcgtggcgcggtgcgcagtgggtggctccacctcgactgcgaattactgtttatgaggaggatgctggtggtggaggtggcgaacggccgctccctggtgtggggagccgaggcggccaggcccctggactggcgtgtccagtctaaagactggccccacgccggccgccctgcccacgagctgcgctacagtatctacagagacctgtgggagcgaggcttcttcctcagtgcggctggcaagttcggaggtgacttcctggtctatcctggtgaccccctccgcttccacgcccattatatcgctcagtgctgggccccygaggacaccatmccactccaagacctggttgctgctgggcgccttggaaccagcgtcagaaagaccctgctcctctgttctccgcagcctgatggtaaggtggtctacacctccctgcaatgggccagcctgcagtgaactccagagacctaggggatgtggctgtrtcggcagcaagagcctttctggatgttccccagctcttctctgggagtctagaacatcctcctacctttctccgcggttagtttttgattccaggttttcgaacactacatcttttttatgttcttccttgtttcaaagcacttattggctgtgtttttgtagttacctattttcacactgtgagcttcccgagaatggggcctgggtttgattcmtctgttttctacagggtttaagtctcaggaggtctcaataaacttggtatataaatgttcatgatttgaatgtttgcgacagtcctggaacccgtggatggtctcatctgcatgtacaggtgagaaaaaggcctggaggrgggggactgacttgcccaaagtcacacacttagtaaatagcaggcctggcctttcaaaattggtttttctgactcctaaatctgcactctttctacctcactaaacttcctyttgaaaagatttctatgaaatttcccagatgcatacaaacgttataaata

SEQ ID NO: 4168 - DNA, 2305 bp, Homo sapiens
ttgggtacaagtgacgctaggatgataggcggagtcaacaggttcgccagayacccatgagtatttacaagggggcggggcgaaagcgacttgccctcaaaggggcggaaccccgagggccggcgtgcgcctacgggaccgggccaggrtgacgatcctcaagttcccaagtagaggagaggaagcggcagagggaggaggatgctggtggtggaggtggcgaacggccgctccctggtgtggggagccgaggcggtgcargccctccgggagcgcctgggtgtggggggccgcacggtaggcgccctgccccgcgggccccgccagaactcgcgcctgggcctcccgctgctgctgatgcccgaagaggcgcggctcttggccgagatcggcgccgtgactctggtcagcgccccgcgtccagactctcggcaccacagcctggccctgacatccttcaagcgccagcaagaggagagcttccaggagcagagcgccttggcagctgaggcccgggagacccgtcgtcaggagctcctggagaagattacggagggccaggctgctaagaagcagaaactagaacaggcttcaggggccagctcaagccaggaggccggctcgagccaggctgccaaagaggatgagaccagtgatggccaggcttcgggagagcaggaggaagctggcccctcgtcttcccaagcaggaccctcaaatggggtagcccccttgcccagatctgctctccttgtccagctggccactgccaggcctcgaccggtcaaggccaggcccctggactggcgtgtccagtctaaagactggccccacgccggccgccctgcccacgagctgcgctacagtatctacagagacctgtgggagcgaggcttcttcctcagtgcggctggcaagttcggaggtgacttcctggtctatcctggtgaccccctccgcttccacgcccattatatcgctcagtgctgggccccygaggacaccatmccactccaagacctggttgctgctgggcgccttggaaccagcgtcagaaagaccctgctcctctgttctccgcagcctgatggtaaggtggtctacacctccctgcaatgggccagcctgcagtgaactccagagacctaggggatgtggctgtrtcggcagcaagagcctttctggatgttccccagctcttctctgggagtctagaacatcctcctacctttctccgcggttagtttttgattccaggttttcgaacactacatcttttttatgttcttccttgtttcaaagcacttattggctgtgtttttgtagttacctattttcacactgtgagcttcccgagaatggggcctgggtttgattcmtctgttttctacagggtttaagtctcaggaggtctcaataaacttggtatataaatgttcatgatttgaatgtttgcgacagtcctggaacccgtggatggtctcatctgcatgtacaggtgagaaaaaggcctggaggrgggggactgacttgcccaaagtcacacacttagtaaatagcaggcctggcctttcaaaattggtttttctgactcctaaatctgcactctttctacctcactaaacttcctyttgaaaagatttctatgaaatttcccagatgcatacaaacgttataaataaaaatataggctgggcacgatgacccacacctgtaatcccacagaacttttggaggccaaggcagggggatcgcttgagcccaggagtttgagaccagctctggcaacattgtaatacccagtctctacaaaaaataatttaaaaaaaaattagccagggatcccttgagcctgggaagttgaggctgctgtgagctgtgattgcaccactgccctccagcctgggagacagagcaagaacctgtctcaaaaaatatatatatgtgtrtgtgtatatatgtaaatatacacacatgtatgtatatatatgtgtgtgtatatatatatatattatgaaaggaaatgagtattgtaattttaggagttcagagcctggggagaaaggaaggactctggaaggcgttctgctttttcatggcctgggtagtggtgragaatttttttgatactgtatatttatattttagactcttttttggatgtgttatattctgcaatttttataaaagctaaaacacatgtatttgtaaaaaatttgcacttatgaaatcatttacccatgtttttgcttaagaaagtactagaacactaccactattccaataattacacctttatcttatc

SEQ ID NO: 4169 - DNA, 1681 bp, Homo sapiens
ttgggtacaagtgacgctaggatgataggcggagtcaacaggttcgccagayacccatgagtatttacaagggggcggggcgaaagcgacttgccctcaaaggggcggaaccccgagggccggcgtgcgcctacgggaccgggccaggrtgacgatcctcaagttcccaagtagaggagaggaagcggcagagggaggaggatgctggtggtggaggtggcgaacggccgctccctggtgtggggagccgaggcggtgcargccctccgggagcgcctgggtgtggggggccgcacggtaggcgccctgccccgcgggccccgccagaactcgcgcctgggcctcccgctgctgctgatgcccgaagaggcgcggctcttggccgagatcggcgccgtgactctggtcagcgccccgcgtccagactctcggcaccacagcctggccctgacatccttcaagcgccagcaagaggagagcttccaggagcagagcgccttggcagctgaggcccgggagacccgtcgtcaggagctcctggagaagattacggagggccaggctgctaagaagcagaaactagaacaggcttcaggggccagctcaagccaggaggccggctcgagccaggctgccaaagaggatgagaccagtgatggccaggcttcgggagagcaggaggaagctggcccctcgtcttcccaagcaggaccctcaaatggggtagcccccttgcccagatctgctctccttgtccagctggccactgccaggcctcgaccggtcaaggccaggcccctggactggcgtgtccagtctaaagactggccccacgccggccgccctgcccacgagctgcgctacagtatctacagagacctgtgggagcgaggcttcttcctcagtgcggctggcaagttcggaggtgacttcctggtctatcctggtgaccccctccgcttccacgcccattatatcgctcagtgctgggccccygaggacaccatmccactccaagacctggttgctgctgggcgccttggaaccagcgtcagaaagaccctgctcctctgttctccgcagcctgatggtaaggtggtctacacctccctgcaatgggccagcctgcagtgaactccagagacctaggggatgtggctgtrtcggcagcaagagcctttctggatgttccccagctcttctctgggagtctagaacatcctcctacctttctccgcggttagtttttgattccaggttttcgaacactacatcttttttatgttcttccttgtttcaaagcacttattggctgtgtttttgtagttacctattttcacactgtgagcttcccgagaatggggcctgggtttgattcmtctgttttctacagggtttaagtctcaggaggtctcaataaacttggtatataaatgttcatgatttgaatgtttgcgacagtcctggaacccgtggatggtctcatctgcatgtacaggtgagaaaaaggcctggaggrgggggactgacttgcccaaagtcacacacttagtaaatagcaggcctggcctttcaaaattggtttttctgactcctaaatctgcactctttctacctcactaaacttcctyttgaaaagatttctatgaaatttcccagatgcatacaaacgttataaata

SEQ ID NO: 4170 - DNA, 1774 bp, Homo sapiens
cgaacttcctgtgctcgggagggggcagggttttgtactgtgggagtctgagagcgaggaggtccgaaagccgaatcacagtcgttcggaaagaggaggagcgaaggctcgagcgtccggaagagggtgtggcctcggcggtgccttagcctccagagcttctgaccgctgacgggaacacccgaagggggacgcccactttgcaagagggtggtgccaaaatggacctttgtaagggggcgtgtcgccgcgcttgcggaggtttgtttttcacgctccaaggcgcaatggaggatgctggtggtggaggtggcgaacggccgctccctggtgtggggagccgaggcggtgcargccctccgggagcgcctgggtgtggggggccgcacggtaggcgccctgccccgcgggccccgccagaactcgcgcctgggcctcccgctgctgctgatgcccgaagaggcgcggctcttggccgagatcggcgccgtgactctggtcagcgccccgcgtccagactctcggcaccacagcctggccctgacatccttcaagcgccagcaagaggagagcttccaggagcagagcgccttggcagctgaggcccgggagacccgtcgtcaggagctcctggagaagattacggagggccaggctgctaagaagcagaaactagaacaggcttcaggggccagctcaagccaggaggccggctcgagccaggctgccaaagaggatgagaccagtgatggccaggcttcgggagagcaggaggaagctggcccctcgtcttcccaagcaggaccctcaaatggggtagcccccttgcccagatctgctctccttgtccagctggccactgccaggcctcgaccggtcaaggccaggcccctggactggcgtgtccagtctaaagactggccccacgccggccgccctgcccacgagctgcgctacagtatctacagagacctgtgggagcgaggcttcttcctcagtgcggctggcaagttcggaggtgacttcctggtctatcctggtgaccccctccgcttccacgcccattatatcgctcagtgctgggccccygaggacaccatmccactccaagacctggttgctgctgggcgccttggaaccagcgtcagaaagaccctgctcctctgttctccgcagcctgatggtaaggtggtctacacctccctgcaatgggccagcctgcagtgaactccagagacctaggggatgtggctgtrtcggcagcaagagcctttctggatgttccccagctcttctctgggagtctagaacatcctcctacctttctccgcggttagtttttgattccaggttttcgaacactacatcttttttatgttcttccttgtttcaaagcacttattggctgtgtttttgtagttacctattttcacactgtgagcttcccgagaatggggcctgggtttgattcmtctgttttctacagggtttaagtctcaggaggtctcaataaacttggtatataaatgttcatgatttgaatgtttgcgacagtcctggaacccgtggatggtctcatctgcatgtacaggtgagaaaaaggcctggaggrgggggactgacttgcccaaagtcacacacttagtaaatagcaggcctggcctttcaaaattggtttttctgactcctaaatctgcactctttctacctcactaaacttcctyttgaaaagatttctatgaaatttcccagatgcatacaaacgttataaata

SEQ ID NO: 4171 - DNA, 1578 bp, Homo sapiens
gacgagggtgtcggcatgagggggtggagcaaggagcgcgtggcgcggtgcgcagtgggtggctccacctcgactgcgaattactgtttatgaggaggatgctggtggtggaggtggcgaacggccgctccctggtgtggggagccgaggcggtgcargccctccgggagcgcctgggtgtggggggccgcacggtaggcgccctgccccgcgggccccgccagaactcgcgcctgggcctcccgctgctgctgatgcccgaagaggcgcggctcttggccgagatcggcgccgtgactctggtcagcgccccgcgtccagactctcggcaccacagcctggccctgacatccttcaagcgccagcaagaggagagcttccaggagcagagcgccttggcagctgaggcccgggagacccgtcgtcaggagctcctggagaagattacggagggccaggctgctaagaagcagaaactagaacaggcttcaggggccagctcaagccaggaggccggctcgagccaggctgccaaagaggatgagaccagtgatggccaggcttcgggagagcaggaggaagctggcccctcgtcttcccaagcaggaccctcaaatggggtagcccccttgcccagatctgctctccttgtccagctggccactgccaggcctcgaccggtcaaggccaggcccctggactggcgtgtccagtctaaagactggccccacgccggccgccctgcccacgagctgcgctacagtatctacagagacctgtgggagcgaggcttcttcctcagtgcggctggcaagttcggaggtgacttcctggtctatcctggtgaccccctccgcttccacgcccattatatcgctcagtgctgggccccygaggacaccatmccactccaagacctggttgctgctgggcgccttggaaccagcgtcagaaagaccctgctcctctgttctccgcagcctgatggtaaggtggtctacacctccctgcaatgggccagcctgcagtgaactccagagacctaggggatgtggctgtrtcggcagcaagagcctttctggatgttccccagctcttctctgggagtctagaacatcctcctacctttctccgcggttagtttttgattccaggttttcgaacactacatcttttttatgttcttccttgtttcaaagcacttattggctgtgtttttgtagttacctattttcacactgtgagcttcccgagaatggggcctgggtttgattcmtctgttttctacagggtttaagtctcaggaggtctcaataaacttggtatataaatgttcatgatttgaatgtttgcgacagtcctggaacccgtggatggtctcatctgcatgtacaggtgagaaaaaggcctggaggrgggggactgacttgcccaaagtcacacacttagtaaatagcaggcctggcctttcaaaattggtttttctgactcctaaatctgcactctttctacctcactaaacttcctyttgaaaagatttctatgaaatttcccagatgcatacaaacgttataaata

SEQ ID NO: 4172 - DNA, 1669 bp, Homo sapiens
gatgacgaagttgacgagggtgtcggcatgagggggtggagcaaggagcgcgtggcgcggtgcgcagtgggtggctccacctcgactgcgaattactgtttatgaggtgactcgctggttctatcggtggacagtgggacattctgaagggaggcaaggaggcggactgagcgctcccaattggggaggatgctggtggtggaggtggcgaacggccgctccctggtgtggggagccgaggcggtgcargccctccgggagcgcctgggtgtggggggccgcacggtaggcgccctgccccgcgggccccgccagaactcgcgcctgggcctcccgctgctgctgatgcccgaagaggcgcggctcttggccgagatcggcgccgtgactctggtcagcgccccgcgtccagactctcggcaccacagcctggccctgacatccttcaagcgccagcaagaggagagcttccaggagcagagcgccttggcagctgaggcccgggagacccgtcgtcaggagctcctggagaagattacggagggccaggctgctaagaagcagaaactagaacaggcttcaggggccagctcaagccaggaggccggctcgagccaggctgccaaagaggatgagaccagtgatggccaggcttcgggagagcaggaggaagctggcccctcgtcttcccaagcaggaccctcaaatggggtagcccccttgcccagatctgctctccttgtccagctggccactgccaggcctcgaccggtcaaggccaggcccctggactggcgtgtccagtctaaagactggccccacgccggccgccctgcccacgagctgcgctacagtatctacagagacctgtgggagcgaggcttcttcctcagtgcggctggcaagttcggaggtgacttcctggtctatcctggtgaccccctccgcttccacgcccattatatcgctcagtgctgggccccygaggacaccatmccactccaagacctggttgctgctgggcgccttggaaccagcgtcagaaagaccctgctcctctgttctccgcagcctgatggtaaggtggtctacacctccctgcaatgggccagcctgcagtgaactccagagacctaggggatgtggctgtrtcggcagcaagagcctttctggatgttccccagctcttctctgggagtctagaacatcctcctacctttctccgcggttagtttttgattccaggttttcgaacactacatcttttttatgttcttccttgtttcaaagcacttattggctgtgtttttgtagttacctattttcacactgtgagcttcccgagaatggggcctgggtttgattcmtctgttttctacagggtttaagtctcaggaggtctcaataaacttggtatataaatgttcatgatttgaatgtttgcgacagtcctggaacccgtggatggtctcatctgcatgtacaggtgagaaaaaggcctggaggrgggggactgacttgcccaaagtcacacacttagtaaatagcaggcctggcctttcaaaattggtttttctgactcctaaatctgcactctttctacctcactaaacttcctyttgaaaagatttctatgaaatttcccagatgcatacaaacgttataaata

SEQ ID NO: 4173 - DNA, 2789 bp, Homo sapiens
agctgtagccctcgttgtgcaggaacaggacgcccagatgcgcgtccggcagctcgctcgggactaggaccgccccgtacatgtcccggtgccctcggggctcgaacatgagccgtcgccgcacgtggtcaaggtgctggcgcatgtagcgccgcttggccagcagggtgggcccagacrcctccggacaccccgccagcacgatacgcaagggytcgccgcccgtgtgcatgtccaccaccgacagcaccggcgtccctggatcatgcgggggcagccggggcaccgccagcgcgctctccatggtctgcgtcgggggagacgagtacggtcccgcagctatggcttcaagcccgaccctyacccactgactccgcgggaggagggcgggacgctaaccwgccacgtccggggggcggggtctcggagcctaaacccggaagcgagggaggaacttcggagctgtcgcccgggttaccgggaggcggagccgccgagctcgctgtggcccggatgttcggtgcagctgccagatccgctgatctagygcttctcgaaaaaaaccttcaggcggcccatggctgtcgatattcaaccagcatgccttggactttattgtgggaagaccctattatttaaaaatggctcaactgaaatatatggagaatgtggggtatgcccaagaggacagagaacgaatgcacagaaatattgtcagccttgcacagaatctcctgaactttatgattggctctatcttggatttatggcartgcttcctctggttttacattggttcttcattgaatggtactcggggaaaaagagttccagcgcacttttccaacacatcactgcattatttgaatgcagcatggcagctattatcaccttacttgtgagtgatccagttggtgttctttatattcgttcatgtcgagtattgatgctttctgactggtacacgatgctttacaacccaagtccagattacgttaccacagtacactgtactcatgaagccgtctacccactatataccattgtatttatctattacgcattctgcttggtattaatgatgctgctccgacctcttctggtgaagaagattgcatgtgggttagggaaatctgatcgatttaaaagtatttatgctgcactttacttcttcccaattttaaccgtgcttcaggcagttggtggaggccttttatattacgccttcccatacattatattagtgttatctttggttactctggctgtgtacatgtctgcttctgaaatagagaactgctatgatcttctggtcagaaagaaaagacttattgttctcttcagccactggttacttcatgcctatggaataatctccatttccagagtggataaacttgagcaagatttgccccttttggctttggtacctacaccagcccttttttacttgttcactgcaaaatttaccgaaccttcaaggatactctcagaaggagccaatggacactgagtgtagacatgtgaaatgccaaaaacctgagaagtgctcctaataaaaaagtaaatcaatcttaacagtgtatgagaactattctatcatatatgggaacaagattgtcagtatatcttaatgtttgggtttgtctttgttttgtttatggytagacttacagacttggaaaatgcaaaactctgtaatactctgttacacagggtaatattatctgctacactggaaggccgctaggaagcccttgcktctctcaacagttcakctgttctttagggcaaaatcatgtttctgtgtacctagcaatgtgttcccattttattaagaaaagctttaacacgtgtaatctgcagtccttaacagtggcgtaattgtacktacctgttgtgtttcagtttgtttttcacctataatgaattgtaaaaacaaacatacttgtggggtctgatagcaaacatagaaatgatgtatattgttttttgttatctatttattttcatcaatacagtattttgatgtattgcaaaaatagataataatttatataacaggttttctgtttatagattggttcaagatttgtttggattattgttcctgtaaagaaaacaataataaaaagcttacctacataaaatttcaatgttttgacacttaattgttgtttggcacaatagtatggaagtaattcaaactggtaaatagtttcctctcatatctcgggtatatatacataccatattttattgatccagagatacttatttcactttgtgacatctctgaattaggatgcatcttacaactgatggcttattaggtttaatgaaatacagaagatacacagaataaaaagggttttcctgtggttggtttgtggtttgtgataggtgttctgtgatgtttatgctttgaaggccttaagactcatggttgcaaccatggaagcaaaatgaaatttttagctcttaacctaacaacctgaccatgtttatccatttttattgtttagaagtttatttactgatacttggtggaggttgtgtgaattagttaaattttaaatgtttaagacttctattaacagctgcaaaatatgaaagtaagtgcactcacttttcctgtagtagtctgtcttttgaattcacagcagttgtatccttgagttactttgttaatgtatttttctcagtacatttaaccactgggaaatgaacccttgtacgaatgtgtttcttcttctctgtaggaataaaaaataaatataaaaatttta

SEQ ID NO: 4174 - DNA, 2158 bp, Homo sapiens
acacagggtttcctcatgttgcccaggctggtctcggacacttgaattcaagcaatctgccggccccgccgggtgtgscgcatgagggcgcgggccgcccaaggaccgcgagtggggccgcgagtgctgagcccggcgcgcccgagccgctcctcctcccggcctgctccctgggcggagccggggcagtgcggctctgggctggccgaaggggtggcgctgcgatcccgcagggcagcgacgcgactctggtgcgggccgtcttcttccccccgagctgggcgtgcgcggccgcaatgaactgggagctgctgctgtggctgctggtgctgtgcgcgctgctcctgctcttggtgcagctgctgcgcttcctgagggctgacggcgacctgacgctactatgggccgagtggcagggacgacgcccagaatgggagctgactgatatggtggtgtgggtgactggagcctcgagtggaattggtgaggagctggcttaccagttgtctaaactaggagtttctcttgtgctgtcagccagaagrgtgcatgagctggaaagggtgaaaagaagatgcctagagaatggcaatttaaaagaaaaagatatacttgttttgcccyttgacctgaccgacactggttcccatgaagyggctaccaaagctgttctccaggagtttggtagaatcgacattctggtcaacaatggtggaatgtcccagcgttctctgtgcatggataccagcttkgatgtctacagaaagctaatagakcttaactacttagggacggtgtccttgacaaaatgtgttctgcctcacatgatcgagaggaagcaaggaaagattgttactgtgaatagcatcctgggtatcatatctgtacctctttccattggatactgtgctagcaagcatgctctccggggtttttttaatggccttcraacagaacttgccacatacccaggtataatagtttctaacatttgcccaggacctgtgcaatcaaatattgtggagaattccctagctggagaagtcacaaagactataggcaataatggagaccagtcccacaaratgacaaccagtcgttgtgtgcggctgatgttaatcagcatggccaatgatttgaaagaagtttggatctcagaacaacctttcttgttagtaacatatttgtggcaatacatgccaacctgggcctggtggataaccaacaagatggggaagaaaaggattgagaactttaagagtggtgtggatgcagactcttcttattttaaaatctttaagacaaaacatgactgaaaagagcayctgtacttttcaagccactggagggaraaatggaaaacatgaaaacagcaatcttcttatgcttctgaataatcaaagactaatttgtgrttttactttttaatagatatgactttgcttccaacatggaatgaaataaaaaatwartaataaaagattgccatgaatcttgcaaaaaaggtattaactcatactatattcttggataaaataaccttttaaaatactttagcacatatgcttaaaatctaagttaacagatttgtcttagtccatttgtgytgctataacaaaataccacagatttggtaatttataaacaacagaaatctgtttttcctggctcttgaggctgggaattccaagaccaatgcaccagcagaattagtgtctggtgaaggctgatctctgcttccaagatggcacctcattgctgcatcctccacagtggaggaatgtatgtcctcacatggtggaagggacagaagggaaagaggagcaaaatgctttcaaaagagcatttaatctcattcattactcagtcacctcttaaaggccacatcctttaatactgttgctttggggattaagtttcgacatgaattttggaggggacaaaaacatccaaaccatagcaacataaatgtatagaatatttcacacaaagcagagtgctgggtaatgaccagatataaagaagtatttgaaatgaccttacctccaagatgcttatactcttagaaaagttgacaggtacagatggctgtaatttgaagcagcaggtaggattcattgcacctattattcattaaacacctgttgtatgtcttcta

SEQ ID NO: 4175 - DNA, 2078 bp, Homo sapiens
gcaatccaagactgcttagggttcggaattacaaaamcaaattccctgctaaggctaaagttgatctgaacaaaagtaagggcaaggcaaagagaatagacattagacagggacctgaaaggatccagaaatgggactttacatcccacagaggaaacagacacagggtttcctcatgttgcccaggctggtctcggacacttgaattcaagcaatctgccggccccgccgggtgtgscgcatgagggcgcgggccgcccaaggaccgcgagtggggccgcgagtgctgagcccggcgcgcccgagccgctcctcctcccggcctgctccctgggcggagccggggcagtgcggctctgggctggccgaaggggtggcgctgcgatcccgcagggcagcgacgcgactctggtgcgggccgtcttcttccccccgagctgggcgtgcgcggccgcaatgaactgggagctgctgctgtggctgctggtgctgtgcgcgctgctcctgctcttggtgcagctgctgcgcttcctgagggctgacggcgacctgacgctactatgggccgagtggcagggacgacgcccagaatgggagctgactgatatggtggtgtgggtgactggagcctcgagtggaattggtgaggagctggcttaccagttgtctaaactaggagtttctcttgtgctgtcagccagaagrgtgcatgagctggaaagggtgaaaagaagatgcctagagaatggcaatttaaaagaaaaagatatacttgttttgcccyttgacctgaccgacactggttcccatgaagyggctaccaaagctgttctccaggagtttggtagaggtttttttaatggccttcraacagaacttgccacatacccaggtataatagtttctaacatttgcccaggacctgtgcaatcaaatattgtggagaattccctagctggagaagtcacaaagactataggcaataatggagaccagtcccacaaratgacaaccagtcgttgtgtgcggctgatgttaatcagcatggccaatgatttgaaagaagtttggatctcagaacaacctttcttgttagtaacatatttgtggcaatacatgccaacctgggcctggtggataaccaacaagatggggaagaaaaggattgagaactttaagagtggtgtggatgcagactcttcttattttaaaatctttaagacaaaacatgactgaaaagagcayctgtacttttcaagccactggagggaraaatggaaaacatgaaaacagcaatcttcttatgcttctgaataatcaaagactaatttgtgrttttactttttaatagatatgactttgcttccaacatggaatgaaataaaaaatwartaataaaagattgccatgaatcttgcaaaaaaggtattaactcatactatattcttggataaaataaccttttaaaatactttagcacatatgcttaaaatctaagttaacagatttgtcttagtccatttgtgytgctataacaaaataccacagatttggtaatttataaacaacagaaatctgtttttcctggctcttgaggctgggaattccaagaccaatgcaccagcagaattagtgtctggtgaaggctgatctctgcttccaagatggcacctcattgctgcatcctccacagtggaggaatgtatgtcctcacatggtggaagggacagaagggaaagaggagcaaaatgctttcaaaagagcatttaatctcattcattactcagtcacctcttaaaggccacatcctttaatactgttgctttggggattaagtttcgacatgaattttggaggggacaaaaacatccaaaccatagcaacataaatgtatagaatatttcacacaaagcagagtgctgggtaatgaccagatataaagaagtatttgaaatgaccttacctccaagatgcttatactcttagaaaagttgacaggtacagatggctgtaatttgaagcagcaggtaggattcattgcacctattattcattaaacacctgttgtatgtcttcta

SEQ ID NO: 4176 - DNA, 2318 bp, Homo sapiens
gcaatccaagactgcttagggttcggaattacaaaamcaaattccctgctaaggctaaagttgatctgaacaaaagtaagggcaaggcaaagagaatagacattagacagggacctgaaaggatccagaaatgggactttacatcccacagaggaaacagacacagggtttcctcatgttgcccaggctggtctcggacacttgaattcaagcaatctgccggccccgccgggtgtgscgcatgagggcgcgggccgcccaaggaccgcgagtggggccgcgagtgctgagcccggcgcgcccgagccgctcctcctcccggcctgctccctgggcggagccggggcagtgcggctctgggctggccgaaggggtggcgctgcgatcccgcagggcagcgacgcgactctggtgcgggccgtcttcttccccccgagctgggcgtgcgcggccgcaatgaactgggagctgctgctgtggctgctggtgctgtgcgcgctgctcctgctcttggtgcagctgctgcgcttcctgagggctgacggcgacctgacgctactatgggccgagtggcagggacgacgcccagaatgggagctgactgatatggtggtgtgggtgactggagcctcgagtggaattggtgaggagctggcttaccagttgtctaaactaggagtttctcttgtgctgtcagccagaagrgtgcatgagctggaaagggtgaaaagaagatgcctagagaatggcaatttaaaagaaaaagatatacttgttttgcccyttgacctgaccgacactggttcccatgaagyggctaccaaagctgttctccaggagtttggtagaatcgacattctggtcaacaatggtggaatgtcccagcgttctctgtgcatggataccagcttkgatgtctacagaaagctaatagakcttaactacttagggacggtgtccttgacaaaatgtgttctgcctcacatgatcgagaggaagcaaggaaagattgttactgtgaatagcatcctgggtatcatatctgtacctctttccattggatactgtgctagcaagcatgctctccggggtttttttaatggccttcraacagaacttgccacatacccaggtataatagtttctaacatttgcccaggacctgtgcaatcaaatattgtggagaattccctagctggagaagtcacaaagactataggcaataatggagaccagtcccacaaratgacaaccagtcgttgtgtgcggctgatgttaatcagcatggccaatgatttgaaagaagtttggatctcagaacaacctttcttgttagtaacatatttgtggcaatacatgccaacctgggcctggtggataaccaacaagatggggaagaaaaggattgagaactttaagagtggtgtggatgcagactcttcttattttaaaatctttaagacaaaacatgactgaaaagagcayctgtacttttcaagccactggagggaraaatggaaaacatgaaaacagcaatcttcttatgcttctgaataatcaaagactaatttgtgrttttactttttaatagatatgactttgcttccaacatggaatgaaataaaaaatwartaataaaagattgccatgaatcttgcaaaaaaggtattaactcatactatattcttggataaaataaccttttaaaatactttagcacatatgcttaaaatctaagttaacagatttgtcttagtccatttgtgytgctataacaaaataccacagatttggtaatttataaacaacagaaatctgtttttcctggctcttgaggctgggaattccaagaccaatgcaccagcagaattagtgtctggtgaaggctgatctctgcttccaagatggcacctcattgctgcatcctccacagtggaggaatgtatgtcctcacatggtggaagggacagaagggaaagaggagcaaaatgctttcaaaagagcatttaatctcattcattactcagtcacctcttaaaggccacatcctttaatactgttgctttggggattaagtttcgacatgaattttggaggggacaaaaacatccaaaccatagcaacataaatgtatagaatatttcacacaaagcagagtgctgggtaatgaccagatataaagaagtatttgaaatgaccttacctccaagatgcttatactcttagaaaagttgacaggtacagatggctgtaatttgaagcagcaggtaggattcattgcacctattattcattaaacacctgttgtatgtcttcta

SEQ ID NO: 4177 - DNA, 1180 bp, Homo sapiens
atgttccggtgtggaggcctggcggcgggtgctttgaagcagaagctggtgcccttggtgcggaccgtgtgcgtccgaagcccgaggcagaggaaccggctcycagctcgagccttgggcacagaagtgattcarctcttccccgagaaaggaaatatgggaaagatcctccccgaatacctcagcaactggaccatggaaaaagtcagacgagagggggttaaggtgatgcccaatgctattgtgcaatccgttggagtcagcagtggcaagttacttatcaagctgaaagacggcaggaaggtagaaactgaccacatagtggcagctgtgggcctggagcccaatgttgagttggccaagackggtggcctggaaatagactcagattttggtggcttccgggtaaatgcagagctacaagcacgctctaacatctgggtggcaggagatgctgcatgcttctacgatataaagttgggaaggaggcgggtagagcaccatgatcacgctgttgtgagtggaagattggctggagaaaatatgactggagctgctaagccgtactggcatcagtcaatgttctggagtgatttgggccccgatgttggctatgaagctattggtcttgtggacagtagtttgcccacagttggtgtttttgcaaaagcaactgcacaagacaaccccaaatctgccacagagcagtcaggaactggtatccgatcagagagtgagacagagtccgaggcctcagaaattactattcctcccagcaccccggcagttccacaggctcccgtccagggggaggactacggcaaaggtgtcatcttctacctcagrgacaaagtggtcgtggggattgtgctatggaacatctttaaccgaatgccaatagcaaggaagatcattaaggacggtgagcagcatgaagatctcaatgaagtagccaaactattcaacattcatgaagactgaagccccacagtggaattggcaaacccactgcagcccctgagaggaggtcgaatgggtaaaggagcatttttttattcagcagactttctctgtgtatgagtgtgaatgatcaagtcctttgtgaatattttcaactatgtaggtaaattcttaatgttcacatagtgaaataaattctgattcttctaaattaaattct

SEQ ID NO: 4178 - DNA, 2235 bp, Homo sapiens
ccggtcgccgttccccttccccggctctagcaggccggcttctctgtccaatgcccacccggagctgggaggaggagtctgcgtaatgtgcgtgtgaagagactgggggagctggccggggctcacggtgtttgacccgtcggtcgtgcgtgagaggaaagggaaggaggaggtcccgaatagcggtcgccgaaatgttccggtgtggaggcctggcggcgggtgctttgaagcagaagctggtgcccttggtgcggaccgtgtgcgtccgaagcccgaggcagaggaaccggctcycaggcaacttgttccagcgatggcatgttcctctagaactccagatgacaagacaaatggctagctctggtgcatcagggggcaaaatcgataattctgtgttagtccttattgtgggcttatcaacagtaggagctggtgcctatgcctacaagactatgaaagaggaygaaaaaagatacaatgaaagaatttcagggttagggctgacaccagaacagaaacagaaaaaggccgcgttatctgcttcaraaggagaggaagttcctcaagacaaggcgccaagtcatgttcctttcctgctaattggtggaggcacagctgcttttgctgcagccagatccatccgggctcgggatcctggggccagggtactgattgtatctgaagatcctgagctgccgtacatgcgacctcctctttcaaaagaactgtggttttcagatgacccaaatgtcacaaagacactgcgattcaaacagtggaatggaaaagagagaagcatatatttccagccaccttctttctatgtctctgctcaggacctgcctcatattgagaatggtggtgtggctgtcctcactgggaagaaggtagtacagctggatgtgagagacaacatggtgaaacttaatgatggctctcaaataacctatgaaaagtgcttgattgcaacaggaggtactccaagaagtctgtctgccattgatagggctggagcagaggtgaagagtagaacaacgcttttcagaaagattggagactttagaagcttggagaagatttcacgggaagtcaaatcaattacgattatyggtgggggcttccttggtagcgaactggcctgtgctcttggcagaaaggctcgagccttgggcacagaagtgattcarctcttccccgagaaaggaaatatgggaaagatcctccccgaatacctcagcaactggaccatggaaaaagtcagacgagagggggttaaggtgatgcccaatgctattgtgcaatccgttggagtcagcagtggcaagttacttatcaagctgaaagacggcaggaaggtagaaactgaccacatagtggcagctgtgggcctggagcccaatgttgagttggccaagackggtggcctggaaatagactcagattttggtggcttccgggtaaatgcagagctacaagcacgctctaacatctgggtggcaggagatgctgcatgcttctacgatataaagttgggaaggaggcgggtagagcaccatgatcacgctgttgtgagtggaagattggctggagaaaatatgactggagctgctaagccgtactggcatcagtcaatgttctggagtgatttgggccccgatgttggctatgaagctattggtcttgtggacagtagtttgcccacagttggtgtttttgcaaaagcaactgcacaagacaaccccaaatctgccacagagcagtcaggaactggtatccgatcagagagtgagacagagtccgaggcctcagaaattactattcctcccagcaccccggcagttccacaggctcccgtccagggggaggactacggcaaaggtgtcatcttctacctcagrgacaaagtggtcgtggggattgtgctatggaacatctttaaccgaatgccaatagcaaggaagatcattaaggacggtgagcagcatgaagatctcaatgaagtagccaaactattcaacattcatgaagactgaagccccacagtggaattggcaaacccactgcagcccctgagaggaggtcgaatgggtaaaggagcatttttttattcagcagactttctctgtgtatgagtgtgaatgatcaagtcctttgtgaatattttcaactatgtaggtaaattcttaatgttcacatagtgaaataaattctgattcttctaaattaaattct

SEQ ID NO: 4179 - DNA, 2202 bp, Homo sapiens
cggctctagcaggccggcttctctgtccaatgcccacccggagctgggaggaggagtctgcgtaatgtgcgtgtgaagagactgggggagctggccggggctcacggtgtttgacccgtcggtcgtgcgtgagaggaaagggaaggaggaggtcccgaatagcggtcgccgaaatgttccggtgtggaggcctggcggcgggtgctttgaagcagaagctggtgcccttggtgcggaccgtgtgcgtccgaagcccgaggcagaggaaccggctcycagttgtgcagtctcatcacctaggatccccttctagatcactagcatctacaggtgcttctgggaaagatggcagcaacctagtgtacttcttaattgtaggagcaacagtcactggggcaggagtttattatgcctacaagactatgaaagaggaygaaaaaagatacaatgaaagaatttcagggttagggctgacaccagaacagaaacagaaaaaggccgcgttatctgcttcaraaggagaggaagttcctcaagacaaggcgccaagtcatgttcctttcctgctaattggtggaggcacagctgcttttgctgcagccagatccatccgggctcgggatcctggggccagggtactgattgtatctgaagatcctgagctgccgtacatgcgacctcctctttcaaaagaactgtggttttcagatgacccaaatgtcacaaagacactgcgattcaaacagtggaatggaaaagagagaagcatatatttccagccaccttctttctatgtctctgctcaggacctgcctcatattgagaatggtggtgtggctgtcctcactgggaagaaggtagtacagctggatgtgagagacaacatggtgaaacttaatgatggctctcaaataacctatgaaaagtgcttgattgcaacaggaggtactccaagaagtctgtctgccattgatagggctggagcagaggtgaagagtagaacaacgcttttcagaaagattggagactttagaagcttggagaagatttcacgggaagtcaaatcaattacgattatyggtgggggcttccttggtagcgaactggcctgtgctcttggcagaaaggctcgagccttgggcacagaagtgattcarctcttccccgagaaaggaaatatgggaaagatcctccccgaatacctcagcaactggaccatggaaaaagtcagacgagagggggttaaggtgatgcccaatgctattgtgcaatccgttggagtcagcagtggcaagttacttatcaagctgaaagacggcaggaaggtagaaactgaccacatagtggcagctgtgggcctggagcccaatgttgagttggccaagackggtggcctggaaatagactcagattttggtggcttccgggtaaatgcagagctacaagcacgctctaacatctgggtggcaggagatgctgcatgcttctacgatataaagttgggaaggaggcgggtagagcaccatgatcacgctgttgtgagtggaagattggctggagaaaatatgactggagctgctaagccgtactggcatcagtcaatgttctggagtgatttgggccccgatgttggctatgaagctattggtcttgtggacagtagtttgcccacagttggtgtttttgcaaaagcaactgcacaagacaaccccaaatctgccacagagcagtcaggaactggtatccgatcagagagtgagacagagtccgaggcctcagaaattactattcctcccagcaccccggcagttccacaggctcccgtccagggggaggactacggcaaaggtgtcatcttctacctcagrgacaaagtggtcgtggggattgtgctatggaacatctttaaccgaatgccaatagcaaggaagatcattaaggacggtgagcagcatgaagatctcaatgaagtagccaaactattcaacattcatgaagactgaagccccacagtggaattggcaaacccactgcagcccctgagaggaggtcgaatgggtaaaggagcatttttttattcagcagactttctctgtgtatgagtgtgaatgatcaagtcctttgtgaatattttcaactatgtaggtaaattcttaatgttcacatagtgaaataaattctgattcttctaaattaaattct

SEQ ID NO: 4180 - DNA, 4417 bp, Homo sapiens
cggccgcaagcgagcccgaggcgcggcggggcgcggggcgtggggacgctagcgggcgcgggaacgggcgcggcgccccgtcacgggcagcgccccgaaccggggccggacacctcggccgctcgggccgcggcggcggggaccatgccgaagaaagtctcctgagcccggcaacttcggcccctccccgcccccacccggctgccctccgcgcggccctccccatgtgcagccggccagccgggctctcctcctcgcggcggatgggtgaccttttcctggcacgggcaggctgtgggaggcagcggagcaggcgatgaagaagaagcagcagcatcccggcggcggcgcggatccctggccccatggggcccctatggggggcgcccctccgggcctgggcagctggaagcgtcgggtgcccctgctgcctttcctgcgcttctccctccgggactacggcttctgcatggccaccctgctggtcttctgcctgggctccctcctctatcagctcagcgggggaccccctcgcttcctgctcgacctgcggcagtacttgggaaattccacttacttggatgaccatggaccacctcctagtaaggtactacctttcccaagccaggtggtgtacaacagggtaggcaagtgtgggagccgtactgtggtcttgcttctgagaatcttgtcggagaagcacggatttaatttggtcacatcagacattcacaacaaaaccaggcttactaaaaatgaacaaatggaactgattaaaaatataagtactgccgaacaaccctatttattcactcgacatgttcatttcctcaacttctcaaggtttggaggagaccagcctgtctacatcaacatcattagagaccccgtcaaccggttcttatccaactattttttccgtcgctttggagactggagaggggaacaaaatcacatgatccgcacccccagcatgaggcaggaggagcgctacctggatatcaatgagtgtattcttgaaaactatcccgagtgctccaaccccaggttattttacatcattccgtacttttgtggacagcatcccagatgcagggagcctggtgaatgggcccttgagagagcaaagctgaacgtgaatgaaaacttcctgctcgtggggattcttgaagagttggaagatgtgctgctgttactggaaagatttttacctcattacttcaagggcgtgctcagtatctacaaagacccagagcacaggaagcttggaaacatgactgtgacggtgaagaagactgtcccctctcctgaggctgtgcagatcctctaccagcggatgagatacgagtacgagttttaccactacgtcaaagagcagttccacctgctgaagcrcaagtttggacttaagtctcacgtcagcaagccycccctgaggccacacttctttatcccaactccactggaaaccgaggagccaatcgacgatgaagaacaggatgatgaaaagtggctggaagatatttataagaggtgatgtgactgtgttgcctctatggctttatctcccttttccagaaagttctttgtttggggaagtaaaatccttaagggactaaattaatgcttgggtgcattaaaaagaacaaaacattcccacatgttggggtcattgggagatgcccggttttgcgggttttatttgtttaattttattctgtgttttctcttggctctttgggtctttcccgggtacactagatggctccatcccaaggcatcttgtcataaaacagctttcccccaccccatatcatgggaaaagggggagaaatatagcccctagcctaataacttatcatttgtaaaatgacttataaaaatattacctcaatggtaggagacatccagacttgtatatttcagtggaaatacaaaaccacttcagagaccagggtatctcctctggaaggatctaagagaaggtaagacagattaggacatcgaaaaggaggatggagccaggtgccatggcttgagcctataatccgaggctgaggtgggaggatcacttgagcccaggagtttgaggttgcagtgagctgtgatcacaccactgcactccagcctgggtgacagagtgagactctgtctcaattaattttttttttttaaaggaggaggatctccatgggtaagtggtttctacccgcatgggtagagttctgcctctggtccttctcagggggcactttcaccaagagcagtgtaattatctctgaaagagcaagtcagcttgtgccgcatccccaaccaatccacagcctggagtacctttcaaggtcaaagtgcatggccagctccattgagacattccatttcaaagcaccgtgctgacagatatcaaagtactctagcagggaaaataatttgtttgctgtgtaaggaagaatgtagacaagacagataaatctgaaggtcatgtggcatcagggaaagggcatggctgtgtcttttgcacccaatatgaaacatcttctcccaacactgctttaatggaagttctaggaaccaatttagctcaggcatttgactcctacagcagaagttctgagcctgaccacagatggtgtgtaatctatcaaacacacccctggccaagttgggtcctataggacctggtactatgtactattgtaacttctagttccctaagaggtacctgttttcagtaaaaaggggtcctgagttctgtgcaggtggaagagctacccgagaactacctgagttctgtgcaggtagagtcccatttcttatgggacctgtgtgctcctgagaactcttacttgagacatcaaaaagaagcagcaagagcttctgggacagagactgcttggccagctttgtaagtaagtggctgcctccaatgtgatgtgagtacatgttgggcagtctcactgtcctaaggtatgtcttctttccacctcccactgcccctcccctgccacctatcaatgatgccttggttcagtcattagaaatctgttgctttgagttctgaaatattttcaccttaaaaaaaatgctgaaaatacacattctcctgggaagacgataaacagctagctaagaagccgaggttcagtggtggcagcaggaaggacactgccacaaattttgtctatttcatatttgtcccctagagccagccctagcaaatgtgtgagttgggagtagttaatagtaaataagactctgactttacacaagctacacattttatacttttcataaaccacaaagtctctctagaattttttctgccttcactaaaattggactgtagccaagatataaagcaagtcatttggaacctgccgagtgagcactgaagctactttatcatgagatgtgtgttaagaaggctgcagcccacaggagtccagggaaggcggggaccacagaggcacagagtccagcacttggccgctcatgggccttctttctgcctcagaggacgggggcagagaagtgatgaagggaaatgttcttagaggaggaaatatcctttgtcctgttcagagagaccagggccctaccattaggcatactttcagaagcaacctggagaacagctatcaatcatattcaaaaccagtacaagaactgctgcctggtaccctgtgagtcatttctatgaaattccatataaagaatgatgataagtttacacactgtgcaatctcacaatctgaaaataaagttgagttggctgtgttttctctgctcttgtcagaacattgggacaattggtcgttcaaaaacattcatcctcttactgcaagtttatctgggtacttttacctgtgtgttcaaaggcatttcttttcagcagtgatcattataacttcacaaaaaaagatgctgacggatttacttacagggccttaatgttattttgtcccagccaacaccctctaggtcctaaaagtcaaggtacttcagtttatttggcaaacatgacaacattttttttggccctgggcccaacagtttgtacttcatgaaacatattgtacattttacatagtttaatttaaaaaataccttttaagctagttgatctttgactgtcttatttattataacctttcagcacattccaaggttttagttactcaggaaggagttaattaaaatgattttattttggtctgatggatgttttttaaaaggaaaattattattatgaaccttcagcctactttcttgagtgccgtaaaagtgcttgtaaatctttttttttttttaagaagaaagaaaaaaatggtgtttgacgttgatggaaattcaaaaatatatatggaactgaaacattaacttagctaaaataaaagcaatctgtgtttgagatgaa

SEQ ID NO: 4181 - DNA, 1992 bp, Homo sapiens
accccgccatcccgccgtcccgytcggtgaccggagacacagccgggaacgcgactgatcaggctaccgagccgggccgcagggcgaaagcggtgcggtccgaggcctcagaaagggacacgcagcagcggmagtggcgctgactcagcccggcctccctgcagtcccctggcagcggtagcagccacaggggcgggcggctgggccacacgcctccyccgccctcggccycacccggccgcaccctaagccgcgcggcgtcacagagcgcatgcgtgccgcgggggatgccgggagcgcgcagtggcggcagcggcggcgacggcagtaacagcggcagctacagcggggacgcgagcggggcggtgacggtgtgggaggtggtctcactcttgggaaaactgctgggcaccgtcgtcgcgctgaaggtggttctgtacctgctccgagtgtgcttagcgatggcctggaaatccggcggcgccagccactcggagctaatccacaatctccgcaaaaatggaatcatcaagacagataaagtatttgaagtgatgctggctacagaccgctcccactatgcaaaatgtaacccatacatggattctccacaatcaataggtttccaagcaacaatcagtgctccacacatgcatgcatatgcgctagaacttctatttgatcagttgcatgaaggagctaaagctcttgatgtaggatctggaagtggaatccttactgcatgttttgcacgtatggttggatgtactggaaaagtcataggaattgatcacattaaagagctagtagatgactcartaaataatgtcaggaaggacgatccaacacttctgtcttcagggagagtacagcttgttgtgggggatggaagaatgggatatgctgaagaagccccttatgatgccattcatgtgggagctgcagcccctgttgtaccccaggcgctaatagatcagttaaagcccggaggaagattgatattgcctgttggtcctgcaggcggaaaccaaatgttggagcagtatgacaagctacaagatggcagcatcaaaatgaagcctctgatgggggtgatatacgtgcctttaacagataaagaaaagcagtggtccaggtggaagtgattttatcttctgctctttcttcttccacacatgcaagggatgaattgtaaaagcaacatcagcttgaccagtataaaattacagtggattgctcatctcagtcctcaaagctttttgaaaaccaacaccatcacagcttgttttggactttgttacactgttattttcagcatgaaaatgtgtgtttttttagggtttctgattcttcaaagaggcacagagccaaattggtagaggaaggatgcaaagtataaatttgtgtaatattactttaacatgcccatattttacttggaaatatwaaaagaaagggttctgtaaaatggaaaacttagtttgtgaattgattttgaggagtggtttttcttttcttggacrcttaattctgttctgatattaatttatcagattgcttttgtgcattggataacaccaccattcacaagttaagattcttggtatttggatatctgttagatgctactaagaaaatagagatgagctttctttttaaagcttttgatgtggtgtcatagaatagcatgttgtagatacaatcagctgctttgttaccttaaaactaggcatttgtaaatattaaaccwtaagatggcaggtgatgtcctgtaaacactcagctgttcagattggacataactgacttagttcttcccttctctctctctcaaaattataggagacttgtagtttagtgtggttttctgtttytaatttgctgctgataatgtatatgaacttaacatgctgtgtaagctgtgtcctagttcttgaacagtttatgcagtgctgctttgccaaataaagttaaaagtaaaagaggcattgg

SEQ ID NO: 4182 - DNA, 1960 bp, Homo sapiens
ggagcagatccgccgctcgaaacagstgacccagcgacgactgcggaaccactagcagcgtctgcacagatcgaccccgccatcccgccgtcccgytcggtgaccggagacacagccgggaacgcgactgatcaggctaccgagccgggccgcagggcgaaagcggtgcggtccgaggcctcagaaagggacacgcagcagcggmagtggcgctgactcagcccggcctccctgcagtcccctggcagcggtagcagccacaggggcgggcggctgggccacacgcctccyccgccctcggccycacccggccgcaccctaagccgcgcggcgtcacagagcgcatgcgtgccgcgggggatgccgggagcgcgcagtggcggcagcggcggcgacggcagtaacagcggcagctacagcggggacgcgagcggggcggtgacggtgtgggaggtggtctcactcttgggaaaactgctgggcaccgtcgtcgcgctgaaggtggttctgtacctgctccgagtgtgcttagcgatggcctggaaatccggcggcgccagccactcggagctaatccacaatctccgcaaaaatggaatcatcaagacagataaagtatttgaagtgatgctggctacagaccgctcccactatgcaaaatgtaacccatacatggattctccacaatcaataggtttccaagcaacaatcagtgctccacacatggttggatgtactggaaaagtcataggaattgatcacattaaagagctagtagatgactcartaaataatgtcaggaaggacgatccaacacttctgtcttcagggagagtacagcttgttgtgggggatggaagaatgggatatgctgaagaagccccttatgatgccattcatgtgggagctgcagcccctgttgtaccccaggcgctaatagatcagttaaagcccggaggaagattgatattgcctgttggtcctgcaggcggaaaccaaatgttggagcagtatgacaagctacaagatggcagcatcaaaatgaagcctctgatgggggtgatatacgtgcctttaacagataaagaaaagcagtggtccaggtggaagtgattttatcttctgctctttcttcttccacacatgcaagggatgaattgtaaaagcaacatcagcttgaccagtataaaattacagtggattgctcatctcagtcctcaaagctttttgaaaaccaacaccatcacagcttgttttggactttgttacactgttattttcagcatgaaaatgtgtgtttttttagggtttctgattcttcaaagaggcacagagccaaattggtagaggaaggatgcaaagtataaatttgtgtaatattactttaacatgcccatattttacttggaaatatwaaaagaaagggttctgtaaaatggaaaacttagtttgtgaattgattttgaggagtggtttttcttttcttggacrcttaattctgttctgatattaatttatcagattgcttttgtgcattggataacaccaccattcacaagttaagattcttggtatttggatatctgttagatgctactaagaaaatagagatgagctttctttttaaagcttttgatgtggtgtcatagaatagcatgttgtagatacaatcagctgctttgttaccttaaaactaggcatttgtaaatattaaaccwtaagatggcaggtgatgtcctgtaaacactcagctgttcagattggacataactgacttagttcttcccttctctctctctcaaaattataggagacttgtagtttagtgtggttttctgtttytaatttgctgctgataatgtatatgaacttaacatgctgtgtaagctgtgtcctagttcttgaacagtttatgcagtgctgctttgccaaataaagttaaaagtaaaagaggcattgg

SEQ ID NO: 4183 - DNA, 2252 bp, Homo sapiens
ggagcagatccgccgctcgaaacagstgacccagcgacgactgcggaaccactagcagcgtctgcacagatcgaccccgccatcccgccgtcccgytcggtgaccggagacacagccgggaacgcgactgatcaggctaccgagccgggccgcagggcgaaagcggtgcggtccgaggcctcagaaagggacacgcagcagcggmagtggcgctgactcagcccggcctccctgcagtcccctggcagcggtagcagccacaggggcgggcggctgggccacacgcctccyccgccctcggccycacccggccgcaccctaagccgcgcggcgtcacagagcgcatgcgtgccgcgggggatgccgggagcgcgcagtggcggcagcggcggcgacggcagtaacagcggcagctacagcggggacgcgagcggggcggtgacggtgtgggaggtggtctcactcttgggaaaactgctgggcaccgtcgtcgcgctgaaggtggttctgtacctgctccgagtgtgcttagcgatggcctggaaatccggcggcgccagccactcggagctaatccacaatctccgcaaaaatggaatcatcaagacagataaagtatttgaagtgatgctggctacagaccgctcccactatgcaaaatgtaacccatacatggattctccacaatcaatagaaagtcctgtatttaactccttctcctgaagcaggttttgctgaactgctgagccttggcagtgggcgcctttgaggcttagaagtgcctcaggattctgtcagtcggctgccatgctatcttcttttgacgcactataacagtcagcagagaagatcctggggagcttctgaaccccgaaggcacctgctaccaccgctcagtgaaacttgcttcagaggcagaaagaagcaggtttccaagcaacaatcagtgctccacacatgcatgcatatgcgctagaacttctatttgatcagttgcatgaaggagctaaagctcttgatgtaggatctggaagtggaatccttactgcatgttttgcacgtatggttggatgtactggaaaagtcataggaattgatcacattaaagagctagtagatgactcartaaataatgtcaggaaggacgatccaacacttctgtcttcagggagagtacagcttgttgtgggggatggaagaatgggatatgctgaagaagccccttatgatgccattcatgtgggagctgcagcccctgttgtaccccaggcgctaatagatcagttaaagcccggaggaagattgatattgcctgttggtcctgcaggcggaaaccaaatgttggagcagtatgacaagctacaagatggcagcatcaaaatgaagcctctgatgggggtgatatacgtgcctttaacagataaagaaaagcagtggtccagggatgaattgtaaaagcaacatcagcttgaccagtataaaattacagtggattgctcatctcagtcctcaaagctttttgaaaaccaacaccatcacagcttgttttggactttgttacactgttattttcagcatgaaaatgtgtgtttttttagggtttctgattcttcaaagaggcacagagccaaattggtagaggaaggatgcaaagtataaatttgtgtaatattactttaacatgcccatattttacttggaaatatwaaaagaaagggttctgtaaaatggaaaacttagtttgtgaattgattttgaggagtggtttttcttttcttggacrcttaattctgttctgatattaatttatcagattgcttttgtgcattggataacaccaccattcacaagttaagattcttggtatttggatatctgttagatgctactaagaaaatagagatgagctttctttttaaagcttttgatgtggtgtcatagaatagcatgttgtagatacaatcagctgctttgttaccttaaaactaggcatttgtaaatattaaaccwtaagatggcaggtgatgtcctgtaaacactcagctgttcagattggacataactgacttagttcttcccttctctctctctcaaaattataggagacttgtagtttagtgtggttttctgtttytaatttgctgctgataatgtatatgaacttaacatgctgtgtaagctgtgtcctagttcttgaacagtttatgcagtgctgctttgccaaataaagttaaaagtaaaagaggcattgg

SEQ ID NO: 4184 - DNA, 2065 bp, Homo sapiens
ggagcagatccgccgctcgaaacagstgacccagcgacgactgcggaaccactagcagcgtctgcacagatcgaccccgccatcccgccgtcccgytcggtgaccggagacacagccgggaacgcgactgatcaggctaccgagccgggccgcagggcgaaagcggtgcggtccgaggcctcagaaagggacacgcagcagcggmagtggcgctgactcagcccggcctccctgcagtcccctggcagcggtagcagccacaggggcgggcggctgggccacacgcctccyccgccctcggccycacccggccgcaccctaagccgcgcggcgtcacagagcgcatgcgtgccgcgggggatgccgggagcgcgcagtggcggcagcggcggcgacggcagtaacagcggcagctacagcggggacgcgagcggggcggtgacggtgtgggaggtggtctcactcttgggaaaactgctgggcaccgtcgtcgcgctgaaggtggttctgtacctgctccgagtgtgcttagcgatggcctggaaatccggcggcgccagccactcggagctaatccacaatctccgcaaaaatggaatcatcaagacagataaagtatttgaagtgatgctggctacagaccgctcccactatgcaaaatgtaacccatacatggattctccacaatcaataggtttccaagcaacaatcagtgctccacacatgcatgcatatgcgctagaacttctatttgatcagttgcatgaaggagctaaagctcttgatgtaggatctggaagtggaatccttactgcatgttttgcacgtatggttggatgtactggaaaagtcataggaattgatcacattaaagagctagtagatgactcartaaataatgtcaggaaggacgatccaacacttctgtcttcagggagagtacagcttgttgtgggggatggaagaatgggatatgctgaagaagccccttatgatgccattcatgtgggagctgcagcccctgttgtaccccaggcgctaatagatcagttaaagcccggaggaagattgatattgcctgttggtcctgcaggcggaaaccaaatgttggagcagtatgacaagctacaagatggcagcatcaaaatgaagcctctgatgggggtgatatacgtgcctttaacagataaagaaaagcagtggtccaggtggaagtgattttatcttctgctctttcttcttccacacatgcaagggatgaattgtaaaagcaacatcagcttgaccagtataaaattacagtggattgctcatctcagtcctcaaagctttttgaaaaccaacaccatcacagcttgttttggactttgttacactgttattttcagcatgaaaatgtgtgtttttttagggtttctgattcttcaaagaggcacagagccaaattggtagaggaaggatgcaaagtataaatttgtgtaatattactttaacatgcccatattttacttggaaatatwaaaagaaagggttctgtaaaatggaaaacttagtttgtgaattgattttgaggagtggtttttcttttcttggacrcttaattctgttctgatattaatttatcagattgcttttgtgcattggataacaccaccattcacaagttaagattcttggtatttggatatctgttagatgctactaagaaaatagagatgagctttctttttaaagcttttgatgtggtgtcatagaatagcatgttgtagatacaatcagctgctttgttaccttaaaactaggcatttgtaaatattaaaccwtaagatggcaggtgatgtcctgtaaacactcagctgttcagattggacataactgacttagttcttcccttctctctctctcaaaattataggagacttgtagtttagtgtggttttctgtttytaatttgctgctgataatgtatatgaacttaacatgctgtgtaagctgtgtcctagttcttgaacagtttatgcagtgctgctttgccaaataaagttaaaagtaaaagaggcattgg

SEQ ID NO: 4185 - DNA, 2996 bp, Homo sapiens
agggcggrggaggcgtgtggcccagccgcccgcccctgtggctgctaccgctgccaggggactgcagggaggccgggctgagtcagcgccactkccgctgctgcgtgtccctttctgaggcctcggaccgcaccgctttcgccctgcggcccggctcggtagcctgatcagtcgcgttcccggctgtgtctccggtcaccgarcgggacggcgggatggcggggtcgatctgtgcagacgctgctagtggttccgcagtcgtcgctgggtcasctgtttcgagcggcggatctgctcctatagatgtccagattgttagacggaaaattatatttcactgtggtctattggagattttggaaacttggactctgatggagggtttgaaggagaccatcagttattgtgtgatatcagacaccatggtgatgtaatggatttacagttttttgaccaggaaagaattgtcgctgcttcatcaacaggatgtgtaacagttttccttcaccatccaaataaccagactctgtcagtcaaccagcagtggactacagctcactaccacacaggccctggcagtccttcctatagcagtgcaccatgtacaggtgttgtgtgcaacaacccagaaatcgttacagttggagaggatggtcgaataaatctcttcagagctgatcacaaggaagctgtaagaaccataggactggtgaccgagtgccactccactgtgttgatagacatcccaaccaacagcatgttgtagctactggtggccaagatggaatgttgagtatttgggatgttagacaaggtactatgcctgtatctctgctgaaggctcatgaagctgaaatgtgggaagttcactttcacccatccaacccagaacatctttttacctgctctgaagatggatccctctggcactgggatgcttccacagatgtacctgaaaagtcgtcactctttcaccaaggaggaagaagcagtacttttttgtctcatagcattagtaaccaagctaatgttcaccagtctgtcattagctcctggctcagcactgatcctgcaaaagaccgaattgaaatcacaagcttacttcccagtaggtctctgtctgtgaacactttggatgttttaggtccttgtcttgtttgtggaaccgatgcagaagcaatttatgttactagacatcttttttcgtagaagtactataattataagatttcagatagaacatgcaattagccttttgaaatccaacttctgtgcaaaattttagtatcagaaaatacgagatttgcaggggaaacatcagtaaactaccattaatgtcaatgcccagttttgacttttgttagcctgacactcccaaacagttgtagaatccgatagatgactgatggcaaaasattgtgaacatgtggaagaaaatcagtgggattctggtgctgatgaataggttgccttcagagtattattgacagacagcttgtggaactaattctttatttttgatgttgtgggaattaacacatcaatggtggttatgggaactaccaatgggttcctacaatttttatcagtagtatgtggcatatacaccttcctagtggcagttgccaatgttaatgattattctttttattgcaagtatttcctatgatccttccacactttatttccttaataataataaactttttcagaaagaattgagtagagcaaaaatgacaaagatgtgtagctgtgttcaatttttttttttttttttttttgaggcagagtcttgctctgctggagtgcggtggtgcaatctcggctcactgcaacctccacctcccaggttcaagcaattctcctgcctcagtctcctgagtrgctggaactacaggtgtgcgccaccacgcccagctaatttttgtaattttagtagagacrgagtttcaccatgttggccaggatggtctcgatctcttgacctcatgatccacccgcctcgacctcccaaagtgctgtgattacaggtgtgagccactgcacccggcctgaaatttttttaaggtgaaaatgttttgacaagttcctttttcagaataggtttttgagcagaactctttcagcttgttagacccaactttgcttttgtttagcttcacagcatagctgaaagttgccaaactggacattgtgcaataaagtagaattctatattgataagcaaactatttccaaactaaaaatgtgatagataaaagtgtgattaatcaaatgatatgatcagagtaaagaattttgccattttgatccttttactttgttttagccacctatagtgttaccaaccatmtttatccttgtctgcagggataataatgaactaatgtagtgttttaagataatttaatgatactatctttccaaactttgttagattttaaatgtattattgacctgagaccttaatgacaaatcactgctattagacaattgaagtgttcatttactttgtaattccaataatcatagttatggaattatggtaaggttttgcttttctgtcctaataaatatatatattttttgagatggagttttgctcttgttgctgaggcaggagaattgctcraacccgggaggcagaggttgcrgtgacccaagatcgtgccacttcactccagcctgggcaarrgagcarracgccatctcaaaaaatatrcatatataaggagataaagtttcccattttccaatacagtttcacatttgaacagccctaattgatacaactttatggcagggttttagtgtgtgagtgggatccaaaacactcaatcctgtaaaagggtacagtcctattgtakgttaacacactgatgatgtgagcctgtgagatgagccaatcaccagttgttatgttcgaatctgctttgtgttgggacgctttaatgtcagggtttcactaaataaatgaattttcatatactgaactg

SEQ ID NO: 4186 - DNA, 2838 bp, Homo sapiens
agggcggrggaggcgtgtggcccagccgcccgcccctgtggctgctaccgctgccaggggactgcagggaggccgggctgagtcagcgccactkccgctgctgcgtgtccctttctgaggcctcggaccgcaccgctttcgccctgcggcccggctcggtagcctgatcagtcgcgttcccggctgtgtctccggtcaccgarcgggacggcgggatggcggggtcgatctgtgcagacgctgctagtggttccgcagtcgtcgctgggtcasctgtttcgagcggcggatctgctcctatagatgtccagattgttagacggaaaattatatttcactgtggtctattggagattttggaaacttggactctgatggagggtttgaaggagaccatcagttattgtgtgatatcagacaccatggtgatgtaatggatttacagttttttgaccaggaaagaattgtcgctgcttcatcaacaggatgtgtaacagttttccttcaccatccaaataaccagactctgtcagtcaaccagcagtggactacagctcactaccacacaggccctggcagtccttcctatagcagtgcaccatgtacaggtgttgtgtgcaacaacccagaaatcgttacagttggagaggatggtcgaataaatctcttcagagctgatcacaaggaagctgtaagaaccatagacaatgcagatagtagtacactccatgctgtaacctttcttcgaactcctgagattcttactgtaaattcaattggacagttgaaaatatgggatttcagacaacaaggaaatgagccttctcagatattgtcactgactggtgaccgagtgccactccactgtgttgatagacatcccaaccaacagcatgttgtagctactggtggccaagatggaatgttgagtatttgggatgttagacaaggtactatgcctgtatctctgctgaaggctcatgaagctgaaatgtgggaagttcactttcacccatccaacccagaacatctttttacctgctctgaagatggatccctctggcactgggatgcttccacagatgtacctgaaaagtcgtcactctttcaccaaggaggaagaagcagtacttttttgtctcatagcattagtaaccaagctaatgttcaccagtctgtcattagctcctggctcagcactgatcctgcaaaagaccgaattgaaatcacaagcttacttcccagtaggtctctgtctgtgaacactttggatgttttaggtccttgtcttgtttgtggaaccgatgcagaagcaatttatgttactagacatcttttttcgtagaagtactataattataagatttcagatagaacatgcaattagccttttgaaatccaacttctgtgcaaaattttagtatcagaaaatacgagatttgcaggggaaacatcagtaaactaccattaatgtcaatgcccagttttgacttttgttagcctgacactcccaaacagttgtagaatccgatagatgactgatggcaaaasattgtgaacatgtggaagaaaatcagtgggattctggtgctgatgaataggttgccttcagagtattattgacagacagcttgtggaactaattctttatttttgatgttgtgggaattaacacatcaatggtggttatgggaactaccaatgggttcctacaatttttatcagtagtatgtggcatatacaccttcctagtggcagttgccaatgttaatgattattctttttattgcaagtatttcctatgatccttccacactttatttccttaataataataaactttttcagaaagaattgagtagagcaaaaatgacaaagatgtgtagctgtgttcaatttttttttttttttttttttgaggcagagtcttgctctgctggagtgcggtggtgcaatctcggctcactgcaacctccacctcccaggttcaagcaattctcctgcctcagtctcctgagtrgctggaactacaggtgtgcgccaccacgcccagctaatttttgtaattttagtagagacrgagtttcaccatgttggccaggatggtctcgatctcttgacctcatgatccacccgcctcgacctcccaaagtgctgtgattacaggtgtgagccactgcacccggcctgaaatttttttaaggtgaaaatgttttgacaagttcctttttcagaataggtttttgagcagaactctttcagcttgttagacccaactttgcttttgtttagcttcacagcatagctgaaagttgccaaactggacattgtgcaataaagtagaattctatattgataagcaaactatttccaaactaaaaatgtgatagataaaagtgtgattaatcaaatgatatgatcagagtaaagaattttgccattttgatccttttactttgttttagccacctatagtgttaccaaccatmtttatccttgtctgcagggataataatgaactaatgtagtgttttaagataatttaatgatactatctttccaaactttgttagattttaaatgtattattgacctgagaccttaatgacaaatcactgctattagacaattgaagtgttcatttactttgtaattccaataatcatagttatggaattatggtaaggttttgcttttctgtcctaataaatatatatattttttgagatggagttttgctcttgttgctgaggcaggagaattgcttgaacccaggaggcagaggttgcagtgagcggagatcgtgccactgcactccagcctggcaacacagcaaga

SEQ ID NO: 4187 - DNA, 5499 bp, Homo sapiens
gccgggggtgagcgtcccaggcggttccgctcaacagacgctgctgtggctgcgccgggctgcgacactgcagttgtctacgcggccggggccgggacgaggaggcgttggacggggtcgcatacgttcgtcccctcgcattgcggccccgacagctgcgccaggatccccgggcggcggcgcggggcgtgaacgctctggggctcagccaggcctgcgcgggcccgaggccggaggaacccggactccggcgtagcggttttgacacaagggcgcatatcttcaaagcacctagtacctcctaccattgtcaactgattctcgctgaagtctgttaaytctactttttgagtacttatgaataaccacgtgtcttcaaaaccatctaccatgaagctaaaacataccatcaaccctattcttttatattttatacattttctaatatcactttatactattttaacatacattccgttttattttttctccgagtcaagacaagaaaaatcaaaccgaattaaagcaaagcctgtaaattcaaaacctgattctgcatacagatctgttaatagtttggatggtttggcttcagtattataccctggatgtgatactttagataaagtttttacatatgcaaaaaacaaatttaagaacaaaagactcttgggaacacgtgaagttttaaatgaggaagatgaagtacaaccaaatggaaaaatttttaaaaaggttattcttggacagtataattggctttcctatgaagatgtctttgttcgagcctttaattttggaaatggattacagatgttgggtcagaaaccaaagaccaacatcgccatcttctgtgagaccagggccgagtggatgatagctgcacaggcgtgttttatgtataattttcagcttgttacattatatgccactctaggaggtccagccattgttcatgcattaaatgaaacagaggtgaccaacatcattactagtaaagaactcttacaaacaaagttgaaggatatagtttctttggtcccacgcctgcggcacatcatcactgttgatggaaagccaccracctggtccgagttccccaagggcatcattgtgcataccatggctgcagtggaggccctgggagccaaggccagcatggaaaaccaacctcatagcaaaccattgccctcagatattgcagtaatcatgtacacaagtggatccacaggacttccaaagggagtcatgatctcacatagtaacattattgctggtataactgggatggcagaaaggattccagaactaggagaggaagatgtctacattggatatttgcctctggcccatgttctagaattaagtgctgagcttgtctgtctttctcacggatgccgcattggttactcttcaccacagactttagcagatcagtcttcaaaaattaaaaaaggaagcaaaggggatacatccatgttgaaaccaacactgatggcagcagttccggaaatcatggatcggatctacaaaaatgtcatgaataaagtcagtgaaatgagtagttttcaacgtaatctgtttattctggcctataattacaaaatggaacagatttcaaaaggacgtaatactccactgtgcracagctttgttttccggaaagttcgaagcttgctagggggaaatattcgtctcctgttgtgtggtggcgctccactttctgcaaccacgcagcgattcatgaacatctgtttctgctgtcctgttggtcagggatacgggctcactgaatctgctggggctggaacaatttccgaagtgtgggactacaatactggcagagtgggagcaccattagtttgctgtgaaatcaaattaaaaaactgggaggaaggtggatactttaatactgataagccacaccccaggggtgaaattcttattgggggccaaagtgtgacaatggggtactacaaaaatgaagcaaaaacaaaagctgatttctytgaagatgaaaatggacaaaggtggctctgtactggggatattggagagtttgaacccgatggatgcttaaagattattgatcgtaaaaaggaccttgtaaaactacaggcaggggaatatgtttctcttgggaaagtagaggcagctttgaagaatcttccactagtagataacatttgtgcatatgcaaacagttatcattcttatgtcattggatttgttgtgccaaatcaaaaggaactaactgaactagctcgaaagaaaggacttaaagggacttsggaggagctgtgtaacagttgtgaaatggaaaatgaggtacttaaagtgctttccgaagctgctatttcagcaagtctggaaaagtttgaaattccagtaaaaattcgtttgagtcctgaaccgtggacccctgaaactggtctggtgacagatgccttcaagctgaaacgcaaagagcttaaaacacattaccaggcggacattgarcgaatgtatggaagaaaataattattctcttctggcatcagtttgctacagtgagctcagatcaaataggaaaatacttgaaatgcatgtctcaagctgcaaggcaaactccattcctcatattaaactattacttctcatgacgtcaccatttttaactgacaggattagtaaaacattaagacagcaaacttgtgtctgtctcttctttcattttccccgccaccaacttactttaccacctatgactgtacttgtcagtatgagaatttttctgaatcatattggggaagcagtgattttaaaacctcaagtttttaaacatgatttatatgttctgtataatgttcagtttgtaactttttaaaagtttggatgtatagagggataaataggaaatataagaattggttatttgggggcttttttacttactgtatttaaaaatacaagggtattgatatgaaattatgtaaatttcaaatgcttatgaatcaaatcattgttgaacaaaagatttgttgctgtgtaattattgtcttgtatgcatttgagagaaataaatatacccatacttatgttttaagaagttgagatcttgtgaatatatgcctgtcagtgtcttctttatatatttattttttattagaaaaaatgaagtttggttggtgatgcatgaaacaaaatagcaagagagggttatagtttaatagtaagggagataacacagcatgtgtagcaccagttgataattggtctctagtagcttactgtcaaaatgttcaatgaagtcttctgttcatctgttgaaactaggaaaatacccaaacttaaatggaagaattctgaaagagaggatagaatttaaagaacaagagtatataaagttattctttgaatatttcrttgactatatgtacattgagttatctatatttgtaaacaaattagtcatggaaaattattctatyycaaagtctccttttagtctagataatcattatttcattttaaaattagtgtttttcmtagtttgcactgatgcgtgtatggatgtgtgtgagtcagtggtagcttatttaaaaagcaccttatcctttctcccataacctttgtacactaaaaaatgaaagaatttagaatgtatttgatgatagcattctcactaagacacatgagaatttaactttataaccgcgtgagttaagatttaattcataggttttgatgtcattgttgaagttatttgtaattcagaaaccttgcttgtgtgatacatagtaagtctcttcatttattactgcttgtctgttgttatatctggattatcaaaagcaatagtgcaccaattaagatgtgctcaaatcaggacttaaatcataggcaccacatttttcatgtcagactagttactttgttgattctcagttactgtaggcatcaaaaggcaaaaatcaaaaaaaaaaamacaaaaaammcaaaaaaaaagatgaacctaggtctgtgtaaagtaaggggagtgttaggagcagccaggactgtgtagtgtgtgtttggttgcatcacaaacatcgtatgtggagacattgcaatacagtgttttttgttttcaacttttcttgtattcttgtatatttgtattatgttttgaatgcttttctcttttcataattaaatattaatgtttgggataactgccaagaagaagtaaaaatattgaatggaacttctatatgaggatgctgtgatctaaaaattaaatctcagtgggcggagagaatttgtttctgatgccttgtctttagaataattgtttgctttcagatgattaaaaaaaggagattgtatctaggaaaaaagtgtgaatgcttcaaaggagagatactgataattgtgacttgaaatagtgtcagatgaattatgtagctgatcactgatggaaccatctaatgaggcaggcttaaactctatttagtttcgtttgttttctcatatgaagtttataattcctttcagtcctaaaatgtcagatgccaggtgtcaaatgccacagtagaaacgtgaaattaagtagagtccccttttaaacaaatttctctgtaagcaaaactatctttagtgacttaaaaaataatatcctctaaaattaccctttcaagaggaaaaaactgttcaatgaaaaaaccactcaattatgactcatataagaaatactggtttaaccaggagatatttggggagcaaaattttaaggaatttcaaattgctaaatctaatacaaatatctgacaataagatacagatctaaaagaatggttcttaagaactattgtttactgggaataaactaagctctatgaagaattcgtaagcattacatgttccagtaagtttagcaacttagagccaagactggtggccacctccatttatttccccactgctcctccactgacatccttcttagcagaaacttcatgaaaaagtttttgctgacacagaacaaacctgaaagtagtatctactttctaaatactactttgcttttcagtagtggatttgatatttataatgttctctaaagcttgcaactttttcagcaacgtttaaaaatagattaacctggaataacttacttgtttgctgctaaaatactcaagattttgccatttttaaacaaccagtccctgtgatacaactttgaaaaaacttttaaaaatctctgatgtrtgggctctttttttcccataagaattatgtacatctgtgatgttttacagggggatccgcttttaaacagtgtacatattggaccacactgaaatgtcatatatcctttctctacttaaaattggttatttactgtgagttcatttccgatgtgttcttggttgttgctgttttctgcctgaagacgtgtatcataaagagctacatggtatggactatttatttgtaatttgacataaagtttgaagaataaagatctataaaagttga

SEQ ID NO: 4188 - DNA, 5289 bp, Homo sapiens
atacagaattcgttgttgggaaggactggggaaacagctgtaacatttgccaccctcagaagctgctggtcctgtgtcacaccaccttagcctcttgatygaggaagattctcgctgaagtctgttaaytctactttttgagtacttatgaataaccacgtgtcttcaaaaccatctaccatgaagctaaaacataccatcaaccctattcttttatattttatacattttctaatatcactttatactattttaacatacattccgttttattttttctccgagtcaagacaagaaaaatcaaaccgaattaaagcaaagcctgtaaattcaaaacctgattctgcatacagatctgttaatagtttggatggtttggcttcagtattataccctggatgtgatactttagataaagtttttacatatgcaaaaaacaaatttaagaacaaaagactcttgggaacacgtgaagttttaaatgaggaagatgaagtacaaccaaatggaaaaatttttaaaaaggttattcttggacagtataattggctttcctatgaagatgtctttgttcgagcctttaattttggaaatggattacagatgttgggtcagaaaccaaagaccaacatcgccatcttctgtgagaccagggccgagtggatgatagctgcacaggcgtgttttatgtataattttcagcttgttacattatatgccactctaggaggtccagccattgttcatgcattaaatgaaacagaggtgaccaacatcattactagtaaagaactcttacaaacaaagttgaaggatatagtttctttggtcccacgcctgcggcacatcatcactgttgatggaaagccaccracctggtccgagttccccaagggcatcattgtgcataccatggctgcagtggaggccctgggagccaaggccagcatggaaaaccaacctcatagcaaaccattgccctcagatattgcagtaatcatgtacacaagtggatccacaggacttccaaagggagtcatgatctcacatagtaacattattgctggtataactgggatggcagaaaggattccagaactaggagaggaagatgtctacattggatatttgcctctggcccatgttctagaattaagtgctgagcttgtctgtctttctcacggatgccgcattggttactcttcaccacagactttagcagatcagtcttcaaaaattaaaaaaggaagcaaaggggatacatccatgttgaaaccaacactgatggcagcagttccggaaatcatggatcggatctacaaaaatgtcatgaataaagtcagtgaaatgagtagttttcaacgtaatctgtttattctggcctataattacaaaatggaacagatttcaaaaggacgtaatactccactgtgcracagctttgttttccggaaagttcgaagcttgctagggggaaatattcgtctcctgttgtgtggtggcgctccactttctgcaaccacgcagcgattcatgaacatctgtttctgctgtcctgttggtcagggatacgggctcactgaatctgctggggctggaacaatttccgaagtgtgggactacaatactggcagagtgggagcaccattagtttgctgtgaaatcaaattaaaaaactgggaggaaggtggatactttaatactgataagccacaccccaggggtgaaattcttattgggggccaaagtgtgacaatggggtactacaaaaatgaagcaaaaacaaaagctgatttctytgaagatgaaaatggacaaaggtggctctgtactggggatattggagagtttgaacccgatggatgcttaaagattattgatcgtaaaaaggaccttgtaaaactacaggcaggggaatatgtttctcttgggaaagtagaggcagctttgaagaatcttccactagtagataacatttgtgcatatgcaaacagttatcattcttatgtcattggatttgttgtgccaaatcaaaaggaactaactgaactagctcgaaagaaaggacttaaagggacttsggaggagctgtgtaacagttgtgaaatggaaaatgaggtacttaaagtgctttccgaagctgctatttcagcaagtctggaaaagtttgaaattccagtaaaaattcgtttgagtcctgaaccgtggacccctgaaactggtctggtgacagatgccttcaagctgaaacgcaaagagcttaaaacacattaccaggcggacattgarcgaatgtatggaagaaaataattattctcttctggcatcagtttgctacagtgagctcagatcaaataggaaaatacttgaaatgcatgtctcaagctgcaaggcaaactccattcctcatattaaactattacttctcatgacgtcaccatttttaactgacaggattagtaaaacattaagacagcaaacttgtgtctgtctcttctttcattttccccgccaccaacttactttaccacctatgactgtacttgtcagtatgagaatttttctgaatcatattggggaagcagtgattttaaaacctcaagtttttaaacatgatttatatgttctgtataatgttcagtttgtaactttttaaaagtttggatgtatagagggataaataggaaatataagaattggttatttgggggcttttttacttactgtatttaaaaatacaagggtattgatatgaaattatgtaaatttcaaatgcttatgaatcaaatcattgttgaacaaaagatttgttgctgtgtaattattgtcttgtatgcatttgagagaaataaatatacccatacttatgttttaagaagttgagatcttgtgaatatatgcctgtcagtgtcttctttatatatttattttttattagaaaaaatgaagtttggttggtgatgcatgaaacaaaatagcaagagagggttatagtttaatagtaagggagataacacagcatgtgtagcaccagttgataattggtctctagtagcttactgtcaaaatgttcaatgaagtcttctgttcatctgttgaaactaggaaaatacccaaacttaaatggaagaattctgaaagagaggatagaatttaaagaacaagagtatataaagttattctttgaatatttcrttgactatatgtacattgagttatctatatttgtaaacaaattagtcatggaaaattattctatyycaaagtctccttttagtctagataatcattatttcattttaaaattagtgtttttcmtagtttgcactgatgcgtgtatggatgtgtgtgagtcagtggtagcttatttaaaaagcaccttatcctttctcccataacctttgtacactaaaaaatgaaagaatttagaatgtatttgatgatagcattctcactaagacacatgagaatttaactttataaccgcgtgagttaagatttaattcataggttttgatgtcattgttgaagttatttgtaattcagaaaccttgcttgtgtgatacatagtaagtctcttcatttattactgcttgtctgttgttatatctggattatcaaaagcaatagtgcaccaattaagatgtgctcaaatcaggacttaaatcataggcaccacatttttcatgtcagactagttactttgttgattctcagttactgtaggcatcaaaaggcaaaaatcaaaaaaaaaaamacaaaaaammcaaaaaaaaagatgaacctaggtctgtgtaaagtaaggggagtgttaggagcagccaggactgtgtagtgtgtgtttggttgcatcacaaacatcgtatgtggagacattgcaatacagtgttttttgttttcaacttttcttgtattcttgtatatttgtattatgttttgaatgcttttctcttttcataattaaatattaatgtttgggataactgccaagaagaagtaaaaatattgaatggaacttctatatgaggatgctgtgatctaaaaattaaatctcagtgggcggagagaatttgtttctgatgccttgtctttagaataattgtttgctttcagatgattaaaaaaaggagattgtatctaggaaaaaagtgtgaatgcttcaaaggagagatactgataattgtgacttgaaatagtgtcagatgaattatgtagctgatcactgatggaaccatctaatgaggcaggcttaaactctatttagtttcgtttgttttctcatatgaagtttataattcctttcagtcctaaaatgtcagatgccaggtgtcaaatgccacagtagaaacgtgaaattaagtagagtccccttttaaacaaatttctctgtaagcaaaactatctttagtgacttaaaaaataatatcctctaaaattaccctttcaagaggaaaaaactgttcaatgaaaaaaccactcaattatgactcatataagaaatactggtttaaccaggagatatttggggagcaaaattttaaggaatttcaaattgctaaatctaatacaaatatctgacaataagatacagatctaaaagaatggttcttaagaactattgtttactgggaataaactaagctctatgaagaattcgtaagcattacatgttccagtaagtttagcaacttagagccaagactggtggccacctccatttatttccccactgctcctccactgacatccttcttagcagaaacttcatgaaaaagtttttgctgacacagaacaaacctgaaagtagtatctactttctaaatactactttgcttttcagtagtggatttgatatttataatgttctctaaagcttgcaactttttcagcaacgtttaaaaatagattaacctggaataacttacttgtttgctgctaaaatactcaagattttgccatttttaaacaaccagtccctgtgatacaactttgaaaaaacttttaaaaatctctgatgtrtgggctctttttttcccataagaattatgtacatctgtgatgttttacagggggatccgcttttaaacagtgtacatattggaccacactgaaatgtcatatatcctttctctacttaaaattggttatttactgtgagttcatttccgatgtgttcttggttgttgctgttttctgcctgaagacgtgtatcataaagagctacatggtatggactatttatttgtaatttgacataaagtttgaagaataaagatctataaaagttga

SEQ ID NO: 4189 - DNA, 5606 bp, Homo sapiens
gccgggggtgagcgtcccaggcggttccgctcaacagacgctgctgtggctgcgccgggctgcgacactgcagttgtctacgcggccggggccgggacgaggaggcgttggacggggtcgcatacgttcgtcccctcgcattgcggccccgacagctgcgccaggatccccgggcggcggcgcggggcgtgaacgctctggggctcagccaggcctgcgcgggcccgaggccggaggaacccggactccggcgtagcggttttgacacaagggcgcatatcttcaaagcacctagtacctcctaccattgtcaactgatacagaattcgttgttgggaaggactggggaaacagctgtaacatttgccaccctcagaagctgctggtcctgtgtcacaccaccttagcctcttgatygaggaagattctcgctgaagtctgttaaytctactttttgagtacttatgaataaccacgtgtcttcaaaaccatctaccatgaagctaaaacataccatcaaccctattcttttatattttatacattttctaatatcactttatactattttaacatacattccgttttattttttctccgagtcaagacaagaaaaatcaaaccgaattaaagcaaagcctgtaaattcaaaacctgattctgcatacagatctgttaatagtttggatggtttggcttcagtattataccctggatgtgatactttagataaagtttttacatatgcaaaaaacaaatttaagaacaaaagactcttgggaacacgtgaagttttaaatgaggaagatgaagtacaaccaaatggaaaaatttttaaaaaggttattcttggacagtataattggctttcctatgaagatgtctttgttcgagcctttaattttggaaatggattacagatgttgggtcagaaaccaaagaccaacatcgccatcttctgtgagaccagggccgagtggatgatagctgcacaggcgtgttttatgtataattttcagcttgttacattatatgccactctaggaggtccagccattgttcatgcattaaatgaaacagaggtgaccaacatcattactagtaaagaactcttacaaacaaagttgaaggatatagtttctttggtcccacgcctgcggcacatcatcactgttgatggaaagccaccracctggtccgagttccccaagggcatcattgtgcataccatggctgcagtggaggccctgggagccaaggccagcatggaaaaccaacctcatagcaaaccattgccctcagatattgcagtaatcatgtacacaagtggatccacaggacttccaaagggagtcatgatctcacatagtaacattattgctggtataactgggatggcagaaaggattccagaactaggagaggaagatgtctacattggatatttgcctctggcccatgttctagaattaagtgctgagcttgtctgtctttctcacggatgccgcattggttactcttcaccacagactttagcagatcagtcttcaaaaattaaaaaaggaagcaaaggggatacatccatgttgaaaccaacactgatggcagcagttccggaaatcatggatcggatctacaaaaatgtcatgaataaagtcagtgaaatgagtagttttcaacgtaatctgtttattctggcctataattacaaaatggaacagatttcaaaaggacgtaatactccactgtgcracagctttgttttccggaaagttcgaagcttgctagggggaaatattcgtctcctgttgtgtggtggcgctccactttctgcaaccacgcagcgattcatgaacatctgtttctgctgtcctgttggtcagggatacgggctcactgaatctgctggggctggaacaatttccgaagtgtgggactacaatactggcagagtgggagcaccattagtttgctgtgaaatcaaattaaaaaactgggaggaaggtggatactttaatactgataagccacaccccaggggtgaaattcttattgggggccaaagtgtgacaatggggtactacaaaaatgaagcaaaaacaaaagctgatttctytgaagatgaaaatggacaaaggtggctctgtactggggatattggagagtttgaacccgatggatgcttaaagattattgatcgtaaaaaggaccttgtaaaactacaggcaggggaatatgtttctcttgggaaagtagaggcagctttgaagaatcttccactagtagataacatttgtgcatatgcaaacagttatcattcttatgtcattggatttgttgtgccaaatcaaaaggaactaactgaactagctcgaaagaaaggacttaaagggacttsggaggagctgtgtaacagttgtgaaatggaaaatgaggtacttaaagtgctttccgaagctgctatttcagcaagtctggaaaagtttgaaattccagtaaaaattcgtttgagtcctgaaccgtggacccctgaaactggtctggtgacagatgccttcaagctgaaacgcaaagagcttaaaacacattaccaggcggacattgarcgaatgtatggaagaaaataattattctcttctggcatcagtttgctacagtgagctcagatcaaataggaaaatacttgaaatgcatgtctcaagctgcaaggcaaactccattcctcatattaaactattacttctcatgacgtcaccatttttaactgacaggattagtaaaacattaagacagcaaacttgtgtctgtctcttctttcattttccccgccaccaacttactttaccacctatgactgtacttgtcagtatgagaatttttctgaatcatattggggaagcagtgattttaaaacctcaagtttttaaacatgatttatatgttctgtataatgttcagtttgtaactttttaaaagtttggatgtatagagggataaataggaaatataagaattggttatttgggggcttttttacttactgtatttaaaaatacaagggtattgatatgaaattatgtaaatttcaaatgcttatgaatcaaatcattgttgaacaaaagatttgttgctgtgtaattattgtcttgtatgcatttgagagaaataaatatacccatacttatgttttaagaagttgagatcttgtgaatatatgcctgtcagtgtcttctttatatatttattttttattagaaaaaatgaagtttggttggtgatgcatgaaacaaaatagcaagagagggttatagtttaatagtaagggagataacacagcatgtgtagcaccagttgataattggtctctagtagcttactgtcaaaatgttcaatgaagtcttctgttcatctgttgaaactaggaaaatacccaaacttaaatggaagaattctgaaagagaggatagaatttaaagaacaagagtatataaagttattctttgaatatttcrttgactatatgtacattgagttatctatatttgtaaacaaattagtcatggaaaattattctatyycaaagtctccttttagtctagataatcattatttcattttaaaattagtgtttttcmtagtttgcactgatgcgtgtatggatgtgtgtgagtcagtggtagcttatttaaaaagcaccttatcctttctcccataacctttgtacactaaaaaatgaaagaatttagaatgtatttgatgatagcattctcactaagacacatgagaatttaactttataaccgcgtgagttaagatttaattcataggttttgatgtcattgttgaagttatttgtaattcagaaaccttgcttgtgtgatacatagtaagtctcttcatttattactgcttgtctgttgttatatctggattatcaaaagcaatagtgcaccaattaagatgtgctcaaatcaggacttaaatcataggcaccacatttttcatgtcagactagttactttgttgattctcagttactgtaggcatcaaaaggcaaaaatcaaaaaaaaaaamacaaaaaammcaaaaaaaaagatgaacctaggtctgtgtaaagtaaggggagtgttaggagcagccaggactgtgtagtgtgtgtttggttgcatcacaaacatcgtatgtggagacattgcaatacagtgttttttgttttcaacttttcttgtattcttgtatatttgtattatgttttgaatgcttttctcttttcataattaaatattaatgtttgggataactgccaagaagaagtaaaaatattgaatggaacttctatatgaggatgctgtgatctaaaaattaaatctcagtgggcggagagaatttgtttctgatgccttgtctttagaataattgtttgctttcagatgattaaaaaaaggagattgtatctaggaaaaaagtgtgaatgcttcaaaggagagatactgataattgtgacttgaaatagtgtcagatgaattatgtagctgatcactgatggaaccatctaatgaggcaggcttaaactctatttagtttcgtttgttttctcatatgaagtttataattcctttcagtcctaaaatgtcagatgccaggtgtcaaatgccacagtagaaacgtgaaattaagtagagtccccttttaaacaaatttctctgtaagcaaaactatctttagtgacttaaaaaataatatcctctaaaattaccctttcaagaggaaaaaactgttcaatgaaaaaaccactcaattatgactcatataagaaatactggtttaaccaggagatatttggggagcaaaattttaaggaatttcaaattgctaaatctaatacaaatatctgacaataagatacagatctaaaagaatggttcttaagaactattgtttactgggaataaactaagctctatgaagaattcgtaagcattacatgttccagtaagtttagcaacttagagccaagactggtggccacctccatttatttccccactgctcctccactgacatccttcttagcagaaacttcatgaaaaagtttttgctgacacagaacaaacctgaaagtagtatctactttctaaatactactttgcttttcagtagtggatttgatatttataatgttctctaaagcttgcaactttttcagcaacgtttaaaaatagattaacctggaataacttacttgtttgctgctaaaatactcaagattttgccatttttaaacaaccagtccctgtgatacaactttgaaaaaacttttaaaaatctctgatgtrtgggctctttttttcccataagaattatgtacatctgtgatgttttacagggggatccgcttttaaacagtgtacatattggaccacactgaaatgtcatatatcctttctctacttaaaattggttatttactgtgagttcatttccgatgtgttcttggttgttgctgttttctgcctgaagacgtgtatcataaagagctacatggtatggactatttatttgtaatttgacataaagtttgaagaataaagatctataaaagttga

SEQ ID NO: 4190 - DNA, 5391 bp, Homo sapiens
ctgcgccgggctgcgacactgcagttgtctacgcggccggggccgggacgaggaggcgttggacggggtcgcatacgttcgtcccctcgcattgcggccccgacagctgcgccaggatccccgggcggcggcgcggggcgtgaacgctctggggctcagccaggcctgcgcgggcccgaggccggaggaacccggactccggcgtagcgattctcgctgaagtctgttaaytctactttttgagtacttatgaataaccacgtgtcttcaaaaccatctaccatgaagctaaaacataccatcaaccctattcttttatattttatacattttctaatatcactttatactattttaacatacattccgttttattttttctccgagtcaagacaagaaaaatcaaaccgaattaaagcaaagcctgtaaattcaaaacctgattctgcatacagatctgttaatagtttggatggtttggcttcagtattataccctggatgtgatactttagataaagtttttacatatgcaaaaaacaaatttaagaacaaaagactcttgggaacacgtgaagttttaaatgaggaagatgaagtacaaccaaatggaaaaatttttaaaaaggttattcttggacagtataattggctttcctatgaagatgtctttgttcgagcctttaattttggaaatggattacagatgttgggtcagaaaccaaagaccaacatcgccatcttctgtgagaccagggccgagtggatgatagctgcacaggcgtgttttatgtataattttcagcttgttacattatatgccactctaggaggtccagccattgttcatgcattaaatgaaacagaggtgaccaacatcattactagtaaagaactcttacaaacaaagttgaaggatatagtttctttggtcccacgcctgcggcacatcatcactgttgatggaaagccaccracctggtccgagttccccaagggcatcattgtgcataccatggctgcagtggaggccctgggagccaaggccagcatggaaaaccaacctcatagcaaaccattgccctcagatattgcagtaatcatgtacacaagtggatccacaggacttccaaagggagtcatgatctcacatagtaacattattgctggtataactgggatggcagaaaggattccagaactaggagaggaagatgtctacattggatatttgcctctggcccatgttctagaattaagtgctgagcttgtctgtctttctcacggatgccgcattggttactcttcaccacagactttagcagatcagtcttcaaaaattaaaaaaggaagcaaaggggatacatccatgttgaaaccaacactgatggcagcagttccggaaatcatggatcggatctacaaaaatgtcatgaataaagtcagtgaaatgagtagttttcaacgtaatctgtttattctggcctataattacaaaatggaacagatttcaaaaggacgtaatactccactgtgcracagctttgttttccggaaagttcgaagcttgctagggggaaatattcgtctcctgttgtgtggtggcgctccactttctgcaaccacgcagcgattcatgaacatctgtttctgctgtcctgttggtcagggatacgggctcactgaatctgctggggctggaacaatttccgaagtgtgggactacaatactggcagagtgggagcaccattagtttgctgtgaaatcaaattaaaaaactgggaggaaggtggatactttaatactgataagccacaccccaggggtgaaattcttattgggggccaaagtgtgacaatggggtactacaaaaatgaagcaaaaacaaaagctgatttctytgaagatgaaaatggacaaaggtggctctgtactggggatattggagagtttgaacccgatggatgcttaaagattattgatcgtaaaaaggaccttgtaaaactacaggcaggggaatatgtttctcttgggaaagtagaggcagctttgaagaatcttccactagtagataacatttgtgcatatgcaaacagttatcattcttatgtcattggatttgttgtgccaaatcaaaaggaactaactgaactagctcgaaagaaaggacttaaagggacttsggaggagctgtgtaacagttgtgaaatggaaaatgaggtacttaaagtgctttccgaagctgctatttcagcaagtctggaaaagtttgaaattccagtaaaaattcgtttgagtcctgaaccgtggacccctgaaactggtctggtgacagatgccttcaagctgaaacgcaaagagcttaaaacacattaccaggcggacattgarcgaatgtatggaagaaaataattattctcttctggcatcagtttgctacagtgagctcagatcaaataggaaaatacttgaaatgcatgtctcaagctgcaaggcaaactccattcctcatattaaactattacttctcatgacgtcaccatttttaactgacaggattagtaaaacattaagacagcaaacttgtgtctgtctcttctttcattttccccgccaccaacttactttaccacctatgactgtacttgtcagtatgagaatttttctgaatcatattggggaagcagtgattttaaaacctcaagtttttaaacatgatttatatgttctgtataatgttcagtttgtaactttttaaaagtttggatgtatagagggataaataggaaatataagaattggttatttgggggcttttttacttactgtatttaaaaatacaagggtattgatatgaaattatgtaaatttcaaatgcttatgaatcaaatcattgttgaacaaaagatttgttgctgtgtaattattgtcttgtatgcatttgagagaaataaatatacccatacttatgttttaagaagttgagatcttgtgaatatatgcctgtcagtgtcttctttatatatttattttttattagaaaaaatgaagtttggttggtgatgcatgaaacaaaatagcaagagagggttatagtttaatagtaagggagataacacagcatgtgtagcaccagttgataattggtctctagtagcttactgtcaaaatgttcaatgaagtcttctgttcatctgttgaaactaggaaaatacccaaacttaaatggaagaattctgaaagagaggatagaatttaaagaacaagagtatataaagttattctttgaatatttcrttgactatatgtacattgagttatctatatttgtaaacaaattagtcatggaaaattattctatyycaaagtctccttttagtctagataatcattatttcattttaaaattagtgtttttcmtagtttgcactgatgcgtgtatggatgtgtgtgagtcagtggtagcttatttaaaaagcaccttatcctttctcccataacctttgtacactaaaaaatgaaagaatttagaatgtatttgatgatagcattctcactaagacacatgagaatttaactttataaccgcgtgagttaagatttaattcataggttttgatgtcattgttgaagttatttgtaattcagaaaccttgcttgtgtgatacatagtaagtctcttcatttattactgcttgtctgttgttatatctggattatcaaaagcaatagtgcaccaattaagatgtgctcaaatcaggacttaaatcataggcaccacatttttcatgtcagactagttactttgttgattctcagttactgtaggcatcaaaaggcaaaaatcaaaaaaaaaaamacaaaaaammcaaaaaaaaagatgaacctaggtctgtgtaaagtaaggggagtgttaggagcagccaggactgtgtagtgtgtgtttggttgcatcacaaacatcgtatgtggagacattgcaatacagtgttttttgttttcaacttttcttgtattcttgtatatttgtattatgttttgaatgcttttctcttttcataattaaatattaatgtttgggataactgccaagaagaagtaaaaatattgaatggaacttctatatgaggatgctgtgatctaaaaattaaatctcagtgggcggagagaatttgtttctgatgccttgtctttagaataattgtttgctttcagatgattaaaaaaaggagattgtatctaggaaaaaagtgtgaatgcttcaaaggagagatactgataattgtgacttgaaatagtgtcagatgaattatgtagctgatcactgatggaaccatctaatgaggcaggcttaaactctatttagtttcgtttgttttctcatatgaagtttataattcctttcagtcctaaaatgtcagatgccaggtgtcaaatgccacagtagaaacgtgaaattaagtagagtccccttttaaacaaatttctctgtaagcaaaactatctttagtgacttaaaaaataatatcctctaaaattaccctttcaagaggaaaaaactgttcaatgaaaaaaccactcaattatgactcatataagaaatactggtttaaccaggagatatttggggagcaaaattttaaggaatttcaaattgctaaatctaatacaaatatctgacaataagatacagatctaaaagaatggttcttaagaactattgtttactgggaataaactaagctctatgaagaattcgtaagcattacatgttccagtaagtttagcaacttagagccaagactggtggccacctccatttatttccccactgctcctccactgacatccttcttagcagaaacttcatgaaaaagtttttgctgacacagaacaaacctgaaagtagtatctactttctaaatactactttgcttttcagtagtggatttgatatttataatgttctctaaagcttgcaactttttcagcaacgtttaaaaatagattaacctggaataacttacttgtttgctgctaaaatactcaagattttgccatttttaaacaaccagtccctgtgatacaactttgaaaaaacttttaaaaatctctgatgtrtgggctctttttttcccataagaattatgtacatctgtgatgttttacagggggatccgcttttaaacagtgtacatattggaccacactgaaatgtcatatatcctttctctacttaaaattggttatttactgtgagttcatttccgatgtgttcttggttgttgctgttttctgcctgaagacgtgtatcataaagagctacatggtatggactatttatttgtaatttgacataaagtttgaagaataaagatctataaaagttga

SEQ ID NO: 4191 - DNA, 1560 bp, Homo sapiens
tagtgggtggagccagctgtcctcattagataaaggttgtttattcaacccaagtataaatggaaaaaaaagatgygccctctgtcactgagggttgactgactggagagctcaagtgcagcaaagagaagtgtcagagcatgagcgccaagtccagaaccatagggattattggagctcctttctcaaagggacagccaygaggaggggtggaagaaggccctacagtattgagaaaggctggtctgcttgagaaacttaaagaacaagtaactcaaaactttttaattttagagtgtgatgtgaaggattatggggacctgccctttgctgacatccctaatgacagtccctttcaaattgtgaagaatccaaggtctgtgggawaagcaagcgagcagctggctggcaaggtggcasaagtcaagaagaayggaagaatcascctggtgctgggcggagaccacagtttggcaattggaagcatctctggccatgccagggtccaccctgatcttggagtcatctrggtggatgctcacactgrtatcaacactccactgacaaccacaagtgkaaacttgcwtggacaacctgtatctttcctcctgaaggaactaaaaggaaagattcccgatgtgccaggattctcctgggtgactccctgtatatctgccaaggatattgtgtatattggcttgagagacgtggaccctggggaacactacattttgaaaactctaggcattaaatacttttcaatgactgaagtggacagactaggaattggcaaggtgatggaagaaacactcagctatctactaggaagaaagaaaaggccaattcatctaagttttgatgttgacggactggacccatctttcacaccagctactggcacaccagtcgtgggaggtctgacatacagagaaggtctctacatcacagaagaaatctacaaaacagggctactctcaggattagatataatggaagtgaacccatccctggggaagacaccagaagaagtaastygaacagtgaacacagcagttgcaataaccttggcttgtttcggacttgctcgggagggtaatcacaagcctattgactaccttaacccacctaagtaaatgtggaaacatccgatataaatctcatagttaatggcataattagaaagctaatcattttcttaagcatagagttatccttctaaagacttgttctttcagaaaaatgtttttccaattaktataaactctacaaattccctcttggtgtaaaattcaagatgtggaaattctaacttttttgaaatttaaaagcttatattttctaacttggcaaaagacttatccttagaaagagaagtgtacattgatttccaattaaaaatttgctrgcattaaaaataagcacacttacataagcccccatacatagagtgggactcttggaatcaggagacaaagctaccacatgtggaaaggtactatgtgtccatgtcattcaaaaaatgtgattttttataataaactctttataacaagattatat

SEQ ID NO: 4192 - DNA, 1536 bp, Homo sapiens
tagtgggtggagccagctgtcctcattagataaaggttgtttattcaacccaagtataaatggaaaaaaaagatgygccctctgtcactgagggttgactgactggagagctcaagtgcagcaaagagaagtgtcagagcatgagcgccaagtccagaaccatagggattattggagctcctttctcaaagggacagccaygaggaggggtggaagaaggccctacagtattgagaaaggctggtctgcttgagaaacttaaagaacaagagtgtgatgtgaaggattatggggacctgccctttgctgacatccctaatgacagtccctttcaaattgtgaagaatccaaggtctgtgggawaagcaagcgagcagctggctggcaaggtggcasaagtcaagaagaayggaagaatcascctggtgctgggcggagaccacagtttggcaattggaagcatctctggccatgccagggtccaccctgatcttggagtcatctrggtggatgctcacactgrtatcaacactccactgacaaccacaagtgkaaacttgcwtggacaacctgtatctttcctcctgaaggaactaaaaggaaagattcccgatgtgccaggattctcctgggtgactccctgtatatctgccaaggatattgtgtatattggcttgagagacgtggaccctggggaacactacattttgaaaactctaggcattaaatacttttcaatgactgaagtggacagactaggaattggcaaggtgatggaagaaacactcagctatctactaggaagaaagaaaaggccaattcatctaagttttgatgttgacggactggacccatctttcacaccagctactggcacaccagtcgtgggaggtctgacatacagagaaggtctctacatcacagaagaaatctacaaaacagggctactctcaggattagatataatggaagtgaacccatccctggggaagacaccagaagaagtaastygaacagtgaacacagcagttgcaataaccttggcttgtttcggacttgctcgggagggtaatcacaagcctattgactaccttaacccacctaagtaaatgtggaaacatccgatataaatctcatagttaatggcataattagaaagctaatcattttcttaagcatagagttatccttctaaagacttgttctttcagaaaaatgtttttccaattaktataaactctacaaattccctcttggtgtaaaattcaagatgtggaaattctaacttttttgaaatttaaaagcttatattttctaacttggcaaaagacttatccttagaaagagaagtgtacattgatttccaattaaaaatttgctrgcattaaaaataagcacacttacataagcccccatacatagagtgggactcttggaatcaggagacaaagctaccacatgtggaaaggtactatgtgtccatgtcattcaaaaaatgtgattttttataataaactctttataacaagattatat

SEQ ID NO: 4193 - DNA, 1281 bp, Homo sapiens
tagtgggtggagccagctgtcctcattagataaaggttgtttattcaacccaagtataaatggaaaaaaaagatgygccctctgtcactgagggttgactgactggagagctcaagtgcagcaaagagaagtgtcagagcatgagcgccaagtccagaaccatagggattattggagctcctttctcaaagggacagccaygaggaggggtggaagaaggccctacagtattgagaaaggctggtctgcttgagaaacttaaagaacaagagtgtgatgtgaaggattatggggacctgccctttgctgacatccctaatgacagtccctttcaaattgtgaagaatccaaggtctgtgggawaagcaagcgagcagctggctggcaaggtggcasaagtcaagaagaayggaagaatcascctggtgctgggcggagaccacagtttggcaattggaagcatctctggccatgccagggtccaccctgatcttggagtcatctrggtggatgctcacactgrtatcaacactccactgacaaccacaagtgkaaacttgcwtggacaacctgtatctttcctcctgaaggaactaaaaggaaagattcccgatgtgccaggattctcctgggtgactccctgtatatctgccaaggatattgtgtatattggcttgagagacgtggaccctggggaacactacattttgaaaactctaggcattaaatacttttcaatgactgaagaagtaastygaacagtgaacacagcagttgcaataaccttggcttgtttcggacttgctcgggagggtaatcacaagcctattgactaccttaacccacctaagtaaatgtggaaacatccgatataaatctcatagttaatggcataattagaaagctaatcattttcttaagcatagagttatccttctaaagacttgttctttcagaaaaatgtttttccaattaktataaactctacaaattccctcttggtgtaaaattcaagatgtggaaattctaacttttttgaaatttaaaagcttatattttctaacttggcaaaagacttatccttagaaagagaagtgtacattgatttccaattaaaaatttgctrgcattaaaaataagcacacttacataagcccccatacatagagtgggactcttggaatcaggagacaaagctaccacatgtggaaaggtactatgtgtccatgtcattcaaaaaatgtgattttttataataaactctttataacaagattatat

SEQ ID NO: 4194 - DNA, 1412 bp, Homo sapiens
aagtataaatggaaaaaaaagatgygccctctgtcactgagggttgactgactggagagctcaagtgcagcaaagagaagtgtcagagcatgagcgccaagtccagaaccatagggattattggagctcctttctcaaagggacagagtgtgatgtgaaggattatggggacctgccctttgctgacatccctaatgacagtccctttcaaattgtgaagaatccaaggtctgtgggawaagcaagcgagcagctggctggcaaggtggcasaagtcaagaagaayggaagaatcascctggtgctgggcggagaccacagtttggcaattggaagcatctctggccatgccagggtccaccctgatcttggagtcatctrggtggatgctcacactgrtatcaacactccactgacaaccacaagtgkaaacttgcwtggacaacctgtatctttcctcctgaaggaactaaaaggaaagattcccgatgtgccaggattctcctgggtgactccctgtatatctgccaaggatattgtgtatattggcttgagagacgtggaccctggggaacactacattttgaaaactctaggcattaaatacttttcaatgactgaagtggacagactaggaattggcaaggtgatggaagaaacactcagctatctactaggaagaaagaaaaggccaattcatctaagttttgatgttgacggactggacccatctttcacaccagctactggcacaccagtcgtgggaggtctgacatacagagaaggtctctacatcacagaagaaatctacaaaacagggctactctcaggattagatataatggaagtgaacccatccctggggaagacaccagaagaagtaastygaacagtgaacacagcagttgcaataaccttggcttgtttcggacttgctcgggagggtaatcacaagcctattgactaccttaacccacctaagtaaatgtggaaacatccgatataaatctcatagttaatggcataattagaaagctaatcattttcttaagcatagagttatccttctaaagacttgttctttcagaaaaatgtttttccaattaktataaactctacaaattccctcttggtgtaaaattcaagatgtggaaattctaacttttttgaaatttaaaagcttatattttctaacttggcaaaagacttatccttagaaagagaagtgtacattgatttccaattaaaaatttgctrgcattaaaaataagcacacttacataagcccccatacatagagtgggactcttggaatcaggagacaaagctaccacatgtggaaaggtactatgtgtccatgtcattcaaaaaatgtgattttttataataaactctttataacaagattatat

SEQ ID NO: 4195 - DNA, 4092 bp, Homo sapiens
ccggcgcaggcgcacaggggacggttgctggcccaggtgagcgggcgcgctggtccaggtgagcgggcgcgtccccgcgacggcgctgcctgcccgaggcggttcacgtaaagacagcgagatcctgagggccagccgggaaggaggcgtggatatggagctggctgctgccaagtccggggcccgcgccgctgcctagcgcgtcctggggactctgtggggacgcgccccgcgccgcggctcggggacccgtagascccggcgctgcgcgcatggccctgctctcgcgccccgcgctcaccctcctgctcctcctcatggccgctgttgtcaggtgccaggagcaggcccagaccaccgactggagagccaccctgaagaccatccggaacggcgttcataagatagacacgtacctgaacgccgccttggacctcctgggaggcgaggacggtctctgccagtataaatgcagtgacgcttaacattggtatcccttccctgacaaagtgttgcaaccaacacgacaggtgctatgaracctgtggcaaaagcaagaatgactgtgatgaagaattccagtattgcctctccaagatctgccgagatgtacagaaaacactaggactaactcagcatgttcaggcatgtgaaacaacagtggagctcttgtttgacagtgttatacatttaggttgtaaaccatatctggacagccaacgagccgcatgcaggtgtcattatgaagaaaaaactgatctttaaaggagatgccgacagctagtgacagatgaagatggaagaacatamcctttgacaaataactaatgtttttacaacataaaactgtcttatttttgtgaaaggattattttgagaccttaaaataatttatatcttgatgttaaaacctcaaagcaaaaaaagtgagggagatagtgaggggagggcacgcttgtcttctcaggtatcttccccagcattgctcccttacttagtatgccaaatgtcttgaccaatatcaaaaacaagtgcttgtttagcggagaattttgaaaagaggaatatataactcaattttcacaaccacatttaccaaaaaaagagatcaaatataaaattcatcataatgtctgttcaacattatcttatttggaaaatggggaaattatcacttacaagtatttgtttactatgaaattttaaatacacatttatgcctagaaggaacggactttttttttctattttaattacacataatatgtaattaaagtacaacataatatgttgtttctctgtagcccgttgagcatatgagtaagtcacatttctattaggactacttacaaggacaaggtttccatttttccagttgtaaaattggaaccatcagctgataacctcrtagggagcaaccccaggatagctaagtgttatgtaatatgcctagaaggtgatgtgaatgcgattcagaagcatagccactcccattttatgagctactcacatgacaaatgtcatcttttgctataacctttgccaagttagagaaaagatggatttaatgagataaatgaaaagatatttaacctaatatatcaaggcactatttgctgttatgctttgttatttatttcccagcacttgttccttattgtagattttttaaagactgtaaccttttactaactgtggtcttactaaaatttgtgcttgatactgcttttcaaaaagcctttaattagagccaaaaggatggaaaaggcaagatataaatgccttttatagatctcttatttacattgaaaattattaccatatgtttagagcaaatccaagaaaacttcaacagcttctgaagatgtctatgaatgttgaaaacttttcaatctcttggaatgctcagttatgttcctagaccggtctttgctgactactggttgttaacctttccctagcctgggacctcaagccatatatatcctttgggtgacccatggccaaagttattaagatgaactgactttcaaagtcagagaaggacagcatagggagaggcggttatttgtaagtcattacaggtagaacagggcagaaggaaaagtatgttctggagaaagggccatgttcctaactttggagatatgtcattgccgggaacctagtatcttccaacttgaattggtggcagctgttccagtgagacaaggcacatgtatgccttgtggctaagtgagcaaactgggtttccacttaaatgtttgggaccctcaattgattctttatttcaaacctttataaaaggtacagttttgtaagccattattaataattaatgcttatcggctgggcacagtggctcacacctataatcccagcactttgggaggctgaggcggttggatcacttgaggtcaggagtttgagaccagctggccaacatggtgaaacagcgtctctactaaaaatacaaaaatttgccgggcgtggtggcgcatgcttatagtctcagctactcaggaagctgaggtacgagaatcacttgaacccaggaggtggaggttgcagtgagctgagattgtgccactgcactgcagcctgggcaacagagcaagactctaaaaaaaaaatggtttatcaatatttactattgaaatatttgtccaggtaactttacacttacaatgaattcatggattttgttagcagcattggctttctcaaaaggacaaactcaatatcgttataaaatataattcgtgatcacaaattatacaaaaatcagtagaaacagttttttatgttcagattaaaaaaaaaaacttgggataattttagatttacagaaaagttgcaaagatacatggagagcttctgtgaccactcacccagttcccccagtgttaaccttttatttaaccatgaagcatttgtcagaagctaagtaaccagcaatggcaattactattaacggaactttgactttatttttcagattgtactagttttttaattaatgtcatttttcttttccaggatccaatctaggataccacactgaattagtcgtcatgcctaattagcctctggtctgtgatagttccacagtctttctttttcataaccttgacagttttgaggagtactggtcaggtgttttgtagaatattcctcaatttgggtttgtctgatgttttcctcatggttagagtggggttatagatttttaggaagaataccagaggtgaaggtccttctcactgcatcatgtcaggagttacatgctatcagcttgatggtgtattaactttggacacttggttaaggtagtgtgtgttggttttttgctgctgaaaattactgttattttccctttccatacttctgttctttggaaaacagtcactaagtccagtcatgggaggtggtgggtgggaaagattacattcaaccccctggaagtgggaatatccatatgtagtatttggaatttttctatatggaaaatttgtttctccctcccaccctaatttgtttacatcagtatggactcatgtatattttgtattttgggtaacacagtatttattttgttgcttaagttgtccagcttggctattaggagttctgccaggttggctactatgtccctttgatgtgcccatccttttgatttttgagcacttcttactttctggcactacaagatgctccaggttcatcttggatattccctgccccaaccctagaatccctagaatcaacccctgctccaaagagccctggttccttttgttggagaatcatacttagaaaccaagatctgggcattagatgtgcttgttgctactgggatgtcactgtttgtagcagagttgagaaatatgtatgtatattaatccatgcatatgtacacatctataattatttatgtgtgtacaaagctaaacatgagtttgtactgccgtcttcaactcaaaatttgtcccaaaattttgtggcatatgtttagattttaaagttgatattttccctattgacagaataaactcattaaaagagcaaaaaaaaaaaaaaaaaaaaaaaggc

SEQ ID NO: 4196 - DNA, 4169 bp, Homo sapiens
ccggcgcaggcgcacaggggacggttgctggcccaggtgagcgggcgcgctggtccaggtgagcgggcgcgtccccgcgacggcgctgcctgcccgaggcggttcacgtaaagacagcgagatcctgagggccagccgggaaggaggcgtggatatggagctggctgctgccaagtccggggcccgcgccgctgcctagcgcgtcctggggactctgtggggacgcgccccgcgccgcggctcggggacccgtagascccggcgctgcgcgcatggccctgctctcgcgccccgcgctcaccctcctgctcctcctcatggccgctgttgtcaggtgccaggagcaggcccagaccaccgactggagagccaccctgaagaccatccggaacggcgttcataagatagacacgtacctgaacgccgccttggacctcctgggaggcgaggacggtctctgccagtataaatgcagtgacggatctaagcctttcccacgttatggttataaaccctccccaccgaatggatgtggctctccactgtttggtgttcatcttaacattggtatcccttccctgacaaagtgttgcaaccaacacgacaggtgctatgaracctgtggcaaaagcaagaatgactgtgatgaagaattccagtattgcctctccaagatctgccgagatgtacagaaaacactaggactaactcagcatgttcaggcatgtgaaacaacagtggagctcttgtttgacagtgttatacatttaggttgtaaaccatatctggacagccaacgagccgcatgcaggtgtcattatgaagaaaaaactgatctttaaaggagatgccgacagctagtgacagatgaagatggaagaacatamcctttgacaaataactaatgtttttacaacataaaactgtcttatttttgtgaaaggattattttgagaccttaaaataatttatatcttgatgttaaaacctcaaagcaaaaaaagtgagggagatagtgaggggagggcacgcttgtcttctcaggtatcttccccagcattgctcccttacttagtatgccaaatgtcttgaccaatatcaaaaacaagtgcttgtttagcggagaattttgaaaagaggaatatataactcaattttcacaaccacatttaccaaaaaaagagatcaaatataaaattcatcataatgtctgttcaacattatcttatttggaaaatggggaaattatcacttacaagtatttgtttactatgaaattttaaatacacatttatgcctagaaggaacggactttttttttctattttaattacacataatatgtaattaaagtacaacataatatgttgtttctctgtagcccgttgagcatatgagtaagtcacatttctattaggactacttacaaggacaaggtttccatttttccagttgtaaaattggaaccatcagctgataacctcrtagggagcaaccccaggatagctaagtgttatgtaatatgcctagaaggtgatgtgaatgcgattcagaagcatagccactcccattttatgagctactcacatgacaaatgtcatcttttgctataacctttgccaagttagagaaaagatggatttaatgagataaatgaaaagatatttaacctaatatatcaaggcactatttgctgttatgctttgttatttatttcccagcacttgttccttattgtagattttttaaagactgtaaccttttactaactgtggtcttactaaaatttgtgcttgatactgcttttcaaaaagcctttaattagagccaaaaggatggaaaaggcaagatataaatgccttttatagatctcttatttacattgaaaattattaccatatgtttagagcaaatccaagaaaacttcaacagcttctgaagatgtctatgaatgttgaaaacttttcaatctcttggaatgctcagttatgttcctagaccggtctttgctgactactggttgttaacctttccctagcctgggacctcaagccatatatatcctttgggtgacccatggccaaagttattaagatgaactgactttcaaagtcagagaaggacagcatagggagaggcggttatttgtaagtcattacaggtagaacagggcagaaggaaaagtatgttctggagaaagggccatgttcctaactttggagatatgtcattgccgggaacctagtatcttccaacttgaattggtggcagctgttccagtgagacaaggcacatgtatgccttgtggctaagtgagcaaactgggtttccacttaaatgtttgggaccctcaattgattctttatttcaaacctttataaaaggtacagttttgtaagccattattaataattaatgcttatcggctgggcacagtggctcacacctataatcccagcactttgggaggctgaggcggttggatcacttgaggtcaggagtttgagaccagctggccaacatggtgaaacagcgtctctactaaaaatacaaaaatttgccgggcgtggtggcgcatgcttatagtctcagctactcaggaagctgaggtacgagaatcacttgaacccaggaggtggaggttgcagtgagctgagattgtgccactgcactgcagcctgggcaacagagcaagactctaaaaaaaaaatggtttatcaatatttactattgaaatatttgtccaggtaactttacacttacaatgaattcatggattttgttagcagcattggctttctcaaaaggacaaactcaatatcgttataaaatataattcgtgatcacaaattatacaaaaatcagtagaaacagttttttatgttcagattaaaaaaaaaaacttgggataattttagatttacagaaaagttgcaaagatacatggagagcttctgtgaccactcacccagttcccccagtgttaaccttttatttaaccatgaagcatttgtcagaagctaagtaaccagcaatggcaattactattaacggaactttgactttatttttcagattgtactagttttttaattaatgtcatttttcttttccaggatccaatctaggataccacactgaattagtcgtcatgcctaattagcctctggtctgtgatagttccacagtctttctttttcataaccttgacagttttgaggagtactggtcaggtgttttgtagaatattcctcaatttgggtttgtctgatgttttcctcatggttagagtggggttatagatttttaggaagaataccagaggtgaaggtccttctcactgcatcatgtcaggagttacatgctatcagcttgatggtgtattaactttggacacttggttaaggtagtgtgtgttggttttttgctgctgaaaattactgttattttccctttccatacttctgttctttggaaaacagtcactaagtccagtcatgggaggtggtgggtgggaaagattacattcaaccccctggaagtgggaatatccatatgtagtatttggaatttttctatatggaaaatttgtttctccctcccaccctaatttgtttacatcagtatggactcatgtatattttgtattttgggtaacacagtatttattttgttgcttaagttgtccagcttggctattaggagttctgccaggttggctactatgtccctttgatgtgcccatccttttgatttttgagcacttcttactttctggcactacaagatgctccaggttcatcttggatattccctgccccaaccctagaatccctagaatcaacccctgctccaaagagccctggttccttttgttggagaatcatacttagaaaccaagatctgggcattagatgtgcttgttgctactgggatgtcactgtttgtagcagagttgagaaatatgtatgtatattaatccatgcatatgtacacatctataattatttatgtgtgtacaaagctaaacatgagtttgtactgccgtcttcaactcaaaatttgtcccaaaattttgtggcatatgtttagattttaaagttgatattttccctattgacagaataaactcattaaaagagcaaaaaaaaaaaaaaaaaaaaaaaggc

SEQ ID NO: 4197 - DNA, 4163 bp, Homo sapiens
ccggcgcaggcgcacaggggacggttgctggcccaggtgagcgggcgcgctggtccaggtgagcgggcgcgtccccgcgacggcgctgcctgcccgaggcggttcacgtaaagacagcgagatcctgagggccagccgggaaggaggcgtggatatggagctggctgctgccaagtccggggcccgcgccgctgcctagcgcgtcctggggactctgtggggacgcgccccgcgccgcggctcggggacccgtagascccggcgctgcgcgcatggccctgctctcgcgccccgcgctcaccctcctgctcctcctcatggccgctgttgtcaggtgccaggagcaggcccagaccaccgactggagagccaccctgaagaccatccggaacggcgttcataagatagacacgtacctgaacgccgccttggacctcctgggaggcgaggacggtctctgccagtataaatgcagtgacggatctaagcctttcccacgttatggttataaaccctccccaccgaatggatgtggctctccactgtttggtcttaacattggtatcccttccctgacaaagtgttgcaaccaacacgacaggtgctatgaracctgtggcaaaagcaagaatgactgtgatgaagaattccagtattgcctctccaagatctgccgagatgtacagaaaacactaggactaactcagcatgttcaggcatgtgaaacaacagtggagctcttgtttgacagtgttatacatttaggttgtaaaccatatctggacagccaacgagccgcatgcaggtgtcattatgaagaaaaaactgatctttaaaggagatgccgacagctagtgacagatgaagatggaagaacatamcctttgacaaataactaatgtttttacaacataaaactgtcttatttttgtgaaaggattattttgagaccttaaaataatttatatcttgatgttaaaacctcaaagcaaaaaaagtgagggagatagtgaggggagggcacgcttgtcttctcaggtatcttccccagcattgctcccttacttagtatgccaaatgtcttgaccaatatcaaaaacaagtgcttgtttagcggagaattttgaaaagaggaatatataactcaattttcacaaccacatttaccaaaaaaagagatcaaatataaaattcatcataatgtctgttcaacattatcttatttggaaaatggggaaattatcacttacaagtatttgtttactatgaaattttaaatacacatttatgcctagaaggaacggactttttttttctattttaattacacataatatgtaattaaagtacaacataatatgttgtttctctgtagcccgttgagcatatgagtaagtcacatttctattaggactacttacaaggacaaggtttccatttttccagttgtaaaattggaaccatcagctgataacctcrtagggagcaaccccaggatagctaagtgttatgtaatatgcctagaaggtgatgtgaatgcgattcagaagcatagccactcccattttatgagctactcacatgacaaatgtcatcttttgctataacctttgccaagttagagaaaagatggatttaatgagataaatgaaaagatatttaacctaatatatcaaggcactatttgctgttatgctttgttatttatttcccagcacttgttccttattgtagattttttaaagactgtaaccttttactaactgtggtcttactaaaatttgtgcttgatactgcttttcaaaaagcctttaattagagccaaaaggatggaaaaggcaagatataaatgccttttatagatctcttatttacattgaaaattattaccatatgtttagagcaaatccaagaaaacttcaacagcttctgaagatgtctatgaatgttgaaaacttttcaatctcttggaatgctcagttatgttcctagaccggtctttgctgactactggttgttaacctttccctagcctgggacctcaagccatatatatcctttgggtgacccatggccaaagttattaagatgaactgactttcaaagtcagagaaggacagcatagggagaggcggttatttgtaagtcattacaggtagaacagggcagaaggaaaagtatgttctggagaaagggccatgttcctaactttggagatatgtcattgccgggaacctagtatcttccaacttgaattggtggcagctgttccagtgagacaaggcacatgtatgccttgtggctaagtgagcaaactgggtttccacttaaatgtttgggaccctcaattgattctttatttcaaacctttataaaaggtacagttttgtaagccattattaataattaatgcttatcggctgggcacagtggctcacacctataatcccagcactttgggaggctgaggcggttggatcacttgaggtcaggagtttgagaccagctggccaacatggtgaaacagcgtctctactaaaaatacaaaaatttgccgggcgtggtggcgcatgcttatagtctcagctactcaggaagctgaggtacgagaatcacttgaacccaggaggtggaggttgcagtgagctgagattgtgccactgcactgcagcctgggcaacagagcaagactctaaaaaaaaaatggtttatcaatatttactattgaaatatttgtccaggtaactttacacttacaatgaattcatggattttgttagcagcattggctttctcaaaaggacaaactcaatatcgttataaaatataattcgtgatcacaaattatacaaaaatcagtagaaacagttttttatgttcagattaaaaaaaaaaacttgggataattttagatttacagaaaagttgcaaagatacatggagagcttctgtgaccactcacccagttcccccagtgttaaccttttatttaaccatgaagcatttgtcagaagctaagtaaccagcaatggcaattactattaacggaactttgactttatttttcagattgtactagttttttaattaatgtcatttttcttttccaggatccaatctaggataccacactgaattagtcgtcatgcctaattagcctctggtctgtgatagttccacagtctttctttttcataaccttgacagttttgaggagtactggtcaggtgttttgtagaatattcctcaatttgggtttgtctgatgttttcctcatggttagagtggggttatagatttttaggaagaataccagaggtgaaggtccttctcactgcatcatgtcaggagttacatgctatcagcttgatggtgtattaactttggacacttggttaaggtagtgtgtgttggttttttgctgctgaaaattactgttattttccctttccatacttctgttctttggaaaacagtcactaagtccagtcatgggaggtggtgggtgggaaagattacattcaaccccctggaagtgggaatatccatatgtagtatttggaatttttctatatggaaaatttgtttctccctcccaccctaatttgtttacatcagtatggactcatgtatattttgtattttgggtaacacagtatttattttgttgcttaagttgtccagcttggctattaggagttctgccaggttggctactatgtccctttgatgtgcccatccttttgatttttgagcacttcttactttctggcactacaagatgctccaggttcatcttggatattccctgccccaaccctagaatccctagaatcaacccctgctccaaagagccctggttccttttgttggagaatcatacttagaaaccaagatctgggcattagatgtgcttgttgctactgggatgtcactgtttgtagcagagttgagaaatatgtatgtatattaatccatgcatatgtacacatctataattatttatgtgtgtacaaagctaaacatgagtttgtactgccgtcttcaactcaaaatttgtcccaaaattttgtggcatatgtttagattttaaagttgatattttccctattgacagaataaactcattaaaagagcaaaaaaaaaaaaaaaaaaaaaaaggc

SEQ ID NO: 4198 - DNA, 4119 bp, Homo sapiens
ccggcgcaggcgcacaggggacggttgctggcccaggtgagcgggcgcgctggtccaggtgagcgggcgcgtccccgcgacggcgctgcctgcccgaggcggttcacgtaaagacagcgagatcctgagggccagccgggaaggaggcgtggatatggagctggctgctgccaagtccggggcccgcgccgctgcctagcgcgtcctggggactctgtggggacgcgccccgcgccgcggctcggggacccgtagascccggcgctgcgcgcatggccctgctctcgcgccccgcgctcaccctcctgctcctcctcatggccgctgttgtcaggtgccaggagcaggcccagaccaccgactggagagccaccctgaagaccatccggaacggcgttcataagatagacacgtacctgaacgccgccttggacctcctgggaggcgaggacggtctctgccagtataaatgcagtgacggatctaagcctttcccacgttatggttataaaccctccccaccgaatggatgtggctctccactgtttggtgttcatgtgctatgaracctgtggcaaaagcaagaatgactgtgatgaagaattccagtattgcctctccaagatctgccgagatgtacagaaaacactaggactaactcagcatgttcaggcatgtgaaacaacagtggagctcttgtttgacagtgttatacatttaggttgtaaaccatatctggacagccaacgagccgcatgcaggtgtcattatgaagaaaaaactgatctttaaaggagatgccgacagctagtgacagatgaagatggaagaacatamcctttgacaaataactaatgtttttacaacataaaactgtcttatttttgtgaaaggattattttgagaccttaaaataatttatatcttgatgttaaaacctcaaagcaaaaaaagtgagggagatagtgaggggagggcacgcttgtcttctcaggtatcttccccagcattgctcccttacttagtatgccaaatgtcttgaccaatatcaaaaacaagtgcttgtttagcggagaattttgaaaagaggaatatataactcaattttcacaaccacatttaccaaaaaaagagatcaaatataaaattcatcataatgtctgttcaacattatcttatttggaaaatggggaaattatcacttacaagtatttgtttactatgaaattttaaatacacatttatgcctagaaggaacggactttttttttctattttaattacacataatatgtaattaaagtacaacataatatgttgtttctctgtagcccgttgagcatatgagtaagtcacatttctattaggactacttacaaggacaaggtttccatttttccagttgtaaaattggaaccatcagctgataacctcrtagggagcaaccccaggatagctaagtgttatgtaatatgcctagaaggtgatgtgaatgcgattcagaagcatagccactcccattttatgagctactcacatgacaaatgtcatcttttgctataacctttgccaagttagagaaaagatggatttaatgagataaatgaaaagatatttaacctaatatatcaaggcactatttgctgttatgctttgttatttatttcccagcacttgttccttattgtagattttttaaagactgtaaccttttactaactgtggtcttactaaaatttgtgcttgatactgcttttcaaaaagcctttaattagagccaaaaggatggaaaaggcaagatataaatgccttttatagatctcttatttacattgaaaattattaccatatgtttagagcaaatccaagaaaacttcaacagcttctgaagatgtctatgaatgttgaaaacttttcaatctcttggaatgctcagttatgttcctagaccggtctttgctgactactggttgttaacctttccctagcctgggacctcaagccatatatatcctttgggtgacccatggccaaagttattaagatgaactgactttcaaagtcagagaaggacagcatagggagaggcggttatttgtaagtcattacaggtagaacagggcagaaggaaaagtatgttctggagaaagggccatgttcctaactttggagatatgtcattgccgggaacctagtatcttccaacttgaattggtggcagctgttccagtgagacaaggcacatgtatgccttgtggctaagtgagcaaactgggtttccacttaaatgtttgggaccctcaattgattctttatttcaaacctttataaaaggtacagttttgtaagccattattaataattaatgcttatcggctgggcacagtggctcacacctataatcccagcactttgggaggctgaggcggttggatcacttgaggtcaggagtttgagaccagctggccaacatggtgaaacagcgtctctactaaaaatacaaaaatttgccgggcgtggtggcgcatgcttatagtctcagctactcaggaagctgaggtacgagaatcacttgaacccaggaggtggaggttgcagtgagctgagattgtgccactgcactgcagcctgggcaacagagcaagactctaaaaaaaaaatggtttatcaatatttactattgaaatatttgtccaggtaactttacacttacaatgaattcatggattttgttagcagcattggctttctcaaaaggacaaactcaatatcgttataaaatataattcgtgatcacaaattatacaaaaatcagtagaaacagttttttatgttcagattaaaaaaaaaaacttgggataattttagatttacagaaaagttgcaaagatacatggagagcttctgtgaccactcacccagttcccccagtgttaaccttttatttaaccatgaagcatttgtcagaagctaagtaaccagcaatggcaattactattaacggaactttgactttatttttcagattgtactagttttttaattaatgtcatttttcttttccaggatccaatctaggataccacactgaattagtcgtcatgcctaattagcctctggtctgtgatagttccacagtctttctttttcataaccttgacagttttgaggagtactggtcaggtgttttgtagaatattcctcaatttgggtttgtctgatgttttcctcatggttagagtggggttatagatttttaggaagaataccagaggtgaaggtccttctcactgcatcatgtcaggagttacatgctatcagcttgatggtgtattaactttggacacttggttaaggtagtgtgtgttggttttttgctgctgaaaattactgttattttccctttccatacttctgttctttggaaaacagtcactaagtccagtcatgggaggtggtgggtgggaaagattacattcaaccccctggaagtgggaatatccatatgtagtatttggaatttttctatatggaaaatttgtttctccctcccaccctaatttgtttacatcagtatggactcatgtatattttgtattttgggtaacacagtatttattttgttgcttaagttgtccagcttggctattaggagttctgccaggttggctactatgtccctttgatgtgcccatccttttgatttttgagcacttcttactttctggcactacaagatgctccaggttcatcttggatattccctgccccaaccctagaatccctagaatcaacccctgctccaaagagccctggttccttttgttggagaatcatacttagaaaccaagatctgggcattagatgtgcttgttgctactgggatgtcactgtttgtagcagagttgagaaatatgtatgtatattaatccatgcatatgtacacatctataattatttatgtgtgtacaaagctaaacatgagtttgtactgccgtcttcaactcaaaatttgtcccaaaattttgtggcatatgtttagattttaaagttgatattttccctattgacagaataaactcattaaaagagcaaaaaaaaaaaaaaaaaaaaaaaggc

SEQ ID NO: 4199 - DNA, 2027 bp, Homo sapiens
ggcggggccggcaggggcggtgcgcgggaagggaccccggacccggaggtcgcggagagctgggcagtgttggccgctggcggagcgctggggcagcatgaagtgcctggtcacgggcggcaacgtgaaggtgctcggcaaggccgtccactccctgtcccgcatcggggacgagctctacctggaacccttggaggacgggctctccctccggacggtgaactcctcccgctctgcctatgcctgctttctctttgccccgctcttcttccagcaataccaggcagccacccctggtcaggacctgcwgcgctgtaagatcctgatgaagtctttcctgtctgtcttccgctcactggcgatgctggagaagacggtggaaaaatgctgcatckccctgaatggccggagcagccgcctggtggtccagctgcattgcaagttcgggttctgggggaggctgttctgcccttctctcctgcactggctgaagtgacgctgggcattggccgtggccgcagggtcatcctgcgcagctaccacgaggaggaggcagacagcactgccaargccatggtgactgagatgtgccttggagaggargatttccagcagctgcaggcccaggaaggggtggccatcactttctgcctcaaggaattccgggggctcctgagctttgcagagtcagcaaacttgaatcttagcattcrttttgatgctccaggcaggcccgccatcttcaccatcaaggactctttgctggayggccactttgtcttggccacactctcagacaccgactcgcactcccaggacctgggctccccagagcgtcaccagccagtgcctcagctccaggctcacagcacaccccacccggacgactttgccaatgacgacattgactcttacatgatcgccatggaaaccactataggcaatgagggctcgcgggtgctgccctccatttccctttcacctggcccccagccccccaagagccccggyccccactccgaggaggaagatgaggctgagcccagtacagtgcctgggactcccccacccaagaagttccgctcactgttcttcggctccwtcctggcccctgtacgctccccccagggccccagccctgtgctggcggaagacagygagggtgaaggctgaaccaagaacctgaagcctgtacccagaggccttggactagacraagccccagccagtggcagaactgggtctctcagccctggggatcagaaaggtgggcttgctggagctgagctgtttcactgcctctcgcaggccccagctggctgtcactgtaaagctgtcccacagcggtcgggcctgggccgttatctccccacaacccccagccaatcaggactttccagacttggccctgaactactgacgttcctacctcttatttctcattgagcctcaggctatactccagctggccaaggctggaaacctgtctccctcaggctcaccttcctaaggaaaatgtcatagtaggtgctgctggcccctggtgatccagcttctctgccaatcatgacctgttccttcctgaagtcctgggcatgcatctgggacccccgtggagctgacaagttttccttgctttcctgatactctttggcgctgacttggaattctaagagccttggacccgagtgtgtggctagggttgccctggctggggcccggtgccgagactcccaagcggctctgtgcagaagagctgccaggcagtgtcttagatgtgagacggaggccatggcgagaatccagctttgacctttattcaagagaccagatgggttgccccaggatccggctgccagccctgaggccaagcacggctggagacccacgacctggcctgccrttgccctgagctgcagcctcggccccaggatcctgctcacagtcaccgcaggtgcaggcaggaagcagccctgggggactggacgctgctattgattcattaaaaaaagaaaagaaaaatacac

SEQ ID NO: 4200 - DNA, 2127 bp, Homo sapiens
ggcggggccggcaggggcggtgcgcgggaagggaccccggacccggaggtcgcggagagctgggcagtgttggccgctggcggagcgctggggcagcatgaagtgcctggtcacgggcggcaacgtgaaggtgctcggcaaggccgtccactccctgtcccgcatcggggacgagctctacctggaacccttggaggacgggctctccctccggacggtgaactcctcccgctctgcctatgcctgctttctctttgccccgctcttcttccagcaataccaggcagccacccctggtcaggacctgcwgcgctgtaagatcctgatgaagtctttcctgtctgtcttccgctcactggcgatgctggagaagacggtggaaaaatgctgcatckccctgaatggccggagcagccgcctggtggtccagctgcattgcaagttcggggtgcggaagactcacaacctgtccttccaggactgtgagtccctgcaggccgtcttcgacccagcctcgtgcccccacatgctccgcgccccagcacgggttctgggggaggctgttctgcccttctctcctgcactggctgaagtgacgctgggcattggccgtggccgcagggtcatcctgcgcagctaccacgaggaggaggcagacagcactgccaargccatggtgactgagatgtgccttggagaggargatttccagcagctgcaggcccaggaaggggtggccatcactttctgcctcaaggaattccgggggctcctgagctttgcagagtcagcaaacttgaatcttagcattcrttttgatgctccaggcaggcccgccatcttcaccatcaaggactctttgctggayggccactttgtcttggccacactctcagacaccgactcgcactcccaggacctgggctccccagagcgtcaccagccagtgcctcagctccaggctcacagcacaccccacccggacgactttgccaatgacgacattgactcttacatgatcgccatggaaaccactataggcaatgagggctcgcgggtgctgccctccatttccctttcacctggcccccagccccccaagagccccggyccccactccgaggaggaagatgaggctgagcccagtacagtgcctgggactcccccacccaagaagttccgctcactgttcttcggctccwtcctggcccctgtacgctccccccagggccccagccctgtgctggcggaagacagygagggtgaaggctgaaccaagaacctgaagcctgtacccagaggccttggactagacraagccccagccagtggcagaactgggtctctcagccctggggatcagaaaggtgggcttgctggagctgagctgtttcactgcctctcgcaggccccagctggctgtcactgtaaagctgtcccacagcggtcgggcctgggccgttatctccccacaacccccagccaatcaggactttccagacttggccctgaactactgacgttcctacctcttatttctcattgagcctcaggctatactccagctggccaaggctggaaacctgtctccctcaggctcaccttcctaaggaaaatgtcatagtaggtgctgctggcccctggtgatccagcttctctgccaatcatgacctgttccttcctgaagtcctgggcatgcatctgggacccccgtggagctgacaagttttccttgctttcctgatactctttggcgctgacttggaattctaagagccttggacccgagtgtgtggctagggttgccctggctggggcccggtgccgagactcccaagcggctctgtgcagaagagctgccaggcagtgtcttagatgtgagacggaggccatggcgagaatccagctttgacctttattcaagagaccagatgggttgccccaggatccggctgccagccctgaggccaagcacggctggagacccacgacctggcctgccrttgccctgagctgcagcctcggccccaggatcctgctcacagtcaccgcaggtgcaggcaggaagcagccctgggggactggacgctgctattgattcattaaaaaaagaaaagaaaaatacac

SEQ ID NO: 4201 - DNA, 2095 bp, Homo sapiens
ggcggggccggcaggggcggtgcgcgggaagggaccccggacccggaggtcgcggagagctgggcagtgttggccgctggcggagcgctggggcagcatgaagtgcctggtcacgggcggcaacgtgaaggtgctcggcaaggccgtccactccctgtcccgcatcggggacgagctctacctggaacccttggaggacgggctctccctccggacggtgaactcctcccgctctgcctatgcctgctttctctttgccccgctcttcttccagcaataccaggcagccacccctggtcaggacctgcwgcgctgtaagatcctgatgaagtctttcctgtctgtcttccgctcactggcgatgctggagaagacggtggaaaaatgctgcatckccctgaatggccggagcagccgcctggtggtccagctgcattgcaagttcggactgtgagtccctgcaggccgtcttcgacccagcctcgtgcccccacatgctccgcgccccagcacgggttctgggggaggctgttctgcccttctctcctgcactggctgaagtgacgctgggcattggccgtggccgcagggtcatcctgcgcagctaccacgaggaggaggcagacagcactgccaargccatggtgactgagatgtgccttggagaggargatttccagcagctgcaggcccaggaaggggtggccatcactttctgcctcaaggaattccgggggctcctgagctttgcagagtcagcaaacttgaatcttagcattcrttttgatgctccaggcaggcccgccatcttcaccatcaaggactctttgctggayggccactttgtcttggccacactctcagacaccgactcgcactcccaggacctgggctccccagagcgtcaccagccagtgcctcagctccaggctcacagcacaccccacccggacgactttgccaatgacgacattgactcttacatgatcgccatggaaaccactataggcaatgagggctcgcgggtgctgccctccatttccctttcacctggcccccagccccccaagagccccggyccccactccgaggaggaagatgaggctgagcccagtacagtgcctgggactcccccacccaagaagttccgctcactgttcttcggctccwtcctggcccctgtacgctccccccagggccccagccctgtgctggcggaagacagygagggtgaaggctgaaccaagaacctgaagcctgtacccagaggccttggactagacraagccccagccagtggcagaactgggtctctcagccctggggatcagaaaggtgggcttgctggagctgagctgtttcactgcctctcgcaggccccagctggctgtcactgtaaagctgtcccacagcggtcgggcctgggccgttatctccccacaacccccagccaatcaggactttccagacttggccctgaactactgacgttcctacctcttatttctcattgagcctcaggctatactccagctggccaaggctggaaacctgtctccctcaggctcaccttcctaaggaaaatgtcatagtaggtgctgctggcccctggtgatccagcttctctgccaatcatgacctgttccttcctgaagtcctgggcatgcatctgggacccccgtggagctgacaagttttccttgctttcctgatactctttggcgctgacttggaattctaagagccttggacccgagtgtgtggctagggttgccctggctggggcccggtgccgagactcccaagcggctctgtgcagaagagctgccaggcagtgtcttagatgtgagacggaggccatggcgagaatccagctttgacctttattcaagagaccagatgggttgccccaggatccggctgccagccctgaggccaagcacggctggagacccacgacctggcctgccrttgccctgagctgcagcctcggccccaggatcctgctcacagtcaccgcaggtgcaggcaggaagcagccctgggggactggacgctgctattgattcattaaaaaaagaaaagaaaaatacac

SEQ ID NO: 4202 - DNA, 721 bp, Homo sapiens
cgaggccttcgctggagtttcgccgccgcagtcttcgccaccagccgctgcgcggccctgcgcatgctgctggcagatcagggccagagctggaaggaggaggtggtgaccgtggagacgtggcaggagggctcactcaaagcctcctgcctatabgggcagctccccaagttccaggacggagacctcaccctgtaccagtccaataccatcctgcgtcacctgggccgcacccttgggctctatgggaaggaccagcaggaggcagccctggtggacatggtgaatgacggcgtggaggacctccgctgcaaatacrtctccctcatctacaccaactatgaggygggcaaggatgactatgtgaaggcactgcccgggcaactgaagccttttgagaccctgctgtcccagaaccagggaggcaagaccttcattgtgggagaccagatctccttcgctgactacaacctgctggacttgctgctgatccatgaggtcctagcccctggctgcctggatgcgttccccctgctctcagcatatgtggggcgcctcagygcccggcccaagctcaaggccttcctggcctcccctgagtacgtgaacctccccatcaatggcaacgggaaacagtgagggttggggggactytgagcgggaggcagagtttgccttcctttctccaggaccaataaaatttctaagagagctactatga

SEQ ID NO: 4203 - DNA, 876 bp, Homo sapiens
gcggccgccggggctggggccggcgggagtccgcgggaccctccagaagagcggccggcgccgtgactcagcactggggcggagcggggcgggaccacccttataaggctcggaggccgcgaggccttcgctggagtttcgccgccgcagtcttcgccaccatgccgccctacaccgtggtctatttcccagttcgaggccgctgcgcggccctgcgcatgctgctggcagatcagggccagagctggaaggaggaggtggtgaccgtggagacgtggcaggagggctcactcaaagcctcctgcctatabgggcagctccccaagttccaggacggagacctcaccctgtaccagtccaataccatcctgcgtcacctgggccgcacccttgggctctatgggaaggaccagcaggaggcagccctggtggacatggtgaatgacggcgtggaggacctccgctgcaaatacrtctccctcatctacaccaactatgaggygggcaaggatgactatgtgaaggcactgcccgggcaactgaagccttttgagaccctgctgtcccagaaccagggaggcaagaccttcattgtgggagaccagatctccttcgctgactacaacctgctggacttgctgctgatccatgaggtcctagcccctggctgcctggatgcgttccccctgctctcagcatatgtggggcgcctcagygcccggcccaagctcaaggccttcctggcctcccctgagtacgtgaacctccccatcaatggcaacgggaaacagtgagggttggggggactytgagcgggaggcagagtttgccttcctttctccaggaccaataaaatttctaagagagctactatga

SEQ ID NO: 4204 - DNA, 1323 bp, Homo sapiens
atgtccaacagcgagaagctcaacctggactcaatcatcgggcgcttgctggaagcttgggtcctgacaccccattgcgccccagtgcagggctcgcggcctggcaagaatgtacagctgacagagaacgagatccgcggtctgtgcctgaaatcccgggagatttttctgagccagcccattcttctggagctggaggcacccctcaagatctgcggtgacatacacggccagtactacgaccttctgcgactatttgagtatggcggtttccctcccgagagcaactacctctttctgggggactatgtggacaggggcaagcagtccttggagaccatctgcctgctgctggcctataagatcaagtaccccgagaacttcttcctgctccgtgggaaccacgagtgtgccagcatcaaccgcatctatggtttctacgatgagtgcaagagacgctacaacatcaaactgtggaaaaccttcactgactgcttcaactgcctgcccatcgcggccatagtggacgaaaagatcttctgctgccacggaggcctgtccccggacctgcagtctatggagcagattcggcggatcatgcggcccacagatgtgcctgaccagggcctgctgtgtgacctgctgtggtctgaccctgacaaggacgtgcagggctggggcgagaacgaccgtggcgtctcttttacctttggagccgaggtggtggccaagttcctccacaagcacgacttggacctcatctgccgagcacaccaggtggtagaagacggctaygagttctttgccaagcggcagctggtgacacttttctcagctcccaactactgtggcgagtttgacaatgctggcgccatgatgagtgtggacgagaccctcatgtgctctttccagatcctcaagcccgccgacaagaacaaggggaagtacgggcagttcagtggcctgaaccctggaggccgacccatcaccccaccccgcaattccgccaaagccaagaaatagcccccgcacaccaccctgtgccccagatgatggattgattgtacagaaatcatgctgccatgctgggggggggtcaccccgacccctmaggcccacctgtcacggggaacatggagccttggtgtatttttcttttctttttttaatgaatcaatagcagcgtccagtcccccagggctgcttcctggggcaayggcaggccaggtcgtgggtctccagccgtgcttggcctcagggctggcagccggatcctggggcaacccatctggtctcttgaataaaggtcaaagctggattctc

SEQ ID NO: 4205 - DNA, 2092 bp, Homo sapiens
ggccgcaggccaggggggaaatggggcgggcggaaggagagccaggccggaaagaggctaccggagggcgggaagcaggggcgggccaggagcagatgggatggaggcggcggggccgccatgtccaacagcgagaagctcaacctggactcaatcatcgggcgcttgctggaagcttgtgcagggctcgcggcctggcaagaatgtacagctgacagagaacgagatccgcggtctgtgcctgaaatcccgggagatttttctgagccagcccattcttctggagctggaggcacccctcaagatctgcggtgacatacacggccagtactacgaccttctgcgactatttgagtatggcggtttccctcccgagagcaactacctctttctgggggactatgtggacaggggcaagcagtccttggagaccatctgcctgctgctggcctataagatcaagtaccccgagaacttcttcctgctccgtgggaaccacgagtgtgccagcatcaaccgcatctatggtttctacgatgagtgcaagagacgctacaacatcaaactgtggaaaaccttcactgactgcttcaactgcctgcccatcgcggccatagtggacgaaaagatcttctgctgccacggaggcctgtccccggacctgcagtctatggagcagattcggcggatcatgcggcccacagatgtgcctgaccagggcctgctgtgtgacctgctgtggtctgaccctgacaaggacgtgcagggctggggcgagaacgaccgtggcgtctcttttacctttggagccgaggtggtggccaagttcctccacaagcacgacttggacctcatctgccgagcacaccaggtggtagaagacggctaygagttctttgccaagcggcagctggtgacacttttctcagctcccaactactgtggcgagtttgacaatgctggcgccatgatgagtgtggacgagaccctcatgtgctctttccagatcctcaagcccgccgacaagaacaaggggaagtacgggcagttcagtggcctgaaccctggaggccgacccatcaccccaccccgcaattccgccaaagccaagaaatagcccccgcacaccaccctgtgccccagatgatggattgattgtacagaaatcatgctgccatgctgggggggggtcaccccgacccctmaggcccacctgtcacggggaacatggagccttggtgtatttttcttttctttttttaatgaatcaatagcagcgtccagtcccccagggctgcttcctgcctgcacctgcggtgactgtgagcaggatcctggggccgaggctgcagctcagggcaayggcaggccaggtcgtgggtctccagccgtgcttggcctcagggctggcagccggatcctggggcaacccatctggtctcttgaataaaggtcaaagctggattctcgccatggcctccgtctcacatctaagacactgcctggcagctcttctgcacagagccgcttgggagtctcggcaccgggccccagccagggcaaccctagccacacactcgggtccaaggctcttagaattccaagtcagcgccaaagagtatcaggaaagcaaggaaaacttgtcagctccacgggggtcccagatgcatgcccaggacttcaggaaggaacaggtcatgattggcagagaagctggatcaccaggggccagcagcacctactatgacattttccttaggaaggtgagcctgagggagacaggtttccagccttggccagctggagtatagcctgaggctcaatgagaaataagaggtaggaacgtcagtagttcagggccaagtctggaaagtcctgattggctgggggttgtggggagataacggcccaggcccgaccgctgtgggacagctttacagtgacagccagctggggcctgcgagaggcagtgaaacagctcagctccagcaagcccacctttctgatccccagggctgagagacccagttctgccactggctggggcttygtctagtccaaggcctctgggtacaggcttcaggttcttggt

SEQ ID NO: 4206 - DNA, 2110 bp, Homo sapiens
gggaaatggggcgggcggaaggagagccaggccggaaagaggctaccggagggcgggaagcaggggcgggccaggagcagatgggatggaggcggcggggccgccatgtccaacagcgagaagctcaacctggactcaatcatcgggcgcttgctggaagcttgggtccagggtcctgacaccccattgcgccccagtgcagggctcgcggcctggcaagaatgtacagctgacagagaacgagatccgcggtctgtgcctgaaatcccgggagatttttctgagccagcccattcttctggagctggaggcacccctcaagatctgcggtgacatacacggccagtactacgaccttctgcgactatttgagtatggcggtttccctcccgagagcaactacctctttctgggggactatgtggacaggggcaagcagtccttggagaccatctgcctgctgctggcctataagatcaagtaccccgagaacttcttcctgctccgtgggaaccacgagtgtgccagcatcaaccgcatctatggtttctacgatgagtgcaagagacgctacaacatcaaactgtggaaaaccttcactgactgcttcaactgcctgcccatcgcggccatagtggacgaaaagatcttctgctgccacggaggcctgtccccggacctgcagtctatggagcagattcggcggatcatgcggcccacagatgtgcctgaccagggcctgctgtgtgacctgctgtggtctgaccctgacaaggacgtgcagggctggggcgagaacgaccgtggcgtctcttttacctttggagccgaggtggtggccaagttcctccacaagcacgacttggacctcatctgccgagcacaccaggtggtagaagacggctaygagttctttgccaagcggcagctggtgacacttttctcagctcccaactactgtggcgagtttgacaatgctggcgccatgatgagtgtggacgagaccctcatgtgctctttccagatcctcaagcccgccgacaagaacaaggggaagtacgggcagttcagtggcctgaaccctggaggccgacccatcaccccaccccgcaattccgccaaagccaagaaatagcccccgcacaccaccctgtgccccagatgatggattgattgtacagaaatcatgctgccatgctgggggggggtcaccccgacccctmaggcccacctgtcacggggaacatggagccttggtgtatttttcttttctttttttaatgaatcaatagcagcgtccagtcccccagggctgcttcctgcctgcacctgcggtgactgtgagcaggatcctggggccgaggctgcagctcagggcaayggcaggccaggtcgtgggtctccagccgtgcttggcctcagggctggcagccggatcctggggcaacccatctggtctcttgaataaaggtcaaagctggattctcgccatggcctccgtctcacatctaagacactgcctggcagctcttctgcacagagccgcttgggagtctcggcaccgggccccagccagggcaaccctagccacacactcgggtccaaggctcttagaattccaagtcagcgccaaagagtatcaggaaagcaaggaaaacttgtcagctccacgggggtcccagatgcatgcccaggacttcaggaaggaacaggtcatgattggcagagaagctggatcaccaggggccagcagcacctactatgacattttccttaggaaggtgagcctgagggagacaggtttccagccttggccagctggagtatagcctgaggctcaatgagaaataagaggtaggaacgtcagtagttcagggccaagtctggaaagtcctgattggctgggggttgtggggagataacggcccaggcccgaccgctgtgggacagctttacagtgacagccagctggggcctgcgagaggcagtgaaacagctcagctccagcaagcccacctttctgatccccagggctgagagacccagttctgccactggctggggcttygtctagtccaaggcctctgggtacaggcttcaggttcttggt

SEQ ID NO: 4207 - DNA, 1604 bp, Homo sapiens
gaagttgaaggggcgcagcgataccggtgcgcggcgctggcgtcgggcgcgtgacgtctttcctgcgcgccacctagcgtctctatcrcgccagttcctcagcctcagtgctatgaaggtgacagcgtgaggtgacccatctggcccgccgcgatgctggcaacacggcggctgctcggctggtcgcttcccgcgcggacagcacccaagaaaacctcatttggctcgctgaaggatgaagaccggattttcaccaacctgtacggccgccatgactggaggctgaaaggttccctgagtygaggtgactggtacaagacaaaggagatcytgctgaaggggcccgactggwtcctgggcgagatcaagacatcgggtttgaggggccgtggaggcgctggcttccccactggcctcaagtggagcttcatgaataagccctcagatggcaggcccaagtatctggtggtgaacgcagacgagggggagccgggcacctgcaaggaccgggagatcttacgccatgatcctcacaagctgctggaaggctgcctggtggggggccgggccatgggcgcccgcgctgcctatatctacatccgaggggaattctacaatgaggcctccaatctgcaggtggccatccgagaggcctatgaggcaggtctgattggcaagaatgcttgtggctctggctatgattttgacgtgtttgtggtgcgcggggctggggcctrcatckgtggagaggagacagygctcatcragtccattgagggcaagcagggcaagccccgcctgaagccccccttccccgcagacgtgggagtgtttggctgccccacaactgtggccaacgtggagacagtggcagtgtcccccacaatctgccgccgtggaggtacctggtttgctggctttggcagagaacgcaactcaggcaccaaactattcwacatctctggccatgtcaaccacccttgcactgtggaggaggagatgtctgtgcccttgaaagaactgattgagaagcatgctgggggtgtcacgggcggctgggacaacctccttgctgtgatccctggcggctcgtctaccccactgatccccaagtctgtgtgtgagacggtgctgatggacttcgatgygctggtgcaggcacagacaggcctgggcacagctgcggtgatcgtcatggaccgctcgacggacatcgtgaaagccatcgcccgcctcattgagttctataagcacgagagctgtggccagtgtaccccatgccgtgagggtgtggactggatgaacaaggtgatggcacgtttcgtgaggggggatgcccggccggccgagatcgactccctgtgggagatcagcaagcagatagaaggccataygatttgtgctctgggtgacggggccscctggcctgtgcagggtctgatccgccactttcggccggagctcgaggagcggatgcagcggtttgcccagcagcatcaggcccggcaggctgcctyttagcccmccmccctggcctgctgtcctgcgtctatmcatgtggaatgctggacaataaagcgagtgctgcccaccctccagctgcc

SEQ ID NO: 4208 - DNA, 1532 bp, Homo sapiens
crcgccagttcctcagcctcagtgctatgaaggtgacccatctggcccgccgcgatgctggcaacacggcggctgctcggctggtcgcttcccgcgcgggtatctgtgcgtttcagcggcgacacgacagcacccaagaaaacctcatttggctcgctgaaggatgaagaccggattttcaccaacctgtacggccgccatgactggaggctgaaaggttccctgagtygaggtgactggtacaagacaaaggagatcytgctgaaggggcccgactggwtcctgggcgagatcaagacatcgggtttgaggggccgtggaggcgctggcttccccactggcctcaagtggagcttcatgaataagccctcagatggcaggcccaagtatctggtggtgaacgcagacgagggggagccgggcacctgcaaggaccgggagatcttacgccatgatcctcacaagctgctggaaggctgcctggtggggggccgggccatgggcgcccgcgctgcctatatctacatccgaggggaattctacaatgaggcctccaatctgcaggtggccatccgagaggcctatgaggcaggtctgattggcaagaatgcttgtggctctggctatgattttgacgtgtttgtggtgcgcggggctggggcctrcatckgtggagaggagacagygctcatcragtccattgagggcaagcagggcaagccccgcctgaagccccccttccccgcagacgtgggagtgtttggctgccccacaactgtggccaacgtggagacagtggcagtgtcccccacaatctgccgccgtggaggtacctggtttgctggctttggcagagaacgcaactcaggcaccaaactattcwacatctctggccatgtcaaccacccttgcactgtggaggaggagatgtctgtgcccttgaaagaactgattgagaagcatgctgggggtgtcacgggcggctgggacaacctccttgctgtgatccctggcggctcgtctaccccactgatccccaagtctgtgtgtgagacggtgctgatggacttcgatgygctggtgcaggcacagacaggcctgggcacagctgcggtgatcgtcatggaccgctcgacggacatcgtgaaagccatcgcccgcctcattgagttctataagcacgagagctgtggccagtgtaccccatgccgtgagggtgtggactggatgaacaaggtgatggcacgtttcgtgaggggggatgcccggccggccgagatcgactccctgtgggagatcagcaagcagatagaaggccataygatttgtgctctgggtgacggggccscctggcctgtgcagggtctgatccgccactttcggccggagctcgaggagcggatgcagcggtttgcccagcagcatcaggcccggcaggctgcctyttagcccmccmccctggcctgctgtcctgcgtctatmcatgtggaatgctggacaataaagcgagtgctgcccaccctccagctgcc

SEQ ID NO: 4209 - DNA, 1631 bp, Homo sapiens
gaagttgaaggggcgcagcgataccggtgcgcggcgctggcgtcgggcgcgtgacgtctttcctgcgcgccacctagcgtctctatcrcgccagttcctcagcctcagtgctatgaaggtgacagcgtgaggtgacccatctggcccgccgcgatgctggcaacacggcggctgctcggctggtcgcttcccgcgcgggtatctgtgcgtttcagcggcgacacgacagcacccaagaaaacctcatttggctcgctgaaggatgaagaccggattttcaccaacctgtacggccgccatgactggaggctgaaaggttccctgagtygaggtgactggtacaagacaaaggagatcytgctgaaggggcccgactggwtcctgggcgagatcaagacatcgggtttgaggggccgtggaggcgctggcttccccactggcctcaagtggagcttcatgaataagccctcagatggcaggcccaagtatctggtggtgaacgcagacgagggggagccgggcacctgcaaggaccgggagatcttacgccatgatcctcacaagctgctggaaggctgcctggtggggggccgggccatgggcgcccgcgctgcctatatctacatccgaggggaattctacaatgaggcctccaatctgcaggtggccatccgagaggcctatgaggcaggtctgattggcaagaatgcttgtggctctggctatgattttgacgtgtttgtggtgcgcggggctggggcctrcatckgtggagaggagacagygctcatcragtccattgagggcaagcagggcaagccccgcctgaagccccccttccccgcagacgtgggagtgtttggctgccccacaactgtggccaacgtggagacagtggcagtgtcccccacaatctgccgccgtggaggtacctggtttgctggctttggcagagaacgcaactcaggcaccaaactattcwacatctctggccatgtcaaccacccttgcactgtggaggaggagatgtctgtgcccttgaaagaactgattgagaagcatgctgggggtgtcacgggcggctgggacaacctccttgctgtgatccctggcggctcgtctaccccactgatccccaagtctgtgtgtgagacggtgctgatggacttcgatgygctggtgcaggcacagacaggcctgggcacagctgcggtgatcgtcatggaccgctcgacggacatcgtgaaagccatcgcccgcctcattgagttctataagcacgagagctgtggccagtgtaccccatgccgtgagggtgtggactggatgaacaaggtgatggcacgtttcgtgaggggggatgcccggccggccgagatcgactccctgtgggagatcagcaagcagatagaaggccataygatttgtgctctgggtgacggggccscctggcctgtgcagggtctgatccgccactttcggccggagctcgaggagcggatgcagcggtttgcccagcagcatcaggcccggcaggctgcctyttagcccmccmccctggcctgctgtcctgcgtctatmcatgtggaatgctggacaataaagcgagtgctgcccaccctccagctgcc

SEQ ID NO: 4210 - DNA, 1362 bp, Homo sapiens
aagattctgtagcttctggcccaatccctcatggccccagagcactctgggcctcctgaccctttgtctccctagacagcacccaagaaaacctcatttggctcgctgaaggatgaagaccggattttcaccaacctgtacggccgccatgactggaggctgaaaggttccctgagtygaggtgactggtacaagacaaaggagatcytgctgaaggggcccgactggwtcctgggcgagatcaagacatcgggtttgaggggccgtggaggcgctggcttccccactggcctcaagtggagcttcatgaataagccctcagatggcaggcccaagtatctggtggtgaacgcagacgagggggagccgggcacctgcaaggaccgggagatcttacgccatgatcctcacaagctgctggaaggctgcctggtggggggccgggccatgggcgcccgcgctgcctatatctacatccgaggggaattctacaatgaggcctccaatctgcaggtggccatccgagaggcctatgaggcaggtctgattggcaagaatgcttgtggctctggctatgattttgacgtgtttgtggtgcgcggggctggggcctrcatckgtggagaggagacagygctcatcragtccattgagggcaagcagggcaagccccgcctgaagccccccttccccgcagacgtgggagtgtttggctgccccacaactgtggccaacgtggagacagtggcagtgtcccccacaatctgccgccgtggaggtacctggtttgctggctttggcagagaacgcaactcaggcaccaaactattcwacatctctggccatgtcaaccacccttgcactgtggaggaggagatgtctgtgcccttgaaagaactgattgagaagcatgctggcacagacaggcctgggcacagctgcggtgatcgtcatggaccgctcgacggacatcgtgaaagccatcgcccgcctcattgagttctataagcacgagagctgtggccagtgtaccccatgccgtgagggtgtggactggatgaacaaggtgatggcacgtttcgtgaggggggatgcccggccggccgagatcgactccctgtgggagatcagcaagcagatagaaggccataygatttgtgctctgggtgacggggccscctggcctgtgcagggtctgatccgccactttcggccggagctcgaggagcggatgcagcggtttgcccagcagcatcaggcccggcaggctgcctyttagcccmccmccctggcctgctgtcctgcgtctatmcatgtggaatgctggacaataaagcgagtgctgcccaccctccagctgcc

SEQ ID NO: 4211 - DNA, 1610 bp, Homo sapiens
gaagttgaaggggcgcagcgataccggtgcgcggcgctggcgtcgggcgcgtgacgtctttcctgcgcgccacctagcgtctctatcrcgccagttcctcagcctcagtgctatgaaggtgacagcgtgaggtgacccatctggcccgccgcgatgctggcaacacggcggctgctcggctggtcgcttcccgcgcgggtatctacagcacccaagaaaacctcatttggctcgctgaaggatgaagaccggattttcaccaacctgtacggccgccatgactggaggctgaaaggttccctgagtygaggtgactggtacaagacaaaggagatcytgctgaaggggcccgactggwtcctgggcgagatcaagacatcgggtttgaggggccgtggaggcgctggcttccccactggcctcaagtggagcttcatgaataagccctcagatggcaggcccaagtatctggtggtgaacgcagacgagggggagccgggcacctgcaaggaccgggagatcttacgccatgatcctcacaagctgctggaaggctgcctggtggggggccgggccatgggcgcccgcgctgcctatatctacatccgaggggaattctacaatgaggcctccaatctgcaggtggccatccgagaggcctatgaggcaggtctgattggcaagaatgcttgtggctctggctatgattttgacgtgtttgtggtgcgcggggctggggcctrcatckgtggagaggagacagygctcatcragtccattgagggcaagcagggcaagccccgcctgaagccccccttccccgcagacgtgggagtgtttggctgccccacaactgtggccaacgtggagacagtggcagtgtcccccacaatctgccgccgtggaggtacctggtttgctggctttggcagagaacgcaactcaggcaccaaactattcwacatctctggccatgtcaaccacccttgcactgtggaggaggagatgtctgtgcccttgaaagaactgattgagaagcatgctgggggtgtcacgggcggctgggacaacctccttgctgtgatccctggcggctcgtctaccccactgatccccaagtctgtgtgtgagacggtgctgatggacttcgatgygctggtgcaggcacagacaggcctgggcacagctgcggtgatcgtcatggaccgctcgacggacatcgtgaaagccatcgcccgcctcattgagttctataagcacgagagctgtggccagtgtaccccatgccgtgagggtgtggactggatgaacaaggtgatggcacgtttcgtgaggggggatgcccggccggccgagatcgactccctgtgggagatcagcaagcagatagaaggccataygatttgtgctctgggtgacggggccscctggcctgtgcagggtctgatccgccactttcggccggagctcgaggagcggatgcagcggtttgcccagcagcatcaggcccggcaggctgcctyttagcccmccmccctggcctgctgtcctgcgtctatmcatgtggaatgctggacaataaagcgagtgctgcccaccctccagctgcc

SEQ ID NO: 4212 - DNA, 2639 bp, Homo sapiens
cattgccaggcgtgggcacgggagttggtttgggagctgccagkctcctgggaggatcgcagtcagcagagcagggctgaggcctgggggtaggagcagagcctgcgcatctggaggcagcatgtccaagaaagggagtggaggtgcagcgaaggacccaggggcagagcccacgctggggatggaccccttcgaggacacgctgcggcggctgcgtgaggccttcaactgagggcgcacrcggccggccgagttccgggctgcgcagctccagggcctgggccacttccttcaagaaaacaagcagcttctgcgcgacgtgctggcccaggacctgcataagccagctttcgaggcagacatatctgagctcatcctttgccagaacgaggttgactacgctctcaagaacctkcaggcctggatgaaggatgaaccacggtccacgaacctgttcatgaagctggactcggtcttcatctggaaggaaccctttggcctggtcctcatcatcgcaccctggaactacccaytgaacctgaccctggtgctcctggtgggcgccctcgccrcagggarttgcgtggtgctgaagccgtcagaaatcagccagggcacagagaaggtcctggctgaggtgctgccccagtacctggaccagagctgctttgccgtggtgctgggcggaccccaggagacagggcagctgctagagcacaagttggactacatcttcttcacagggagccctcgtgtgggcaagattgtcatgactgctgccaccaagcacctgacgcctgtcaccctggagctggggggcaagaacccctgctacgtggacgacaactgcgacccccagaccgtggccaaccgcgtggcctggttctgctacttcaatgccggccagacctgcgtggcccctgactacgtcctgtgcagccccgagatgcaggagaggctgctgcccgccctgcagagcaccatcacccgtttctatggcgacgacccccagagctycccaaacctgggccrcatcatcaaccagaaacagttccagcrgctgmgggcattgctgggctgcrgccgcgtggccattgggggccagagcaacgagagcgatcgctacatcgcccccacggtgctggtggacgtgcaggagacggagcctgtgatgcaggaggagatcttcgggcccatcctgcccatcgtgaacgtgcagagcgtggacgaggccatcaagttcatcaaccggcaggagaagcccctggccctgtacgccttctccaacagcagccaggttgtgaaccagatgctggagcggaccagcagmggcagctttggaggcaatgagggcttcacctacatatctctgctgtccgtgccattcgggggagtcggccacagtgggatgggccggtaccacggcaagttcaccttcgacaccttctcccaccaccgcacctgcctgctcgccccctccggcctggagaaattaaaggagatccrctacccaccctatrccgactggaaccagcagctgttacgckkgggcatgggctcccagagctgyaccctcctgtgagcgtcccacccgcctccaacgggtcacacagagaaacctgagtctagccatgaggggcttatgctyccaactcacattgttcctccagaccgcaggytcccccagcctcaggttgctggagctgtcacatgactgcatcctgcctgccagggctgcaaagcaaggtcttgcttctatctgggggacgctgctcgagagaggccragaggccgcagaacatgccaggtgtcctcactcaccccaccctccccaattccagccctttgccctctcggtcagggttggccagrcccagtcacaggggcagtgtcaccctggaaaatacagtgccctgccttcttaggggcatcagccctgaacggttgagagcgtggagccctccaggcctttgctctcccctctaggcacacgcgcacttccayctctgccccatcccaactgcaccagcactgcctcccccagggatcctctcacatcccacactggtctctgcaccacccctctggttcacaccgcaccctgcactcacccacagcagctccatccactgggaaaactggggtttgcatcactccactgcacagtgttagtgggacctgggggcaagtcccttgacttctctgagcctcagtttccttatgtgaaagttgctggaaccaaaatggagtcacttatgccaaactctaataaaatggagtcggggggccacatagaagccctcacacacacatgcccgtaacaggatttatcacaagacacgcctgcatgtagaccagacacagggcgtatggaaagcacgtcctcaagactgtagtattccagatgagctgcagatgcttacctaccacggccgtctccaccagaaaaccatcgccaactcctgcgatcagcttgtgacttacaaaccttgtttaaaagctgcttacatggacttctgtcctttaaaagcttccccttggctgtggccctctgtgtatgcctgggatccttccaagcactcatagcccagataggaatcctctgctcctcccaaataaattcatctgttctggagagc

SEQ ID NO: 4213 - DNA, 2109 bp, Homo sapiens
agttgacgccaccggtgacctccgacgccccgggcaagagaacgccaggagggataacgggaggaaggccggccggggccgccaaggcagtcccaggctcgcgtaggaggcgcgcagaccttgyaccttgcaccttcgcagcgccctgcaccccgccaccatgtgcgagctgtacagtaagcgggacactctggggctgaggaagaagcacatcgggccctcatgcaaagttttctttgcatcggatcccatcaaaatagtgagagcccagaggcagtacatgtttgatgagaacggtgaacagtacttggactgcatcaacaatgttgcccatgtgggacactgtcacccaggagtggtcaaagctgccctgaaacagatggaactgctaaatacaaattctcgattcctccacgacaacattgttgagtatgccaaacgcctttcagcaactctgccggagaaactctctgtttgttattttacaaattcaggatccgaagccaacgacttagccttacgcctggctcggcagttcagaggccaccaggatgtgatcactcttgaccatgcttaccatggtcacctatcatccttaattgagattagcccatataagtttcagaaaggaaaagatgtcaaaaaagaatttgtacatgtggcaccaactccagatacttacagaggaaaatatagagaagaccatgcagacycagccagtgcttatgcagatgaagtgaagaaaatcattgaagatgctcataacagtggaaggaagattgctgcctttattgctgaatccatgcagagttgtggcggacaaataattcctccagcaggctacttccagaaagtggcagaatatgtacacggtgcagggggtgtgtttatagctgatgaagttcaagtgggctttggcagagttgggaaacatttctggagcttccagatgtatggtgaagactttgttccagacatcgtcacaatgggaaaaccgatgggcaacggccacccggtggcatgtgtggtaacaaccaaagaaattgcagaagccttcagcagctctgggatggaatattttaatacgtatggaggaaatccagtatcttgtgctgttggtttggctgtcctggatataattgaaaatgaagaccttcaaggaaatgccaagagagtagggaattatctcactgagttactgaaaaaacagaaggctaaacacactttgataggagatattaggggcattggcctttttattggaattgatttagtgaaggaccatctgaaaaggacccctgccacagctgaagctcagcacatcatctacaagatgaaagaaaaacgagtgcttctcagtgccgatggacctcatagaaatgtacttaaaataaaaccacctatgtgcttcactgaagaagatgcaaagttcatggtggaccaacttgataggattctaacagttttagaagaagctatgggaaccaaaaccgaaagtgtgacctctgagaatactccatgcaaaacaaagatgctgaaagaagcccacatagaactgcttagggacagcaccactgactccaaagaaaatcccagcagaaagagaaatggaatgtgcacggatacacattcactgctcagtaagaggctcaagacatgactgatttgcattttaaagcaagatgygatgtccagagttacagagaatgagtagatgtgtctcatcggttaatagctctattatacctctaaaggtggaattgtcagtttagattcataaatgaaaaggtaaatgagtaatcagaataaaccaagtgataatcaaaccatgtcaagattattagttcagactctagcctgttaattttcttagttgatttctgaagctacctgatttattctattaaattgtaagcttgcaaactcaaaataaattggcagatttacctctcatgttttaatgtgtcaaattagagagcaaagtataacaggtgccttcacttttgagacttagtgccttaaaatatgtattctataatgatttcatatataaaagtatatttattgactgtaataaaataaaatatgatgtaaacaaaaaaaattact

SEQ ID NO: 4214 - DNA, 1910 bp, Homo sapiens
gccaaggcagtcccaggctcgcgtaggaggcgcgcagaccttgyaccttgcaccttcgcagcgccctgcaccccgccaccatgtgcgagctgtacagtaagcgggacactctggggctgaggaagaagcacatcggtgggacactgtcacccaggagtggtcaaagctgccctgaaacagatggaactgctaaatacaaattctcgattcctccacgacaacattgttgagtatgccaaacgcctttcagcaactctgccggagaaactctctgtttgttattttacaaattcaggatccgaagccaacgacttagccttacgcctggctcggcagttcagaggccaccaggatgtgatcactcttgaccatgcttaccatggtcacctatcatccttaattgagattagcccatataagtttcagaaaggaaaagatgtcaaaaaagaatttgtacatgtggcaccaactccagatacttacagaggaaaatatagagaagaccatgcagacycagccagtgcttatgcagatgaagtgaagaaaatcattgaagatgctcataacagtggaaggaagattgctgcctttattgctgaatccatgcagagttgtggcggacaaataattcctccagcaggctacttccagaaagtggcagaatatgtacacggtgcagggggtgtgtttatagctgatgaagttcaagtgggctttggcagagttgggaaacatttctggagcttccagatgtatggtgaagactttgttccagacatcgtcacaatgggaaaaccgatgggcaacggccacccggtggcatgtgtggtaacaaccaaagaaattgcagaagccttcagcagctctgggatggaatattttaatacgtatggaggaaatccagtatcttgtgctgttggtttggctgtcctggatataattgaaaatgaagaccttcaaggaaatgccaagagagtagggaattatctcactgagttactgaaaaaacagaaggctaaacacactttgataggagatattaggggcattggcctttttattggaattgatttagtgaaggaccatctgaaaaggacccctgccacagctgaagctcagcacatcatctacaagatgaaagaaaaacgagtgcttctcagtgccgatggacctcatagaaatgtacttaaaataaaaccacctatgtgcttcactgaagaagatgcaaagttcatggtggaccaacttgataggattctaacagttttagaagaagctatgggaaccaaaaccgaaagtgtgacctctgagaatactccatgcaaaacaaagatgctgaaagaagcccacatagaactgcttagggacagcaccactgactccaaagaaaatcccagcagaaagagaaatggaatgtgcacggatacacattcactgctcagtaagaggctcaagacatgactgatttgcattttaaagcaagatgygatgtccagagttacagagaatgagtagatgtgtctcatcggttaatagctctattatacctctaaaggtggaattgtcagtttagattcataaatgaaaaggtaaatgagtaatcagaataaaccaagtgataatcaaaccatgtcaagattattagttcagactctagcctgttaattttcttagttgatttctgaagctacctgatttattctattaaattgtaagcttgcaaactcaaaataaattggcagatttacctctcatgttttaatgtgtcaaattagagagcaaagtataacaggtgccttcacttttgagacttagtgccttaaaatatgtattctataatgatttcatatataaaagtatatttattgactgtaataaaataaaatatgatgtaaacaaaaaaaattact

SEQ ID NO: 4215 - DNA, 2091 bp, Homo sapiens
agttgacgccaccggtgacctccgacgccccgggcaagagaacgccaggagggataacgggaggaaggccggccggggccgccaaggcagtcccaggctcgcgtaggaggcgcgcagaccttgyaccttgcaccttcgcagcgccctgcaccccgccaccatgtgcgagctgtacagtaagcgggacactctggggctgaggaagaagcacatcgggccctcatgcaaagttttctttgcatcggatcccatcaaaatagtgagagcccagaggcagtacatgtttgatgagaacggtgaacagtacttggactgcatcaacaatgttgcccatggagtggtcaaagctgccctgaaacagatggaactgctaaatacaaattctcgattcctccacgacaacattgttgagtatgccaaacgcctttcagcaactctgccggagaaactctctgtttgttattttacaaattcaggatccgaagccaacgacttagccttacgcctggctcggcagttcagaggccaccaggatgtgatcactcttgaccatgcttaccatggtcacctatcatccttaattgagattagcccatataagtttcagaaaggaaaagatgtcaaaaaagaatttgtacatgtggcaccaactccagatacttacagaggaaaatatagagaagaccatgcagacycagccagtgcttatgcagatgaagtgaagaaaatcattgaagatgctcataacagtggaaggaagattgctgcctttattgctgaatccatgcagagttgtggcggacaaataattcctccagcaggctacttccagaaagtggcagaatatgtacacggtgcagggggtgtgtttatagctgatgaagttcaagtgggctttggcagagttgggaaacatttctggagcttccagatgtatggtgaagactttgttccagacatcgtcacaatgggaaaaccgatgggcaacggccacccggtggcatgtgtggtaacaaccaaagaaattgcagaagccttcagcagctctgggatggaatattttaatacgtatggaggaaatccagtatcttgtgctgttggtttggctgtcctggatataattgaaaatgaagaccttcaaggaaatgccaagagagtagggaattatctcactgagttactgaaaaaacagaaggctaaacacactttgataggagatattaggggcattggcctttttattggaattgatttagtgaaggaccatctgaaaaggacccctgccacagctgaagctcagcacatcatctacaagatgaaagaaaaacgagtgcttctcagtgccgatggacctcatagaaatgtacttaaaataaaaccacctatgtgcttcactgaagaagatgcaaagttcatggtggaccaacttgataggattctaacagttttagaagaagctatgggaaccaaaaccgaaagtgtgacctctgagaatactccatgcaaaacaaagatgctgaaagaagcccacatagaactgcttagggacagcaccactgactccaaagaaaatcccagcagaaagagaaatggaatgtgcacggatacacattcactgctcagtaagaggctcaagacatgactgatttgcattttaaagcaagatgygatgtccagagttacagagaatgagtagatgtgtctcatcggttaatagctctattatacctctaaaggtggaattgtcagtttagattcataaatgaaaaggtaaatgagtaatcagaataaaccaagtgataatcaaaccatgtcaagattattagttcagactctagcctgttaattttcttagttgatttctgaagctacctgatttattctattaaattgtaagcttgcaaactcaaaataaattggcagatttacctctcatgttttaatgtgtcaaattagagagcaaagtataacaggtgccttcacttttgagacttagtgccttaaaatatgtattctataatgatttcatatataaaagtatatttattgactgtaataaaataaaatatgatgtaaacaaaaaaaattact

SEQ ID NO: 4216 - DNA, 3771 bp, Homo sapiens
atgctggggaagagccatggtagggccactcatggccctcttcctttgrcggaccttggaatccaccttccctgcgttaaagtgctccaccaggtgacgccggaagagaagccagcaggcggcggcggcgtcagcatcagcggcctcctgcccgtatctatcgtggcggcgacgggacccgcctccctgggcgccggagtcatgtgacccacacaatggctgagtggctactctcggcttcctggcaacgccgagcgaaagctatgactgcggccgcgggttmggcgggccgcgccgcggtgcccttgctgctgtgtgcgctgctggcgcccggcggcgcgtacgtgctcgacgactccgacgggctgggccgggagttcgackgcatcsgcgcggtcagcggcggcggggcaacctyccgacttctagtaaattacccagagccctatcgttctcagatrttggattatctctttaagccgaattttggtgcctctttgcatattttaaaagtggaaataggtggtgatgggcagacaacagayrrcrctgagccctcccacwtgcattatgcactagatgagaattatttccgaggatacgagtggtggttgatgaaagaagctaagaagaggaatcccaatattacactcattgggttgccatggtcattccctggatggctgggaaaaggtttcgactggccttatgtcaatcttcagctgactgcctattatgtcgtgacctggattgtgggcgccaagygttaccatgatttggacattgattatattggaatttggaatgagaggtcatataatgccaattatattaagatattaagaaaaatgctgaattatcaaggtctccagcgagtgaaaatcatagcaagtgataatctctggragtccatctctgcatccatgctccttgatgccgaactcttcaaggtggttratgttataggggctcattatcctggaacccattcagcaaaagatgcaaagttgactgggaagaagctttggtcttctgaagactttagcaytttaaatagtgacatgrgtgcagrctgctggggtcgcattttaaatcagaattatatcaatggctatatgacttycacaatcgcatggaatttagtggctagttactatgaacagttgscttatgggagatgcgggttgatgacggcccaagagccatggagtgggcactacgtggtagaatctcctgtctgggtatcagctcataccactcagtttactcaacctggctggtattacctgaagacagttggccatttagagaaaggaggaagctacgtagctctgactgatggcttagggaacctcaccatcatcattgaaaccatgagtcataaacattctaagtgcatacggccatttcttccttatttcaatgtgtcacaacaatttgccacctttgttcttaagggatcttttgtaaacttggaaaaacatcygaaagatttctttttaagcagctggattctctatggctccttgacagygatggcagtttcacactgagcctgcatgaagatgagctgttcacactcaccastctcaccactggtcgcaaaggcagctacccgcttcctccaaaatcccagcccttcccaagtacctataaggatgatttcaatgttggaccaatctgactayaaagtgtgatgtwtacatagagacccctgacacaggaggtgtgttcattgmaggaagagtaaataaaggtggtattttgattagaagtkccagaggaattttcttctggatttttgcaaatggatcttacagggttacaggtgatttagctggatggattatatatgctttaggacgtgttgaagttacagcaaaaaaatggtatacactcaygtyaaggtcatttcrcctctggcatgctgaatgacaagtctctgtggacagacatccctgtgaattttccaaagaatggctgggctgcaattggamctcactcctttgaatttgcacagtttgacaactttcttgtggaagccacacgctaatacttaacagggcatcatagaatactctggattttcttcccttctttttggttttggttcagagccaattcttgtttcattggaacagtatatgaggcttttgagactaaaaataatgaagagtaaaaggggagagaaatttatttttaatttaccctgtggaagattttattagaattaattccaaggggaaaactggtgaatctttaacattacctggtgtgttccctaacattcaaactgtgcattggccatacccttaggagtggtttgagtagtacagacctcgaagccttgctgctaacactgaggtagctctcttcatcttatttgcaagcggtcctgtagatggcagtaacttgatcatcactgagatgtatttatgcatgctgacygtgtgtccaagtgagccagtgtcttcatcacaagatgatgctgccataatagaaagctgaagaacactagaagtagctttttgaaaaccacttcaacctgttatgctttatgctctaaaaagtatttttttattttcctttttaagatgatacttttgaaatgcaggatatgatgagtgggatgattttaaaaaygcctstttaataaactacctctaacactatttctgyrgtaatagatattagcagattaattgggttatttgcattatttaatttttttgattccaagttttggtcttgtaaccactataactctctgtgaacrtttttccaggtggctggaagaaggaagaaaacctgatatagccaatgctgttgtagtcgtttcctcagcctcatctcactgtgctgtggtctgtcctcacatgtgcactggtaacagactcacacagctgatgaatgctkttctctccttatgtgtggaaggaggggagcacttagacatttgctaactcccagaattggatcatctcctaagatgtacttactttttaaagtccaaatatgtttatatttaaatatacgtgagcrtgttcatcatgttgtatgatttatactaagcattaatgtggctctatgtagcaaatcagttattcatgtaggtaaagtaaatctagaattatttataagaattactcattgaactaattctactatttaggaatttrtaagagtctaacataggcttagctacagtgaagttttgcattgcttttgaagacaagaagataagtgctagaataaataagattacagagaaaattttttgttaaaaccaagtgatttccagctgatgtatctaatattttttaaaacraacattatagaggtgtaatttatttacaataaaatgttcctactttaaatatacaattcagtgagttttgataaattgatatacccatgtaaccaacactccagtcaagcttcagaatatttccatcaccccagaaggttctcttgtatacctgctcagtcagttcctttcactcccrattgttggcagccattgataggaattctatcactataggttagttttctttgttccagaacatcatgaaagcggcgtcatgtactgtgtattcttatgaatggtttctttccatcagcataatgatttgakattkgtccatgttgtgtgattcagtggtttgttccttcttatttctgaagagttttccattgtatgaatataccacaatttgtttcctccccaccagtttctgatactacaattaaaactgtctacatttacaa

SEQ ID NO: 4217 - DNA, 3991 bp, Homo sapiens
atgctggggaagagccatggtagggccactcatggccctcttcctttgrcggaccttggaatccaccttccctgcgttaaagtgctccaccaggtgacgccggaagagaagccagcaggcggcggcggcgtcagcatcagcggcctcctgcccgtatctatcgtggcggcgacgggacccgcctccctgggcgccggagtcatgtgacccacacaatggctgagtggctactctcggcttcctggcaacgccgagcgaaagctatgactgcggccgcgggttmggcgggccgcgccgcggtgcccttgctgctgtgtgcgctgctggcgcccggcggcgcgtacgtgctcgacgactccgacgggctgggccgggagttcgackgcatcsgcgcggtcagcggcggcggggcaacctyccgacttctagtaaattacccagagccctatcgttctcagatrttggattatctctttaagccgaattttggtgcctctttgcatattttaaaagtggaaataggtggtgatgggcagacaacagayrrcrctgagccctcccacwtgcattatgcactagatgagaattatttccgaggatacgagtggtggttgatgaaagaagctaagaagaggaatcccaatattacactcattgggttgccatggtcattccctggatggctgggaaaaggtttcgactggccttatgtcaatcttcagctgactgcctattatgtcgtgacctggattgtgggcgccaagygttaccatgatttggacattgattatattggaatttggaatgagaggtcatataatgccaattatattaagatattaagaaaaatgctgaattatcaaggtctccagcgagtgaaaatcatagcaagtgataatctctggragtccatctctgcatccatgctccttgatgccgaactcttcaaggtggttratgttataggggctcattatcctggaacccattcagcaaaagatgcaaagttgactgggaagaagctttggtcttctgaagactttagcaytttaaatagtgacatgrgtgcagrctgctggggtcgcattttaaatcagaattatatcaatggctatatgacttycacaatcgcatggaatttagtggctagttactatgaacagttgscttatgggagatgcgggttgatgacggcccaagagccatggagtgggcactacgtggtagaatctcctgtctgggtatcagctcataccactcagtttactcaacctggctggtattacctgaagacagttggccatttagagaaaggaggaagctacgtagctctgactgatggcttagggaacctcaccatcatcattgaaaccatgagtcataaacattctaagtgcatacggccatttcttccttatttcaatgtgtcacaacaatttgccacctttgttcttaagggatcttttagtgaaataccagagctacaggtatggtataccaaacttggaaaaacatcygaaagatttctttttaagcagctggattctctatggctccttgacagygatggcagtttcacactgagcctgcatgaagatgagctgttcacactcaccastctcaccactggtcgcaaaggcagctacccgcttcctccaaaatcccagcccttcccaagtacctataaggatgatttcaatgttgattacccattttttagtgaagctccaaactttgctgatcaaactggtgtatytgaatattttacaaatattgaagaccctggcgagcatcacttcaygctayrccaagttctcaaccagagacccattacrtgggctgccratgcatccaacacaatcagtattatargagactacaactggaccaatctgactayaaagtgtgatgtwtacatagagacccctgacacaggaggtgtgttcattgmaggaagagtaaataaaggtggtattttgattagaagtkccagaggaattttcttctggatttttgcaaatggatcttacagggttacaggtgatttagctggatggattatatatgctttaggacgtgttgaagttacagcaaaaaaatggtatacactcaygtyaactattaagggtcatttcrcctctggcatgctgaatgacaagtctctgtggacagacatccctgtgaattttccaaagaatggctgggctgcaattggamctcactcctttgaatttgcacagtttgacaactttcttgtggaagccacacgctaatacttaacagggcatcatagaatactctggattttcttcccttctttttggttttggttcagagccaattcttgtttcattggaacagtatatgaggcttttgagactaaaaataatgaagagtaaaaggggagagaaatttatttttaatttaccctgtggaagattttattagaattaattccaaggggaaaactggtgaatctttaacattacctggtgtgttccctaacattcaaactgtgcattggccatacccttaggagtggtttgagtagtacagacctcgaagccttgctgctaacactgaggtagctctcttcatcttatttgcaagcggtcctgtagatggcagtaacttgatcatcactgagatgtatttatgcatgctgacygtgtgtccaagtgagccagtgtcttcatcacaagatgatgctgccataatagaaagctgaagaacactagaagtagctttttgaaaaccacttcaacctgttatgctttatgctctaaaaagtatttttttattttcctttttaagatgatacttttgaaatgcaggatatgatgagtgggatgattttaaaaaygcctstttaataaactacctctaacactatttctgyrgtaatagatattagcagattaattgggttatttgcattatttaatttttttgattccaagttttggtcttgtaaccactataactctctgtgaacrtttttccaggtggctggaagaaggaagaaaacctgatatagccaatgctgttgtagtcgtttcctcagcctcatctcactgtgctgtggtctgtcctcacatgtgcactggtaacagactcacacagctgatgaatgctkttctctccttatgtgtggaaggaggggagcacttagacatttgctaactcccagaattggatcatctcctaagatgtacttactttttaaagtccaaatatgtttatatttaaatatacgtgagcrtgttcatcatgttgtatgatttatactaagcattaatgtggctctatgtagcaaatcagttattcatgtaggtaaagtaaatctagaattatttataagaattactcattgaactaattctactatttaggaatttrtaagagtctaacataggcttagctacagtgaagttttgcattgcttttgaagacaagaagataagtgctagaataaataagattacagagaaaattttttgttaaaaccaagtgatttccagctgatgtatctaatattttttaaaacraacattatagaggtgtaatttatttacaataaaatgttcctactttaaatatacaattcagtgagttttgataaattgatatacccatgtaaccaacactccagtcaagcttcagaatatttccatcaccccagaaggttctcttgtatacctgctcagtcagttcctttcactcccrattgttggcagccattgataggaattctatcactataggttagttttctttgttccagaacatcatgaaagcggcgtcatgtactgtgtattcttatgaatggtttctttccatcagcataatgatttgakattkgtccatgttgtgtgattcagtggtttgttccttcttatttctgaagagttttccattgtatgaatataccacaatttgtttcctccccaccagtttctgatactacaattaaaactgtctacatttacaa

SEQ ID NO: 4218 - DNA, 3176 bp, Homo sapiens
atgctggggaagagccatggtagggccactcatggccctcttcctttgrcggaccttggaatccaccttccctgcgttaaagtgctccaccaggtgacgccggaagagaagccagcaggcggcggcggcgtcagcatcagcggcctcctgcccgtatctatcgtggcggcgacgggacccgcctccctgggcgccggagtcatgtgacccacacaatggctgagtggctactctcggcttcctggcaacgccgagcgaaagctatgactgcggccgcgggttmggcgggccgcgccgcggtgcccttgctgctgtgtgcgctgctggcgcccggcggcgcgtacgtgctcgacgactccgacgggctgggccgggagttcgackgcatcsgcgcggtcagcggcggcggggcaacctyccgacttctagtaaattacccagagccctatcgttctcagatrttggattatctctttaagccgaattttggtgcctctttgcatattttaaaagtggaaataggtggtgatgggcagacaacagayrrcrctgagccctcccacwtgcattatgcactagatgagaattatttccgaggatacgagtggtggttgatgaaagaagctaagaagaggaatcccaatattacactcattgggttgccatggtcattccctggatggctgggaaaaggtttcgactggccttatgtcaatcttcagctgactgcctattatgtcgtgacctggattgtgggcgccaagygttaccatgatttggacattgattatattggaatttggaatgagaggtcatataatgccaattatattaagatattaagaaaaatgctgaattatcaaggtctccagcgagtgaaaatcatagcaagtgataatctctggragtccatctctgcatccatgctccttgatgccgaactcttcaaggtggttratgttataggggctcattatcctggaacccattcagcaaaagatgcaaagttgactgggaagaagctttggtcttctgaagactttagcaytttaaatagtgacatgrgtgcagrctgctggggtcgcattttaaatcagaattatatcaatggctatatgacttycacaatcgcatggaatttagtggctagttactatgaacagttgscttatgggagatgcgggttgatgacggcccaagagccatggagtgggcactacgtggtagaatctcctgtctgggtatcagctcataccactcagtttactcaacctggctggtattacctgaagacagttggccatttagagaaaggaggaagctacgtagctctgactgatggcttagggaacctcaccatcatcattgaaaccatgagtcataaacattctaagtgcatacggccatttcttccttatttcaatgtgtcacaacaatttgccacctttgttcttaagggatcttttagtgaaataccagagctacaggtatggtataccaaacttggaaaaacatcygaaagatttctttttaagcagctggattctctatggctccttgacagygatggcagtttcacactgagcctgcatgaagatgagctgttcacactcaccastctcaccactggtcgcaaaggcagctacccgcttcctccaaaatcccagcccttcccaagtacctataaggatgatttcaatgttgattacccattttttagtgaagctccaaactttgctgatcaaactggtgtatytgaatattttacaaatattgaagaccctggcgagcatcacttcaygctayrccaagttctcaaccagagacccattacrtgggctgccratgcatccaacacaatcagtattatargagactacaactggaccaatctgactayaaagtgtgatgtwtacatagagacccctgacacaggaggtgtgttcattgmaggaagagtaaataaaggtggtattttgattagaagtkccagaggaattttcttctggatttttgcaaatggatcttacagggttacaggtgatttagctggatggattatatatgctttaggacgtgttgaagttacagcaaaaaaatggtatacactcaygtyaactattaagggtcatttcrcctctggcatgctgaatgacaagtctctgtggacagacatccctgtgaattttccaaagaatggctgggctgcaattggamctcactcctttgaatttgcacagtttgacaactttcttgtggaagccacacgctaatacttaacagggcatcatagaatactctggattttcttcccttctttttggttttggttcagagccaattcttgtttcattggaacagtatatgaggcttttgagactaaaaataatgaagagtaaaaggggagagaaatttatttttaatttaccctgtggaagattttattagaattaattccaaggggaaaactgtggccatacccttaggagtggtttgagtagtacagacctcgaagccttgctgctaacactgaggtagctctcttcatcttatttgcaagcggtcctgtagatggcagtaacttgatcatcactgagatgtatttatgcatgctgacygtgtgtccaagtgagccagtgtcttcatcacaagatgatgctgccataatagaaagctgaagaacactagaagtagctttttgaaaaccacttcaacctgttatgctttatgctctaaaaagtatttttttattttcctttttaagatgatacttttgaaatgcaggatatgatgagtgggatgattttaaaaaygcctstttaataaactacctctaacactatttctgyrgtaatagatattagcagattaattgggttatttgcattatttaatttttttgattccaagttttggtcttgtaaccactataactctctgtgaacrtttttccaggtggctggaagaaggaagaaaacctgatatagccaatgctgttgtagtcgtttcctcagcctcatctcactgtgctgtggtctgtcctcacatgtgcactggtaacagactcacacagctgatgaatgctkttctctccttatgtgtggaaggaggggagcacttagacatttgctaactcccagaattggatcatctcctaagatgtacttactttttaa

SEQ ID NO: 4219 - DNA, 1446 bp, Homo sapiens
atgctggggaagagccatggtagggccactcatggccctcttcctttgrcggaccttggaatccaccttccctgcgttaaagtgctccaccaggtgacgccggaagagaagccagcaggcggcggcggcgtcagcatcagcggcctcctgcccgtatctatcgtggcggcgacgggacccgcctccctgggcgccggagtcatgtgacccacacaatggctgagtggctactctcggcttcctggcaacgccgagcgaaagctatgactgcggccgcgggttmggcgggccgcgccgcggtgcccttgctgctgtgtgcgctgctggcgcccggcggcgcgtacgtgctcgacgactccgacgggctgggccgggagttcgackgcatcsgcgcggtcagcggcggcggggcaacctyccgacttctagtaaattacccagagccctatcgttctcagatrttggattatctctttaagccgaattttggtgcctctttgcatattttaaaagtggaaataggtggtgatgggcagacaacagayrrcrctgagccctcccacwtgcattatgcactagatgagaattatttccgaggatacgagtggtggttgatgaaagaagctaagaagaggaatcccaatattacactcattgggttgccatggtcattccctggatggctgggaaaaggtttcgactggccttatgtcaatcttcagctgactgcctattatgtcgtgacctggattgtgggcgccaagygttaccatgatttggacattgattatattggaatttggaatgagaggtcatataatgccaattatattaagatattaagaaaaatgctgaattatcaaggtctccagcgagtgaaaatcatagcaagtgataatctctggragtccatctctgcatccatgctccttgatgccgaactcttcaaggtggttratgttataggggctcattatcctggaacccattcagcaaaagatgcaaagttgactgggaagaagctttggtcttctgaagactttagcaytttaaatagtgacatgrgtgcagrctgctggggtcgcattttaaatcagaattatatcaatggctatatgacttycacaatcgcatggaatttagtggctagttactatgaacagttgscttatgggagatgcgggttgatgacggcccaagagccatggagtgggcactacgtggtagaatctcctgtctgggtatcagctcataccactcagtttactcaacctggctggtattacctgaagacagttggccatttagagaaaggaggaagctacgtagctctgactgatggcttagggaacctcaccatcatcattgaaaccatggtaaacttttgttgttgctattggattaactcacttctttactattggaaaaataaaatataaaactgaa

SEQ ID NO: 4220 - DNA, 2761 bp, Homo sapiens
ccagcccttagcaacggcctggcracggtttccctgctgctgcagcccccgtcggctcctyttttccagtcctccactgccggggctgggcccggccgcgggaaggaccgaaggggatacagcgtgtccctgcgrcggctgcaagaggactaagcatgratggcagccggagagtcagagcaacctctgtccttcccagatatggtccaccgtgcctatttaaaggacacttgagcaccaaaagtaatgctgcagtagactgctcggttccagtaagcrtgagtaccagcataaagtatgcagaccaacaacgaagagagaaactcaaaaaggaattagcacratgtgaaaaagagttcaaattaactaaaactgcaatgcgagccaattataaaaataattccaagtcacttttkaataccttacaaaagccctcaggcgaaccgcaaattgaggatgacatgttaaaagaagaaatgaatggattttcatcctttgcaaggtcactagtaccctcttcagagagactacacctaagtctacataaatccartaaagtcatcacaaatggtcctgagaagaactccagttcctccccgtccagygtggattatgcagcctccgggccccggaaactgagctctggagccctgtatggcagaaggcccagaagcacattcccaaattcccaccggtttcagttagtcatttcgaaagcacccagtggggatcttttggataaacattctgaactcttttctaacaaacaattgccattcactcctcgcactttaaaaacagaagcaaaatctttcctgtcacagtatcgctattatacacctgccaaaagaaaaaaggattttacagatcaacrgatagaagctgaaacccagactgaattaagctttaaatctgagttggggacagctgagactaaaaacatgacagattcagaaatgaacataaagcaggcatctaattgtgtgacatatgatgccaaagaaaaaatagctcctttacctttagaagggcatgactcaacatgggatgagattaaggatgatgctcttcagcattcctcaccaagggcaatgtgtcagtattccctgaagcccccttcaactcgtaaaatctactctgatgaagaagaactgttgtatctgagtttcattgaagatgtaacagatgaaattttgaaacttggtttattttcaaacaggtttttagaacgactgttcgagcgacatataaaacaaaataaacatttggaggaggaaaaaatgcgccacctgctgcatgtcctgaaagtagacttaggctgcacatcgraggaaaactcggcaggcratcatgatctccgacaaaatcaccacgccagtccttcctaccccagcactgcagtggaccaacaacggagggttggggytttggggatcacttgtgctatttgtatggcgtcgaacagactggatctcttcaagatatgctgtggaaaatcaatgaaatagaaaagtactcaaggatcaaggcgtatcacattgttgactcaatcttcatattctctccactgattaagaggactgcagataaagagcactgggtgccagtgaaccaaacccaaccacaaagggacagtgtgaccctgagcaagtcactacctctgtccactttctgatctacaaaatgaaatgacggagatactgagtcagctgtggcrttctactcactaccaaatcataatttataaacctcgttaaccctccccaaaacacttgtattctttatgttaaaacaagtccgaagcttatatgagataacataaaggaaatatttcggaaacataaatgttcctctctgtttaacacctccagaggcagctgtcctcggaacaaagttaaagtcactcacataaaaatcccttgaggtcttctggacagccatgttcaggccagtctgtgtattggaggtgccagacggtcctctcttgcccrgtaaggaggtgcttcatcttcaggcctgtggtggcatagcagccagagtctgtgcggaaccgggtcgtgatcttaaaccttccataggtgacagtgttgtgcctggaaccaagtcgtggccagtacctaaagctcttctcccttccaccctcctgttaaagatgagcatggttaaatgactcgagatccggcaatggatgcctttctcacatagacggcacatctgaaacagaaccacaaccctaccctgcctttttctccacaggtcaggattccagatgattaacattaactgttcttcagaggctgagaaaatcacttaagagaartaagtacctacctcttctgctgtcaccattgctataattgcaattccctgttcccataccatctgccaaaaatcttgacaggtattctgtaatggtccctgtgtggcaatataatcccattcgattccactgacagagacctgggattagaaaaggttaaaaaaattgatgtgtgggtataatatacataggtatgtatgcatgcattcatggtagtactaaaaaagtttttttaaaaaagtaaaaagtaaaaaagtagtaaactggattattcagcagaataaggaaagacttttcatcttttcccttgtgaatacaatttgcattactgacatttttataaacttaggtactgtgaatatacataatatctatgcaacctgtttaaccttgctgaatgtcagttctcatttatacaataaagatactgcctaccgtcat

SEQ ID NO: 4221 - DNA, 2391 bp, Homo sapiens
cagcggcggcggccacccggcgctccttcgcgacggttcggcygggtgccgctggcggccgttgccarggtaggggtcgctttgcggcatggcgatggcggagggcgagaggactgagtgtgctgagcccccccgggacgaacccccggctgatggagctctgaagcgggcagaggagctcaagactcaggccaatgactacttcaaagccaaggactaygagaacgccatcaagttctacagccaggccatcgagctgaaccccagcaatgccatctactatggcaaccgcagcctggcctacctgcgcactgagtgctatggctacgcgctgggagacgccacgcgggccattgagctggacaagaagtacatcaagggttattaccgccgggctgccagcaacatggcactgggcaagttccgggccgcgctgcgagactacgagacggtggtcaaggtgaagccccatgacaaggatgccaaaatgaaataccaggagtgcaacaagatcgtgaagcagaaggcctttgagcgggccatcgcgggcgacgagcacaagcgctccgtggtggactcrctggacatcgagagcatgaccattgaggatgagtacagcggacccaagcttgaagacggcaaagtgacaatcagtttcatgaaggagctcatgcagtggtacaaggaccagaagaaactgcaccggaaatgtgcctaccagattctggtacaggtcaaagaggtcctctccaagctgagcacgctcgtggaaaccacactcaaagagacagagaagattacagtatgtggggacacccatggccagttctatgacctcctcaacatattcgagctcaacggtttaccctcggagaccaacccctatatatttaatggtgactttgtggaccgaggctccttctctgtagaagtgatcctcacccttttcggcttcaagctcctgtacccagatcactttcacctccttcgaggcaaccacgagacagacaacatgaaccagatctacggtttcgagggtgaggtgaaggccaagtacacagcccagatgtacgagctctttagcgaggtgttcgagtggctcccgttggcccagtgcatcaacggcaaagtgctgatcatgcacggaggcctgttcagtgaagacggtgtcaccctggatgacatccggaaaattgagcggaatcgacaacccccagattcagggcccatgtgtgacctgctctggtcagatccacagccacagaacgggcgctcgatcagcaagcggggcgtgagctgtcagtttgggcctgacgtcaccaaggccttcttggaagagaacaacctggactatatcatccgcagccacgaagtcaaggccgagggctacgaggtggctcacggaggccgctgtgtcaccgtcttctctgcccccaactactgcgaccagatggggaacaaagcctcctacatccacctccagggctctgacctacggcctcagttccaccagttcacagcagtgcctcatcccaacgtcaagcccatggcctatgccaacacgctgctgcagctrggaatgatgtgaggtgacgggcggggcggcctgcatcccagggcccctccaatcccaccggacccaggccctgggctaggggcagagcaggccccgccccagggcaatgttggacccccttttactttgtaaagtttgtatttattcccctttaggtttgcagagggggtaggggcagagtcaggggctggccagagggtctgctccctggacagagargaaggaggtggagcagctggggctgggggcacagcctgggcattctgtggggaggccgtcctcggggtggggtggggccgagtggctgccctgcccccctcatttgcatggctcctcccccactcaagcaatagggccccgccataggaagacccccagagagagggtcagcaggggggccccgcctgcgcctcccctcctatagccccatggtggggctaggctggggctcacccccctccccagctattttatgtctgtaattaaatatgttaaaataaagtcattatcggaagtcagcttgtctctggatggtggagccgaaggagctgcccgggttgggttacgcctgmtcaggagatccggagggtggggaggccgcaaagtcccgctggccgggcccacccagctctgggctgaccgcccaagtggcctctgcctctgcccagcaccgtgggctcctggggagagttctgccccctgggtggggcgatgaggccagcactgagtggagcggagcggaagctgaggcatagcctcatcctttgctggctccagcaacaagcatgacagtgccgctccctgctccctgctca

SEQ ID NO: 4222 - DNA, 1943 bp, Homo sapiens
cagcggcggcggccacccggcgctccttcgcgacggttcggcygggtgccgctggcggccgttgccarggtaggggtcgctttgcggcatggcgatggcggagggcgagaggactgagtgtgctgagcccccccgggacgaacccccggctgatggagctctgaagcgggcagaggagctcaagactcaggccaatgactacttcaaagccaaggactaygagaacgccatcaagttctacagccaggccatcgagctgaaccccagcaatgccatctactatggcaaccgcagcctggcctacctgcgcactgagtgctatggctacgcgctgggagacgccacgcgggccattgagctggacaagaagtacatcaagggttattaccgccgggctgccagcaacatggcactgggcaagttccgggccgcgctgcgagactacgagacggtggtcaaggtgaagccccatgacaaggatgccaaaatgaaataccaggagtgcaacaagatcgtgaagcagaaggcctttgagcgggccatcgcgggcgacgagcacaagcgctccgtggtggactcrctggacatcgagagcatgaccattgaggatgagtacagcggacccaagcttgaagacggcaaagtgacaatcagtttcatgaaggagctcatgcagtggtacaaggaccagaagaaactgcaccggaaatgtgcctaccagattctggtacaggtcaaagaggtcctctccaagctgagcacgctcgtggaaaccacactcaaagagacagagaagattacagtatgtggggacacccatggccagttctatgacctcctcaacatattcgagctcaacggtttaccctcggagaccaacccctatatatttaatggtgactttgtggaccgaggctccttctctgtagaagtgatcctcacccttttcggcttcaagctcctgtacccagatcactttcacctccttcgaggcaaccacgagacagacaacatgaaccagatctacggtttcgagggtgaggtgaaggccaagtacacagcccagatgtacgagctctttagcgaggtgttcgagtggctcccgttggcccagtgcatcaacggcaaagtgctgatcatgcacggaggcctgttcagtgaagacggtgtcaccctggatgacatccggaaaattgagcggaatcgacaacccccagattcagggcccatgtgtgacctgctctggtcagatccacagccacagaacgggcgctcgatcagcaagcggggcgtgagctgtcagtttgggcctgacgtcaccaaggccttcttggaagagaacaacctggactatatcatccgcagccacgaagtcaaggccgagggctacgaggtggctcacggaggccgctgtgtcaccgtcttctctgcccccaactactgcgaccagatggggaacaaagcctcctacatccacctccagggctctgacctacggcctcagttccaccagttcacagcagtgcctcatcccaacgtcaagcccatggcctatgccaacacgctgctgcagctrggaatgatgtgaggtgacgggcggggcggcctgcatcccagggcccctccaatcccaccggacccaggccctgggctaggggcagagcaggccccgccccagggcaatgttggacccccttttactttgtaaagtttgtatttattcccctttaggtttgcagagggggtaggggcagagtcaggggctggccagagggtctgctccctggacagagargaaggaggtggagcagctggggctgggggcacagcctgcgcctcccctcctatagccccatggtggggctaggctggggctcacccccctccccagctattttatgtctgtaattaaatatgttaaaataaagtcattatcggaagtc

SEQ ID NO: 4223 - DNA, 1543 bp, Homo sapiens
cagcggcggcggccacccggcgctccttcgcgacggttcggcygggtgccgctggcggccgttgccarggtaggggtcgctttgcggcatggcgatggcggagggcgagaggactgagtgtgctgagcccccccgggacgaacccccggctgatggagctctgaagcgggcagaggagctcaagactcaggccaatgactacttcaaagccaaggactaygagaacgccatcaagttctacagccaggccatcgagctgaaccccagcaatgccatctactatggcaaccgcagcctggcctacctgcgcactgagtgctatggctacgcgctgggagacgccacgcgggccattgagctggacaagaagtacatcaagggttattaccgccgggctgccagcaacatggcactgggcaagttccgggccgcgctgcgagactacgagacggtggtcaaggtgaagccccatgacaaggatgccaaaatgaaataccaggagtgcaacaagatcgtgaagcagaaggcctttgagcgggccatcgcgggcgacgagcacaagcgctccgtggtggactcrctggacatcgagagcatgaccattgaggatgagtacagcggacccaagcttgaagacggcaaagtgacaatcagtttcatgaaggagctcatgcagtggtacaaggaccagaagaaactgcaccggaaatgtgcctaccagattctggtacaggtcaaagaggtcctctccaagctgagcacgctcgtggaaaccacactcaaagagacagagaagattacagtatgtggggacacccatggccagttctatgacctcctcaacatattcgagctcaacggtttaccctcggagaccaacccctatatatttaatggtgactttgtggaccgaggctccttctctgtagaagtgatcctcacccttttcggcttcaagctcctgtacccagatcactttcacctccttcgaggcaaccacgagacagacaacatgaaccagatctacggtttcgagggtgaggtgaaggccaagtacacagcccagatgtacgagctctttagcgaggtgttcgagtggctcccgttggcccagtgcatcaacggcaaagtgctgatcatgcacggaggcctgttcagtgaagacggtgtcaccctggatgacatccggaaaattgagcggaatcgacaacccccagattcagggcccatgtgtgacctgctctggtcagatccacagccacagaacgggcgctcgatcagcaagcggggcgtgagctgtcagtttgggcctgacgtcaccaaggccttcttggaagagaacaacctggactatatcatccgcagccacgaagtcaaggccgagggctacgaggtggctcacggaggccgctgtgtcaccgtcttctctgcccccaactactgcgaccagatggggaacaaagcctcctacatccacctccagggctctgacctacggcctcagttccaccagttcacagcagtggtgagtcacccctcaggg

SEQ ID NO: 4224 - DNA, 3267 bp, Homo sapiens
ccaaaagaatgcaatggtgtaaagattccagttgatgccagtaaacctaatccaaatgatgtggagtttgataatctgtatttggatatgaatggaatcatccatccctgtactcatcctgaagacaaaccagcaccaaaaaatgaagatgaaatgatggttgcaatttttgagtacattgacagacttttcagtattgtaagaccaagaagacttctctacatggcaatagatggagtggcaccacgtgctaaaatgaaccagcagcgttcaaggaggttcagggcatcaaaagaaggaatggaagcagcagtcgagaagcagcgagtcagggaagaaatattggcaaaaggtggctttcttcctccagaagaaataaaagaaagatttgacagcaactgtattacaccaggaactgaattcatggacaatcttgctaaatgccttcgctattacatagctgatcgtttaaataatgaccctgggtggaaaaatttgacagttattttatctgatgctagtgctcctggtgaaggagaacataaaatcatggattacattagaaggcaaagagcccagcctaaccatgacccaaatactcatcattgtttatgtggagcagatgctgatctcattatgcttggccttgccacacatgaaccgaactttaccattattagagaagaattcaaaccaaacaagcccaaaccatgtggtctttgtaatcagtttggacatgaggtcaaagattgtgaaggtttgccaagagaaaagaagggaaagcatgatgaacttgccgatagtcttccttgtgcagaaggagagtttatcttccttcggcttaatgttcttcgtgagtatttggaaagagaactcacaatggccagcctaccattcacatttgatgttgagaggagcattgatgactgggttttcatgtgcttctttgtgggaaatgacttcctccctcatttgccatcgttagagattagggaaaatgcaattgaccgtttggttaacatatacaaaaatgtggtacacaaaactgggggttaccttacagaaagtggttatgtcaatctgcaaagagtacagatgatcatgttagcagttggtgaagttgaggatagcatttttaaaaagagaaaggatgatgaggacagttttagaagacgacagaaagaaaaaagaaagagaatgaagagagatcaaccagctttcactcctagtggaatattaactcctcatgccttgggttcaagaaattcaccaggttctcaagtagccagtaatccgagacaagcagcctatgaaatgaggatgcagaataactctagtccttcgatatctcctaatacgagtttcacatctgatggctccccgtctccattaggaggaattaagcgaaaagcagaagacagtgacagtgaacctgagccagaggataatgtcaggttatgggaagctggctggaagcagcggtactacaagaacaaatttgatgtggatgcagctgatgagaaattccgtcggaaagttgtgcagtcgtacgttgaaggactttgctgggttcttagatattattaccagggctgtgcttcctggaagtggtattatccatttcattatgcaccatttgcttcagactttgaaggcattgcagacatgccatctgattttgagaagggtacgaaaccgtttaaaccactagaacaacttatgggggtatttccagctgcaagtggtaattttctacctccatcatggcggaagctcatgagtgatcctgattctagtataattgacttctatcctgaagattttgctattgatttgaatgggaagaaatatgcatggcaaggtgttgctctcttgccattcgtggatgagcgaaggctacgagctgccctagaagaggtatacccagacctcactccagaagagaccagaagaaacagccttggaggtgatgtcttatttgtggggaaacatcacccactccatgacttcattttagagctgtaccagacaggttccacagagccagtggaggtaccccctgaactatgtcatgggattcaaggaaagttttctttggatgaagaagccattcttccagatcaaatagtatgttctcctgttcctatgttaagggatctgacacagaacactgtagtcagtattaattttaaagacccacagtttgctgaagattacatttttaaagctgtaatgcttccaggagcaagaaagccagcagcagtactgaaacctagtgaytgggaaaaatccagcaatggacggcagtggaagcctcagcttggctttaaccgtgaccggaggcctgtgcacctggatcaggcagccttcaggactttgggccatgtgatgccaagaggctcaggaactggcatttacagcaatgctgcaccaccacctgtgacttaccagggaaacttatacaggccgcttttgagaggacaagcccagattccaaaacttatgtcaaatatgaggccccaggattcctggcgaggtcctcctccccttttccagcagcaaaggtttgacagaggcgttggggctgaacctctgctcccatggaaccggatgctgcaaacccagaatgcagccttccagccaaaccagtaccagatgctagctgggcctggtgggtatccacccagacgagatgatcgtggagggagacagggatatcccagagaaggaaggaaataccctttgccaccaccctcaggaagatacaattggaattaagcttttgtaaagctttcccaaatcctttcatcattctacagttttatgctatttgtggaaagatttctttctcaagtagtagtttttaataaaactacagtactttgtgtatttcttttaactgtgtatatttctactgatctgatctcactgtttatgttgctttccaaagatgtatgttgcataatacagtggatctgaatttattattgcttataaaacacatttgatggaataggagtactggtttttcataatggttaaaaatgaaaccagctgtggatttcaaaacacagtktattctagatcatctaagatccatgctgatttttattgcacaagaattaggtttgaactcttgagctggaacctcagcaaactagagtatatattgttcagtatttctttggaaacatttcattaatgtacttgtcttacagaaatttctgaactttagtaaaaaaaaataaagttaaacttttaaaactc

SEQ ID NO: 4225 - DNA, 3414 bp, Homo sapiens
ctctgccgctgctcccgtctctttggttacgctcgtcagccggtcggccgccgcctccagccgtgtgccgctatgggagtcccggcgttcttccgctggctcagccgcaagtacccgtccatcatagtcaactgcgtggaagagaagccaaaagaatgcaatggtgtaaagattccagttgatgccagtaaacctaatccaaatgatgtggagtttgataatctgtatttggatatgaatggaatcatccatccctgtactcatcctgaagacaaaccagcaccaaaaaatgaagatgaaatgatggttgcaatttttgagtacattgacagacttttcagtattgtaagaccaagaagacttctctacatggcaatagatggagtggcaccacgtgctaaaatgaaccagcagcgttcaaggaggttcagggcatcaaaagaaggaatggaagcagcagtcgagaagcagcgagtcagggaagaaatattggcaaaaggtggctttcttcctccagaagaaataaaagaaagatttgacagcaactgtattacaccaggaactgaattcatggacaatcttgctaaatgccttcgctattacatagctgatcgtttaaataatgaccctgggtggaaaaatttgacagttattttatctgatgctagtgctcctggtgaaggagaacataaaatcatggattacattagaaggcaaagagcccagcctaaccatgacccaaatactcatcattgtttatgtggagcagatgctgatctcattatgcttggccttgccacacatgaaccgaactttaccattattagagaagaattcaaaccaaacaagcccaaaccatgtggtctttgtaatcagtttggacatgaggtcaaagattgtgaaggtttgccaagagaaaagaagggaaagcatgatgaacttgccgatagtcttccttgtgcagaaggagagtttatcttccttcggcttaatgttcttcgtgagtatttggaaagagaactcacaatggccagcctaccattcacatttgatgttgagaggagcattgatgactgggttttcatgtgcttctttgtgggaaatgacttcctccctcatttgccatcgttagagattagggaaaatgcaattgaccgtttggttaacatatacaaaaatgtggtacacaaaactgggggttaccttacagaaagtggttatgtcaatctgcaaagagtacagatgatcatgttagcagttggtgaagttgaggatagcatttttaaaaagagaaaggatgatgaggacagttttagaagacgacagaaagaaaaaagaaagagaatgaagagagatcaaccagctttcactcctagtggaatattaactcctcatgccttgggttcaagaaattcaccaggttctcaagtagccagtaatccgagacaagcagcctatgaaatgaggatgcagaataactctagtccttcgatatctcctaatacgagtttcacatctgatggctccccgtctccattaggaggaattaagcgaaaagcagaagacagtgacagtgaacctgagccagaggataatgtcaggttatgggaagctggctggaagcagcggtactacaagaacaaatttgatgtggatgcagctgatgagaaattccgtcggaaagttgtgcagtcgtacgttgaaggactttgctgggttcttagatattattaccagggctgtgcttcctggaagtggtattatccatttcattatgcaccatttgcttcagactttgaaggcattgcagacatgccatctgattttgagaagggtacgaaaccgtttaaaccactagaacaacttatgggggtatttccagctgcaagtggtaattttctacctccatcatggcggaagctcatgagtgatcctgattctagtataattgacttctatcctgaagattttgctattgatttgaatgggaagaaatatgcatggcaaggtgttgctctcttgccattcgtggatgagcgaaggctacgagctgccctagaagaggtatacccagacctcactccagaagagaccagaagaaacagccttggaggtgatgtcttatttgtggggaaacatcacccactccatgacttcattttagagctgtaccagacaggttccacagagccagtggaggtaccccctgaactatgtcatgggattcaaggaaagttttctttggatgaagaagccattcttccagatcaaatagtatgttctcctgttcctatgttaagggatctgacacagaacactgtagtcagtattaattttaaagacccacagtttgctgaagattacatttttaaagctgtaatgcttccaggagcaagaaagccagcagcagtactgaaacctagtgaytgggaaaaatccagcaatggacggcagtggaagcctcagcttggctttaaccgtgaccggaggcctgtgcacctggatcaggcagccttcaggactttgggccatgtgatgccaagaggctcaggaactggcatttacagcaatgctgcaccaccacctgtgacttaccagggaaacttatacaggccgcttttgagaggacaagcccagattccaaaacttatgtcaaatatgaggccccaggattcctggcgaggtcctcctccccttttccagcagcaaaggtttgacagaggcgttggggctgaacctctgctcccatggaaccggatgctgcaaacccagaatgcagccttccagccaaaccagtaccagatgctagctgggcctggtgggtatccacccagacgagatgatcgtggagggagacagggatatcccagagaaggaaggaaataccctttgccaccaccctcaggaagatacaattggaattaagcttttgtaaagctttcccaaatcctttcatcattctacagttttatgctatttgtggaaagatttctttctcaagtagtagtttttaataaaactacagtactttgtgtatttcttttaactgtgtatatttctactgatctgatctcactgtttatgttgctttccaaagatgtatgttgcataatacagtggatctgaatttattattgcttataaaacacatttgatggaataggagtactggtttttcataatggttaaaaatgaaaccagctgtggatttcaaaacacagtktattctagatcatctaagatccatgctgatttttattgcacaagaattaggtttgaactcttgagctggaacctcagcaaactagagtatatattgttcagtatttctttggaaacatttcattaatgtacttgtcttacagaaatttctgaactttagtaaaaaaaaataaagttaaacttttaaaactc

SEQ ID NO: 4226 - DNA, 3501 bp, Homo sapiens
ctctgccgctgctcccgtctctttggttacgctcgtcagccggtcggccgccgcctccagccgtgtgccgctatgggagtcccggcgttcttccgctggctcagccgcaagtacccgtccatcatagtcaactgcgtggaagagaagccaaaagaatgcaatggtgtaaagattccagttgatgccagtaaacctaatccaaatgatgtggagtttgataatctgtatttggatatgaatggaatcatccatccctgtactcatcctgaagacaaaccagcaccaaaaaatgaagatgaaatgatggttgcaatttttgagtacattgacagacttttcagtattgtaagaccaagaagacttctctacatggcaatagatggagtgtactgtgaaatactggggatgttggcgactgcccttgcttttgaacttttggcttactgtcaaagggaaggaggcatagataaatgggcaccacgtgctaaaatgaaccagcagcgttcaaggaggttcagggcatcaaaagaaggaatggaagcagcagtcgagaagcagcgagtcagggaagaaatattggcaaaaggtggctttcttcctccagaagaaataaaagaaagatttgacagcaactgtattacaccaggaactgaattcatggacaatcttgctaaatgccttcgctattacatagctgatcgtttaaataatgaccctgggtggaaaaatttgacagttattttatctgatgctagtgctcctggtgaaggagaacataaaatcatggattacattagaaggcaaagagcccagcctaaccatgacccaaatactcatcattgtttatgtggagcagatgctgatctcattatgcttggccttgccacacatgaaccgaactttaccattattagagaagaattcaaaccaaacaagcccaaaccatgtggtctttgtaatcagtttggacatgaggtcaaagattgtgaaggtttgccaagagaaaagaagggaaagcatgatgaacttgccgatagtcttccttgtgcagaaggagagtttatcttccttcggcttaatgttcttcgtgagtatttggaaagagaactcacaatggccagcctaccattcacatttgatgttgagaggagcattgatgactgggttttcatgtgcttctttgtgggaaatgacttcctccctcatttgccatcgttagagattagggaaaatgcaattgaccgtttggttaacatatacaaaaatgtggtacacaaaactgggggttaccttacagaaagtggttatgtcaatctgcaaagagtacagatgatcatgttagcagttggtgaagttgaggatagcatttttaaaaagagaaaggatgatgaggacagttttagaagacgacagaaagaaaaaagaaagagaatgaagagagatcaaccagctttcactcctagtggaatattaactcctcatgccttgggttcaagaaattcaccaggttctcaagtagccagtaatccgagacaagcagcctatgaaatgaggatgcagaataactctagtccttcgatatctcctaatacgagtttcacatctgatggctccccgtctccattaggaggaattaagcgaaaagcagaagacagtgacagtgaacctgagccagaggataatgtcaggttatgggaagctggctggaagcagcggtactacaagaacaaatttgatgtggatgcagctgatgagaaattccgtcggaaagttgtgcagtcgtacgttgaaggactttgctgggttcttagatattattaccagggctgtgcttcctggaagtggtattatccatttcattatgcaccatttgcttcagactttgaaggcattgcagacatgccatctgattttgagaagggtacgaaaccgtttaaaccactagaacaacttatgggggtatttccagctgcaagtggtaattttctacctccatcatggcggaagctcatgagtgatcctgattctagtataattgacttctatcctgaagattttgctattgatttgaatgggaagaaatatgcatggcaaggtgttgctctcttgccattcgtggatgagcgaaggctacgagctgccctagaagaggtatacccagacctcactccagaagagaccagaagaaacagccttggaggtgatgtcttatttgtggggaaacatcacccactccatgacttcattttagagctgtaccagacaggttccacagagccagtggaggtaccccctgaactatgtcatgggattcaaggaaagttttctttggatgaagaagccattcttccagatcaaatagtatgttctcctgttcctatgttaagggatctgacacagaacactgtagtcagtattaattttaaagacccacagtttgctgaagattacatttttaaagctgtaatgcttccaggagcaagaaagccagcagcagtactgaaacctagtgaytgggaaaaatccagcaatggacggcagtggaagcctcagcttggctttaaccgtgaccggaggcctgtgcacctggatcaggcagccttcaggactttgggccatgtgatgccaagaggctcaggaactggcatttacagcaatgctgcaccaccacctgtgacttaccagggaaacttatacaggccgcttttgagaggacaagcccagattccaaaacttatgtcaaatatgaggccccaggattcctggcgaggtcctcctccccttttccagcagcaaaggtttgacagaggcgttggggctgaacctctgctcccatggaaccggatgctgcaaacccagaatgcagccttccagccaaaccagtaccagatgctagctgggcctggtgggtatccacccagacgagatgatcgtggagggagacagggatatcccagagaaggaaggaaataccctttgccaccaccctcaggaagatacaattggaattaagcttttgtaaagctttcccaaatcctttcatcattctacagttttatgctatttgtggaaagatttctttctcaagtagtagtttttaataaaactacagtactttgtgtatttcttttaactgtgtatatttctactgatctgatctcactgtttatgttgctttccaaagatgtatgttgcataatacagtggatctgaatttattattgcttataaaacacatttgatggaataggagtactggtttttcataatggttaaaaatgaaaccagctgtggatttcaaaacacagtktattctagatcatctaagatccatgctgatttttattgcacaagaattaggtttgaactcttgagctggaacctcagcaaactagagtatatattgttcagtatttctttggaaacatttcattaatgtacttgtcttacagaaatttctgaactttagtaaaaaaaaataaagttaaacttttaaaactc

SEQ ID NO: 4227 - DNA, 1052 bp, Homo sapiens
acgctccgggagacttccggcagggcgggcgcggggtcttggcgaacggtcttcggaagcggcggcggcgcgatgaccacgctacgggcctttacctgcgacgacctgttccgcttcaacaacattaacttggatccacttacagaaacttatgggattcctttctacctacaatacctcgcccactggccagagtayttcattgttgcagaggcacctggtggagaattaatgggttatattatgggtaaagcagaaggctcagtagctagggaagaatggcacgggcacgtcacagctctgtctgttgccccagaatttcgacgccttggtttggctgctaaacttatggagttactagaggagatttcagaaagaaagggtggattttttgtggatctctttgtaagagtatctaaccaagttgcagttaacatgtacaagcagttgggctacagtgtatataggacggtcatagagtactattcggccagcaacggggagcctgatgaggacgcttatgatatgaggaaagcactttccagggatactgagaagaaatccatcataccattacctcatcctgtgaggcctgaagacattgaataaccctgggcagtggttcttaggcagatactctagatgctttatggacaatattattttcattggatgattctggagctctattaggagaaaagtaatcattttaggtcttaaagacttcaagaaaatacaggttatcaatttattttaaatctcattgtttccagttagcaatatcatacctattaaagctgttcrttgtaacaaaattcaatcaaaaaggcagctaggtcagaaggaaacataccactctcatggttcatagtattcactgtatgtatgctagggaaaagacttgctccagtctcctcctcagttctgtgcctgagaaccactgctgcatatatttgtttttaaattttgtattgaactgttaattgaagctttaaaagcatatatgaaatgtataaatctaagatgtataatacattattgactctatgaat

SEQ ID NO: 4228 - DNA, 877 bp, Homo sapiens
acgctccgggagacttccggcagggcgggcgcggggtcttggcgaacggtcttcggaagcggcggcggcgcgatgaccacgctacgggcctttacctgcgacgacctgttccgcttcaacaacattaacttggatccacttacagaaacttatgggattcctttctacctacaatacctcgcccactggccagagtayttcattgttgcagaggcacctggtggagaattaatgggttatattatgggtaaagcagaaggctcagtagctagggaagaatggcacgggcacgtcacagctctgtctgttgccccagaatttcgacgccttggtttggctgctaaacttatggagttactagaggagatttcagaaagaaagggtggattttttgtggatctctttgtaagagtatctaaccaagttgcagttaacatgtacaagcagttgggctacagtgtatataggacggtcatagagtactattcggccagcaacggggagcctgatgaggacgcttatgatatgaggaaagcactttccagggatactgagaagaaatccatcataccattacctcatcctgtgaggcctgaagacattgaataaccctgggcagtggttcttaggcagatactctagatgctttatggacaatattattttcattggatgattctggagctctattaggagaaaagtaatcattttaggtcttaaagacttcaagaaaatacaggttatcaatttattttaaatctcattgtttccagttagcaatatcatacctattaaagctgttcrttgtaacaaaagcagctaggtcagaaggaaacataccactctcatggttcatagtattcactgtatgtatgct

SEQ ID NO: 4229 - DNA, 1856 bp, Homo sapiens
atcctttttatagatgaggaaactagaacatcgagggtgaagccaaagaaggacttaggggcgctgtcgggggcggaggtttcctcgactgacaatgaccatcagatgggaaaaaaatcttcctccctgggatgaaaattagaagtcaaggtggaaagaggcaaatctgctaacggaggatccagtccccgctaccggcctgagcctcgcgttgcagcaagagagatgaaggccggcacccaggatgggcgaggtggaggccccgggccgcttgtggctcgagagcccccctgggggagcgccccccatcttcctgccctcggacgggcaagccctggtcctgggcaggggacccctgacccaggttacggaccggaagtgctccagaactcaagtggagctggtcgcagatcctgagacccggacagtggcagtgaaacagctgggagttaacccctcaactaccgggacccaggagttgaagccggggttggagggctctctgggggtgggggacacactgtatttggtcaatggcctccacccactgaccctgcgctgggaagagacccgcacaccagaatcccagccagatactccgcctggcacccctctggtgtcccaagatgagaagagagatgctgagctgccgaagaagcrtatgcggaagtcaaaccccggctgggagaacttggagaagttgctagtgttcaccgcagctggggtgaaaccccagggcaaggtggctggctttgatctggacgggacgctcatcaccacamgctctgggaaggtctttcccactggccccagtgactggaggatcttgtacccagagattccccgtaagctccgagagctggaagccgagggctacaagctggtgatcttcaccaaccagatgagcatcgggcgcgggaagctgccagccgaggagttcaaggccaaggtggaggctgtggtggagaagctgggggtccccttccaggtgctggtggccacgcacgcaggcttgtaccggaagccggtgacgggcatgtgggaccatctgcaggagcaggccaacgacggcacgcccatatccatcggggacagcatctttgtgggagacgcagccggacgcccggccaactgggccccggggcggaagaagaaagacttctcctgcgccgatcgcctgtttgccctcaaccttggcctgcccttcgccacgcctgaggagttctttctcaagtggccagcagccggcttcgagctcccagcctttgatccgaggactgtctcccgctcagggcctctctgcctccccgagtccagggccctcctgagcgccagcccggaggtggttgtcgcagtgggattccctggggccgggaagtccacctttctcaagaagcacctcgtgtcggccggatatgtccacgtgaacagggacacgctaggctcctggcagcgctgtgtgaccacgtgtgagacagccctgaagcaagggaaacgggtcgccatcgacaacacaaacccagacgccgcgagccgcgccaggtacgtccagtgtgcccgagccgcgggcgtcccctgccgctgcttcctcttcaccgccactctggagcaggcgcgccacaacaaccggtttcgagagatgacggactcctctcatatccccgtgtcagacatggtcatgtatggctacaggaagcagttcgaggccccaacgctggctgaaggcttctctgccatcctggagatcccgttccggctatgggtggagccgaggctggggcggctgtactgccagttctccgagggctgagccccgcccagctcccctccacaataaacgctgtttctccttgagc

SEQ ID NO: 4230 - DNA, 1943 bp, Homo sapiens
atcctttttatagatgaggaaactagaacatcgagggtgaagccaaagaaggacttaggggcgctgtcgggggcggaggtttcctcgactgacaatgaccatcagatgggaaaaaaatcttcctccctgggatgaaaattagaagtcaaggtggaaagaggcaaatctgctaacggaggatccagtccccgctaccggcctgagcctcgcgttgcagcaagagagatgaaggccggcacccaggatgggcgaggtggaggccccgggccgcttgtggctcgagagcccccctgggggagcgccccccatcttcctgccctcggacgggcaagccctggtcctgggcaggggacccctgacccaggttacggaccggaagtgctccagaactcaagtggagctggtcgcagatcctgagacccggacagtggcagtgaaacagctgggagttaacccctcaactaccgggacccaggagttgaagccggggttggagggctctctgggggtgggggacacactgtatttggtcaatggcctccacccactgaccctgcgctgggaagagacccgcacaccagaatcccagccagatactccgcctggcacccctctggtgtcccaagatgagaagagagatgctgagctgccgaagaagcrtatgcggaagtcaaaccccggctgggagaacttggagaagttgctagtgttcaccgcagctggggtgaaaccccagggcaaggtggctggctttgatctggacgggacgctcatcaccacamgctctgggaaggtctttcccactggccccagtgactggaggtgataagaggcaaaacaagggagtgagtgaggcctggagtccacctctggccccgggtcacccctgccgcttcatacctgccgtaggatcttgtacccagagattccccgtaagctccgagagctggaagccgagggctacaagctggtgatcttcaccaaccagatgagcatcgggcgcgggaagctgccagccgaggagttcaaggccaaggtggaggctgtggtggagaagctgggggtccccttccaggtgctggtggccacgcacgcaggcttgtaccggaagccggtgacgggcatgtgggaccatctgcaggagcaggccaacgacggcacgcccatatccatcggggacagcatctttgtgggagacgcagccggacgcccggccaactgggccccggggcggaagaagaaagacttctcctgcgccgatcgcctgtttgccctcaaccttggcctgcccttcgccacgcctgaggagttctttctcaagtggccagcagccggcttcgagctcccagcctttgatccgaggactgtctcccgctcagggcctctctgcctccccgagtccagggccctcctgagcgccagcccggaggtggttgtcgcagtgggattccctggggccgggaagtccacctttctcaagaagcacctcgtgtcggccggatatgtccacgtgaacagggacacgctaggctcctggcagcgctgtgtgaccacgtgtgagacagccctgaagcaagggaaacgggtcgccatcgacaacacaaacccagacgccgcgagccgcgccaggtacgtccagtgtgcccgagccgcgggcgtcccctgccgctgcttcctcttcaccgccactctggagcaggcgcgccacaacaaccggtttcgagagatgacggactcctctcatatccccgtgtcagacatggtcatgtatggctacaggaagcagttcgaggccccaacgctggctgaaggcttctctgccatcctggagatcccgttccggctatgggtggagccgaggctggggcggctgtactgccagttctccgagggctgagccccgcccagctcccctccacaataaacgctgtttctccttgagc

SEQ ID NO: 4231 - DNA, 2025 bp, Homo sapiens
tgaagccaaagaaggacttaggggcgctgtcgggggcggaggtttcctcgactgacaatgaccatcagatgggaaaaaaatcttcctccctgggatgaaaattagaagtcaaggtggaaagaggcaaatctgctaacggaggatccagtccccgctaccggcctgagcctcgcgttgcagcaagagagatgaaggtcagggctgccgagagaccctgggggccgggagtcggggaaggggcgtggctgctgtgggaggaggccaggccccgccccccacgaggggacgagtcatttccgtccgccgaggaaccgaccgccgccggccgggttgcaggcggggcacctcgggcaggacctccctggtcggaagtggccgtgagcccaagccgcggtcccgggccggcacccaggatgggcgaggtggaggccccgggccgcttgtggctcgagagcccccctgggggagcgccccccatcttcctgccctcggacgggcaagccctggtcctgggcaggggacccctgacccaggttacggaccggaagtgctccagaactcaagtggagctggtcgcagatcctgagacccggacagtggcagtgaaacagctgggagttaacccctcaactaccgggacccaggagttgaagccggggttggagggctctctgggggtgggggacacactgtatttggtcaatggcctccacccactgaccctgcgctgggaagagacccgcacaccagaatcccagccagatactccgcctggcacccctctggtgtcccaagatgagaagagagatgctgagctgccgaagaagcrtatgcggaagtcaaaccccggctgggagaacttggagaagttgctagtgttcaccgcagctggggtgaaaccccagggcaaggtggctggctttgatctggacgggacgctcatcaccacamgctctgggaaggtctttcccactggccccagtgactggaggatcttgtacccagagattccccgtaagctccgagagctggaagccgagggctacaagctggtgatcttcaccaaccagatgagcatcgggcgcgggaagctgccagccgaggagttcaaggccaaggtggaggctgtggtggagaagctgggggtccccttccaggtgctggtggccacgcacgcaggcttgtaccggaagccggtgacgggcatgtgggaccatctgcaggagcaggccaacgacggcacgcccatatccatcggggacagcatctttgtgggagacgcagccggacgcccggccaactgggccccggggcggaagaagaaagacttctcctgcgccgatcgcctgtttgccctcaaccttggcctgcccttcgccacgcctgaggagttctttctcaagtggccagcagccggcttcgagctcccagcctttgatccgaggactgtctcccgctcagggcctctctgcctccccgagtccagggccctcctgagcgccagcccggaggtggttgtcgcagtgggattccctggggccgggaagtccacctttctcaagaagcacctcgtgtcggccggatatgtccacgtgaacagggacacgctaggctcctggcagcgctgtgtgaccacgtgtgagacagccctgaagcaagggaaacgggtcgccatcgacaacacaaacccagacgccgcgagccgcgccaggtacgtccagtgtgcccgagccgcgggcgtcccctgccgctgcttcctcttcaccgccactctggagcaggcgcgccacaacaaccggtttcgagagatgacggactcctctcatatccccgtgtcagacatggtcatgtatggctacaggaagcagttcgaggccccaacgctggctgaaggcttctctgccatcctggagatcccgttccggctatgggtggagccgaggctggggcggctgtactgccagttctccgagggctgagccccgcccagctcccctccacaataaacgctgtttctccttgagc

SEQ ID NO: 4232 - DNA, 1625 bp, Homo sapiens
gccggcacccaggatgggcgaggtggaggccccgggccgcttgtggctcgagagcccccctgggggagcgccccccatcttcctgccctcggacgggcaagccctggtcctgggcaggggacccctgacccaggttacggaccggaagtgctccagaactcaagtggagctggtcgcagatcctgagacccggacagtggcagtgaaacagctgggagttaacccctcaactaccgggacccaggagttgaagccggggttggagggctctctgggggtgggggacacactgtatttggtcaatggcctccacccactgaccctgcgctgggaagagacccgcacaccagaatcccagccagatactccgcctggcacccctctggtgtcccaagatgagaagagagatgctgagctgccgaagaagcrtatgcggaagtcaaaccccggctgggagaacttggagaagttgctagtgttcaccgcagctggggtgaaaccccagggcaaggtggctggctttgatctggacgggacgctcatcaccacamgctctgggaaggtctttcccactggccccagtgactggaggatcttgtacccagagattccccgtaagctccgagagctggaagccgagggctacaagctggtgatcttcaccaaccagatgagcatcgggcgcgggaagctgccagccgaggagttcaaggccaaggtggaggctgtggtggagaagctgggggtccccttccaggtgctggtggccacgcacgcaggcttgtaccggaagccggtgacgggcatgtgggaccatctgcaggagcaggccaacgacggcacgcccatatccatcggggacagcatctttgtgggagacgcagccggacgcccggccaactgggccccggggcggaagaagaaagacttctcctgcgccgatcgcctgtttgccctcaaccttggcctgcccttcgccacgcctgaggagttctttctcaagtggccagcagccggcttcgagctcccagcctttgatccgaggactgtctcccgctcagggcctctctgcctccccgagtccagggccctcctgagcgccagcccggaggtggttgtcgcagtgggattccctggggccgggaagtccacctttctcaagaagcacctcgtgtcggccggatatgtccacgtgaacagggacacgctaggctcctggcagcgctgtgtgaccacgtgtgagacagccctgaagcaagggaaacgggtcgccatcgacaacacaaacccagacgccgcgagccgcgccaggtacgtccagtgtgcccgagccgcgggcgtcccctgccgctgcttcctcttcaccgccactctggagcaggcgcgccacaacaaccggtttcgagagatgacggactcctctcatatccccgtgtcagacatggtcatgtatggctacaggaagcagttcgaggccccaacgctggctgaaggcttctctgccatcctggagatcccgttccggctatgggtggagccgaggctggggcggctgtactgccagttctccgagggctgagccccgcccagctcccctccacaataaacgctgtttctccttgagc

SEQ ID NO: 4233 - DNA, 2093 bp, Homo sapiens
ggcacctcgggcaggacctccctggtcggaagtggccgtgagcccaagccgcggtcccgggtgagtacggggcggggcggaggcatgtgcgaggctctctgcctgtacgctggaaagtggggattgcaactcggggagggatggagyacgcgtcgtcgcctgggaaacgggtcgacccgcggaaggcgagcgggtgggacttccggagcagttaatggtggggaaactttctagtggatgtgggaggaggcgggacttcctgcagcaaattggggctgtgcgccgctcaagcccgtttacctgctccccaggccggcacccaggatgggcgaggtggaggccccgggccgcttgtggctcgagagcccccctgggggagcgccccccatcttcctgccctcggacgggcaagccctggtcctgggcaggggacccctgacccaggttacggaccggaagtgctccagaactcaagtggagctggtcgcagatcctgagacccggacagtggcagtgaaacagctgggagttaacccctcaactaccgggacccaggagttgaagccggggttggagggctctctgggggtgggggacacactgtatttggtcaatggcctccacccactgaccctgcgctgggaagagacccgcacaccagaatcccagccagatactccgcctggcacccctctggtgtcccaagatgagaagagagatgctgagctgccgaagaagcrtatgcggaagtcaaaccccggctgggagaacttggagaagttgctagtgttcaccgcagctggggtgaaaccccagggcaaggtggctggctttgatctggacgggacgctcatcaccacamgctctgggaaggtctttcccactggccccagtgactggaggtgataagaggcaaaacaagggagtgagtgaggcctggagtccacctctggccccgggtcacccctgccgcttcatacctgccgtaggatcttgtacccagagattccccgtaagctccgagagctggaagccgagggctacaagctggtgatcttcaccaaccagatgagcatcgggcgcgggaagctgccagccgaggagttcaaggccaaggtggaggctgtggtggagaagctgggggtccccttccaggtgctggtggccacgcacgcaggcttgtaccggaagccggtgacgggcatgtgggaccatctgcaggagcaggccaacgacggcacgcccatatccatcggggacagcatctttgtgggagacgcagccggacgcccggccaactgggccccggggcggaagaagaaagacttctcctgcgccgatcgcctgtttgccctcaaccttggcctgcccttcgccacgcctgaggagttctttctcaagtggccagcagccggcttcgagctcccagcctttgatccgaggactgtctcccgctcagggcctctctgcctccccgagtccagggccctcctgagcgccagcccggaggtggttgtcgcagtgggattccctggggccgggaagtccacctttctcaagaagcacctcgtgtcggccggatatgtccacgtgaacagggtacgtccagtgtgcccgagccgcgggcgtcccctgccgctgcttcctcttcaccgccactctggagcaggcgcgccacaacaaccgggtgagcccgctcagcccggacaccccccgggctgcaccccctgacccccctcctcccctgacccctgggcctgccgcccctctgatgttccccacagtttcgagagatgacggactcctctcatatccccgtgtcagacatggtcatgtatggctacaggtactgttggggatagcagggggcaggggcactggctgggccacatgatccaggctgtccctcactgttcccaccactgccaggaagcagttcgaggccccaacgctggctgaaggcttctctgccatcctggagatcccgttccggctatgggtggagccgaggctggggcggctgtactgccagttctccgagggctgagccccgcccagctcccctccacaataaacgctgtttctccttgagc

SEQ ID NO: 4234 - DNA, 1515 bp, Homo sapiens
aattttgtagccaccttggctaatgggatgagcctccagccgcctcttgaagaagtgtcctgtggccaggcggaaagcagtgagaagcccaacgctgaggacatgacatccaaagattactactttgactcctacgcacactttggcatccacgaggagatgctgaaggacgaggtgcgcaccctcacttaccgcaactccatgtttcataaccggcacctcttcawggacaaggtggtgctggacgtcggctcgggcaccggcatcctctgcatgtttgctgccaaggccggggcccrcaaggtcatcgggatcgwgtgttccagtatctctgattatgcggtgaagatcgtcaaagccaacaagttagaccacgtggtgaccatcatcaaggggaaggtggaggaggtggagctcccagtggagaaggtggacatcatcatcagcgagtggatgggctactgcctcttctacgagtccatgctcaacaccgtgctctatgcccgggacaagtggctggcgcccgatggcctcatcttcccagaccgggccacgctgtatgtgacggccatcgaggaccggcagtacaaagactacaagatccactggtgggagaacgtgtatggcttcgacatgtcttgcatcaaagatgtggccattaaggagcccctagtggatgtcgtggaccccaaacagctggtcaccaacgcctgcctcataaaggaggtggacatctataccgtcaaggtggaagacctgaccttcacctccccgttctgcctgcaagtgaagcggaatgactacgtgcacgccctggtggcctacttcaacatcgagttcacacgctgccacaagaggaccggcttctccaccagccccgagtccccgtacacgcactggaagcagacggtgttctacatggaggactacctgaccgtgaagacgggcgaggagatcttcggcaccatcggcatgcggcccaacgccaagaacaaccgggacctggacttcaccatcgacctggacttcaagggccagctgtgcgagctgtcctgctccaccgactaccggatgcgctgaggcccggctctcccgccctgcacgagcccaggggctgagcgttcctaggcggtttcggggctcccccttcctctccctccctcccgcagaagggggttttaggggcctgggctggggggatggggagggcacatcgtgactgtgtttttcataacttatgtttttatatggttgcatttacgccaataaatcctcagctggggtctggctttgtttcctgggggcaaaggaggtttggggttcctttcgcaggtactgcagtgccagcctcagcagtggggggaccggccttggcacctgctggtggctgccattctgtggatctgcgtctcccgtcccccgtctctaggcctcttgctccccttccttggttccttctcggggtccctgtcctccacagctgtctctcagggtctttgtccaactcttttcatc

SEQ ID NO: 4235 - DNA, 1746 bp, Homo sapiens
ccctgacctatgatggacgtattctctagccaattactagacggtattctcagacgggccgcctccattgccaatgaaatcttccagcggggtcgcggtaggcgggccgtggaccctctggtataaggcggtcccgggggagtgaggagaaagggggggtcttggcggccggaggaggagtaggtgcgggtgaagatggcggcagccgaggccgcgaactgcatcatggagaattttgtagccaccttggctaatgggatgagcctccagccgcctcttgaagaagtgtcctgtggccaggcggaaagcagtgagaagcccaacgctgaggacatgacatccaaagattactactttgactcctacgcacactttggcatccacgaggagatgctgaaggacgaggtgcgcaccctcacttaccgcaactccatgtttcataaccggcacctcttcawggacaaggtggtgctggacgtcggctcgggcaccggcatcctctgcatgtttgctgccaaggccggggcccrcaaggtcatcgggatcgwgtgttccagtatctctgattatgcggtgaagatcgtcaaagccaacaagttagaccacgtggtgaccatcatcaaggggaaggtggaggaggtggagctcccagtggagaaggtggacatcatcatcagcgagtggatgggctactgcctcttctacgagtccatgctcaacaccgtgctctatgcccgggacaagtggctggcgcccgatggcctcatcttcccagaccgggccacgctgtatgtgacggccatcgaggaccggcagtacaaagactacaagatccactggtgggagaacgtgtatggcttcgacatgtcttgcatcaaagatgtggccattaaggagcccctagtggatgtcgtggaccccaaacagctggtcaccaacgcctgcctcataaaggaggtggacatctataccgtcaaggtggaagacctgaccttcacctccccgttctgcctgcaagtgaagcggaatgactacgtgcacgccctggtggcctacttcaacatcgagttcacacgctgccacaagaggaccggcttctccaccagccccgagtccccgtacacgcactggaagcagacggtgttctacatggaggactacctgaccgtgaagacgggcgaggagatcttcggcaccatcggcatgcggcccaacgccaagaacaaccgggacctggacttcaccatcgacctggacttcaagggccagctgtgcgagctgtcctgctccaccgactaccggatgcgctgaggcccggctctcccgccctgcacgagcccaggggctgagcgttcctaggcggtttcggggctcccccttcctctccctccctcccgcagaagggggttttaggggcctgggctggggggatggggagggcacatcgtgactgtgtttttcataacttatgtttttatatggttgcatttacgccaataaatcctcagctggggtctggctttgtttcctgggggcaaaggaggtttggggttcctttcgcaggtactgcagtgccagcctcagcagtggggggaccggccttggcacctgctggtggctgccattctgtggatctgcgtctcccgtcccccgtctctaggcctcttgctccccttccttggttccttctcggggtccctgtcctccacagctgtctctcagggtctttgtccaactcttttcatc

SEQ ID NO: 4236 - DNA, 1685 bp, Homo sapiens
ctatgatggacgtattctctagccaattactagacggtattctcagacgggccgcctccattgccaatgaaatcttccagcggggtcgcggtaggcgggccgtggaccctctggtataaggcggtcccgggggagtgaggagaaagggggggtcttggcggccggaggaggagtaggtgcgggtgaagatggcggcagccgaggccgcgaactgcatcatggaggtgtcctgtggccaggcggaaagcagtgagaagcccaacgctgaggacatgacatccaaagattactactttgactcctacgcacactttggcatccacgaggagatgctgaaggacgaggtgcgcaccctcacttaccgcaactccatgtttcataaccggcacctcttcawggacaaggtggtgctggacgtcggctcgggcaccggcatcctctgcatgtttgctgccaaggccggggcccrcaaggtcatcgggatcgwgtgttccagtatctctgattatgcggtgaagatcgtcaaagccaacaagttagaccacgtggtgaccatcatcaaggggaaggtggaggaggtggagctcccagtggagaaggtggacatcatcatcagcgagtggatgggctactgcctcttctacgagtccatgctcaacaccgtgctctatgcccgggacaagtggctggcgcccgatggcctcatcttcccagaccgggccacgctgtatgtgacggccatcgaggaccggcagtacaaagactacaagatccactggtgggagaacgtgtatggcttcgacatgtcttgcatcaaagatgtggccattaaggagcccctagtggatgtcgtggaccccaaacagctggtcaccaacgcctgcctcataaaggaggtggacatctataccgtcaaggtggaagacctgaccttcacctccccgttctgcctgcaagtgaagcggaatgactacgtgcacgccctggtggcctacttcaacatcgagttcacacgctgccacaagaggaccggcttctccaccagccccgagtccccgtacacgcactggaagcagacggtgttctacatggaggactacctgaccgtgaagacgggcgaggagatcttcggcaccatcggcatgcggcccaacgccaagaacaaccgggacctggacttcaccatcgacctggacttcaagggccagctgtgcgagctgtcctgctccaccgactaccggatgcgctgaggcccggctctcccgccctgcacgagcccaggggctgagcgttcctaggcggtttcggggctcccccttcctctccctccctcccgcagaagggggttttaggggcctgggctggggggatggggagggcacatcgtgactgtgtttttcataacttatgtttttatatggttgcatttacgccaataaatcctcagctggggtctggctttgtttcctgggggcaaaggaggtttggggttcctttcgcaggtactgcagtgccagcctcagcagtggggggaccggccttggcacctgctggtggctgccattctgtggatctgcgtctcccgtcccccgtctctaggcctcttgctccccttccttggttccttctcggggtccctgtcctccacagctgtctctcagggtctttgtccaactcttttcatc

SEQ ID NO: 4237 - DNA, 1391 bp, Homo sapiens
ctatgatggacgtattctctagccaattactagacggtattctcagacgggccgcctccattgccaatgaaatcttccagcggggtcgcggtaggcgggccgtggaccctctggtataaggcggtcccgggggagtgaggagaaagggggggtcttggcggccggaggaggagtaggtgcgggtgaagatggcggcagccgaggccgcgaactgcatcatggaggtgtcctgtggccaggcggaaagcagtgagaagcccaacgctgaggacatgacatccaaagattactactttgactcctacgcacactttggcatccacgaggagatgctgaaggacgaggtgcgcaccctcacttaccgcaactccatgtttcataaccggcacctcttcawggacaaggtggtgctggacgtcggctcgggcaccggcatcctctgcatgtttgctgccaaggccggggcccrcaaggtcatcgggatcgwgtgttccagtatctctgattatgcggtgaagatcgtcaaagccaacaagttagaccacgtggtgaccatcatcaaggggaaggtggaggaggtggagctcccagtggagaaggaggtggacatctataccgtcaaggtggaagacctgaccttcacctccccgttctgcctgcaagtgaagcggaatgactacgtgcacgccctggtggcctacttcaacatcgagttcacacgctgccacaagaggaccggcttctccaccagccccgagtccccgtacacgcactggaagcagacggtgttctacatggaggactacctgaccgtgaagacgggcgaggagatcttcggcaccatcggcatgcggcccaacgccaagaacaaccgggacctggacttcaccatcgacctggacttcaagggccagctgtgcgagctgtcctgctccaccgactaccggatgcgctgaggcccggctctcccgccctgcacgagcccaggggctgagcgttcctaggcggtttcggggctcccccttcctctccctccctcccgcagaagggggttttaggggcctgggctggggggatggggagggcacatcgtgactgtgtttttcataacttatgtttttatatggttgcatttacgccaataaatcctcagctggggtctggctttgtttcctgggggcaaaggaggtttggggttcctttcgcaggtactgcagtgccagcctcagcagtggggggaccggccttggcacctgctggtggctgccattctgtggatctgcgtctcccgtcccccgtctctaggcctcttgctccccttccttggttccttctcggggtccctgtcctccacagctgtctctcagggtctttgtccaactcttttcatc

SEQ ID NO: 4238 - DNA, 1568 bp, Homo sapiens
agagttggcaaacccctgacctatgatggacgtattctctagccaattactagacggtattctcagacgggccgcctccattgccaatgaaatcttccagcggggtcgtgtcctgtggccaggcggaaagcagtgagaagcccaacgctgaggacatgacatccaaagattactactttgactcctacgcacactttggcatccacgaggagatgctgaaggacgaggtgcgcaccctcacttaccgcaactccatgtttcataaccggcacctcttcawggacaaggtggtgctggacgtcggctcgggcaccggcatcctctgcatgtttgctgccaaggccggggcccrcaaggtcatcgggatcgwgtgttccagtatctctgattatgcggtgaagatcgtcaaagccaacaagttagaccacgtggtgaccatcatcaaggggaaggtggaggaggtggagctcccagtggagaaggtggacatcatcatcagcgagtggatgggctactgcctcttctacgagtccatgctcaacaccgtgctctatgcccgggacaagtggctggcgcccgatggcctcatcttcccagaccgggccacgctgtatgtgacggccatcgaggaccggcagtacaaagactacaagatccactggtgggagaacgtgtatggcttcgacatgtcttgcatcaaagatgtggccattaaggagcccctagtggatgtcgtggaccccaaacagctggtcaccaacgcctgcctcataaaggaggtggacatctataccgtcaaggtggaagacctgaccttcacctccccgttctgcctgcaagtgaagcggaatgactacgtgcacgccctggtggcctacttcaacatcgagttcacacgctgccacaagaggaccggcttctccaccagccccgagtccccgtacacgcactggaagcagacggtgttctacatggaggactacctgaccgtgaagacgggcgaggagatcttcggcaccatcggcatgcggcccaacgccaagaacaaccgggacctggacttcaccatcgacctggacttcaagggccagctgtgcgagctgtcctgctccaccgactaccggatgcgctgaggcccggctctcccgccctgcacgagcccaggggctgagcgttcctaggcggtttcggggctcccccttcctctccctccctcccgcagaagggggttttaggggcctgggctggggggatggggagggcacatcgtgactgtgtttttcataacttatgtttttatatggttgcatttacgccaataaatcctcagctggggtctggctttgtttcctgggggcaaaggaggtttggggttcctttcgcaggtactgcagtgccagcctcagcagtggggggaccggccttggcacctgctggtggctgccattctgtggatctgcgtctcccgtcccccgtctctaggcctcttgctccccttccttggttccttctcggggtccctgtcctccacagctgtctctcagggtctttgtccaactcttttcatc

SEQ ID NO: 4239 - DNA, 1787 bp, Homo sapiens
ggagggcagtggagaggaccgcgctgtcctgctgtcaccaagagctggagacaccatctcccaccgagagtcatggccccattggccctgcacctcctcgtcctcgtccccatcctcctcagcctggtggcctcccaggactggaaggctgaacgcagccaagaccccttcgagaaatgcatgcaggatcctgactatgagcagctgctcaaggtggtgacctgggggctcaatcggaccctgaagccccagagggtgattgtggttggcgctggtgtggccgggctggtggccgccaaggtgctcagcgatgctggacacaaggtcaccatcctggaggcagataacaggatcgggggccgcatcttcacctaccgggaccagaacacgggctggattggggagctgggagccatgcgcatgcccagctctcacaggatcctccacaagctctgccagggcctggggctcaacctgaccaagttcacccagtacgacaagaacacgtggacggaggtgcacgaagtgaagctgcgcaactatgtggtggagaaggtgcccgagaagctgggctacgccttgcgtccccaggaaaagggccactcgcccgaagacatctaccagatggctctcaaccaggccctcaaagacctcaaggcactgggctgcagaaaggygatgaagaagtttgaaaggcacacgctcttggaatatcttctcggggaggggaacctgagccggccggccgtgcagcttctgggagacgtgatgtccgaggatggcttcttctatctcagcttcgccgaggccctccgggcccacagctgcctcagcgacagactccagtacagccgcatcgtgggtggctgggacctgctgccgcgcgcgctgctgagctcgctgtccgggcttgtgctgttgaacgcgcccgtggtggcgatgacccagggaccgcacgaygtgcacgtgcagatcgagacctctcccccggcgcggaatctgaaggtgctgaaggccgacgtggtgctgctgacggcgagcggaccggcggtgaagcgcatcaccttctcgccgccgctgccccgccacatgcaggaggcgctgcggaggctgcactacgtgccggccaccaaggtgttcctaagcttccgcaggcccttctggcgcgaggagcacattgaaggcggccactcaaacaccgatcgcccgtcgcgcatgattttctacccgccgccgcgcgagggcgcgctgctgctggcctcgtacacgtggtcggacgcggcggcagcgttcgccggcttgagccgggaagaggcgttgcgcttggcgctcgacgacgtggcggcattgcacgggcctgtcgtgcgccagctctgggacggcaccggcgtcgtcaagcgttgggcggaggaccagcacagccagggtggctttgtggtacagccgccggcgctctggcaaaccgaaaaggatgactggacggtcccttatggccgcatctactttgccggcgagcacaccgcctacccgcacggctgggtggagacggcggtcaagtcggcgctgcgcgcckccatcaagatcaacagccggaaggggcctgcatcggacacggccagccccgaggggcacgcatctgacatggaggggcaggggcatgtgcatggggtggccagcagcccctcgcatgacctggcaaaggaagaaggcagccaccctccagtccaaggccagttatctctccaaaacacgacccacacgaggacctcgcattaaagtattttcgg

SEQ ID NO: 4240 - DNA, 2408 bp, Homo sapiens
ccgcagggagcctggtacccgcctggagttcctttcccagtgctttcccataggcatctaagaatattccttcacagagttgccaagtgctaaaagttggtttcccaactcagaatgaaggaaccaggcttgtgcgtccgatgggcattgacattctggaaaacaagaataagaagctgtagcggcgcctgtaagtgggccggagcaggcgcagcttggccacctcccgccgaaaggcaaggaaggaccggctgcgacacgaggaagaaggcccctcggcctcagcagagcgctatcctccmctggttmcccgggttccccggcttgstaccgggctgctccgtgcatctttcmccccaggcgtcaggaactgcgccctcatggcggaggtgaaggtgaaggtgcagccgcctgacgcggatccggtcgaaatagaaaacaggattatagaattatgtcaccagttccctcatggaatcacagaccaagtaattcagaatgaaatgcctcatatagaagcccagcagcgggcagtagccatcaataggttgttgtctatgggtcagttggatctcttaaggagcaatacgggccttttatatagaataaaggactctcagaatgctggtaaaatgaagggatcygataaccaagaaaaactagtatatcaaatcatagaggatgcaggaaataaaggaatatggagcagagatatccgctataaaagtaatttgccattaacagaaatcaacaaaattctgaagaatctggaaagtaaaaagcttatcaaagctgttaagtctgtagcagcctcaaaaaagaaggtgtatatgctctataacctgcagccagaccggtctgtgactggtggagcctggtacagtgaccaggattttgaatctgaatttgtagaggtgcttaaccaacagtgttttaaattcctacagtccaaggcagaaacagcacgagaaagcaaacaraacccaatgatacaaagaaatagttcatttgcctcatcacatgaagtgtggaaatatatctgcgaattgggaatcagtaaggtagagttatccatggaagacattgaaaccatcctgaatacactcatttatgatggaaaagtggagatgacgattattgctgcaaaagaaggcacagttggcagtgtagatggacacatgaaactgtacagggcagtcaatccaatcatcyctcccacrggtttggtccgggcaccctgtggactctgcccggtttttgatgactgccacgaaggtggtgagatttcaccatctaactgtatttacatgacagagtggctcgaattttaatagagagctatgaactttattgacattttgcaaatgaagttacttagggagcagataatttaattcatgatggaacacgaaatctccttgaaagcaaacttcacaataatggacgtagacttgctgctatgaaaacatattttttttatttatgaagactaaatttatattggtaaaatagccagtagaatatgaaagaaataaggttagtagtgaaattcattaataawaaaacactttgaaactccggaggaccacatctttcaagacttctgatgggtcaaggmaaaagatgccaacatacccgtatttaccaagtactatgataatggctagagtataaaaatgttctttttaaagttatttattaagttcttcattggaagtttttttttatatctggttcactaccaccattttctgtttcctactttctcagtggtttcattgaaaagaaattagaagkggttaaaggcaggaatagcaaagagtgcaaacttggggtatgactgggggagagtggaacatgccttttccgcacaatattaattcctttttgtatcagaaatgttcttttaggagattatgctaccatacttacttcaaacccaatgactactgtcaaggwcatattttcagtacataaatactatcattttcattctaaagaatattttcactgttccttctttcttaaagtcttatgtttcactctttaactcaaatgtattctttgttagaatttaccctagattcttatttaatgtctgcagtagactgaatgtttgtgtgcmccsagaattctaatgttgaaatctcatttccaatgtgatggtatttggaggtggggcttttggtaagtgataggtcaggagagtaacagcgctcatgaatgkgattagtgcccttatataaagagacccagagagctccatcaccccttctgccatgtgaaagggagaagacaaacatccacgaaccaggaagtgggtcctcaccagaaaacaaatctgtaagcaccttgatcttggacttcycagcctccagaattgtgagaaataaatttctgttgttgat

SEQ ID NO: 4241 - DNA, 3378 bp, Homo sapiens
tgaggcctgaggcctggggcggggtggcggccgggctggcsttggcctcgcgccttcccctgcggccgccgcgggctccgcgggcggtatcggagtgtcgtgcggcgcgtggccgcgtgacacgcgcacttgtcggagtgacgggccctgcggaagaggaggtgcggcccagggcgcaggggagccctcgggagcgggcccggccctcagcgccgccccggccgtgtcccggaggagcggcctgcgccgccgcgcgagaggaagcacccaggcatgtggaatatgctcatagtggcgatgtgcttggcccttctgggctgcctgcaagcccaggagctccagggacatgtctccataatcctgctgggagcaactggggacctggctaagaagtacttatggcagggactgttccagctgtacctggatgaagcggggaggggtcacagttttagcttccatggagctgctctgacagcccccaagcagggtcaagagctcatggccaaggccctggaatccctctcctgccccaaggacatggcacccagtcactgtgcagagcacaaggatcagttcctgcagctgagccagtaccgccaactgaagacggccgaggactatcaggccctgaacaaggacatcgaggcacagctccagcacgcaggcctccgggaggctggcaggatcttctacttctcagtgccacccttcgcctatgaagmcattgcccgcaacatcaacagtagctgccggccaggcccgggcgcctggctgygggttgtccttgagaaaccctttggccatgaccacttctcagcccagcagctggccacagaactcgggacctttttccaggaggaggagatgtaccgggtggaccattacttaggcaagcaggctgtggcrcagatcctgcctttccragaccagaaccgcaaggctttggayggcctctggaaccrgcaccatgtggagcgggtggagatcatcatgaaagagaccgtggatgcygaaggccgcaccagcttctatgaggagtacggtgtcattcgcgacgtcctccagaaccatctgacggaggtcctcaccctcgtggccatggagctgccccacaatgtcagcagtgcggaggctgtgctgcggcacaagcttcaggtcttccaggcgctgcggggcctgcagaggggcagtgccgtygtgggccagtaccagtcttacagtgagcaggtgcgcagagagctgcagaagccagacagcttccacagcctgacgccgaccttcgcagccgtcctagtgcacattgacaaccttcgctgggagggygtgcctttcatcctgatgtctggcaaagccttggacgagagagtgggctacgctcggatcttgttcaagaaccaggcctgctgtgtgcagagcgaaaagcactgggccgcggcgcagagccagtgcctgccccrgcagctcgtcttccacatcggccatggcgacctgggcagccctgccgtgctggtcagcaggaacctgttcaggccctccctgccctccagctggaaggaaatggagggaccacctgggctccgccttttcrgcagccctctgtccgattactacrcctacagccctgtgcrggagcgggacgcccactccgtcctcttatcccatatcttycatggccggaagaatttcttcatcaccacagagaacttgctggcctcctggracttctggacccctctgctggagagcctggcccataaggccccacgcctctaccctggaggagctgagaatggccgtctgttggactttgagttcagtagcggcyggttgttcttttcccagcagcagccggagcagctggtgccagggccagggccggccccaatgcccagtgacttccaggtcctcagggccaagtaccgagagagccygctggtctccgcctggtccgaggagctgatctctaagctggctaatgacatcgaggccaccgctgtgcgagccgtgcggcgctttggccagttccacctggcactgtcggggggctcgagccccgtggccctgttccagcagctggccacggcgcactatggcttcccctgggcccacacgcacctgtggctggttgacgagcgctgcgtcccactctcagacccggagtccaacttccagggcctgcaggcccacctgctgcagcacgtccggatcccctactacaacatccaccccatgcctgtgcacctgcagcagcggctctgcgccgaggaggaccagggcgcccagatctaygccagggagatctcagccctggtggccaacagcagcttcgacctggtgctgctgggcatgggtgccgacgggcacacagcctccctcttcccacagtcrcccactggcctggatggcgagcagctggtcgtgctgaccacgagcccctcccagccacaccgccgcatgagccttagcctgcctctcatcaaccgygccaagaaggtggcagtcctggtcatgggcaggatgaagcgtgagatcaccacgctggtgagccgggtgggccatgagcccaagaagtggcccatctcgggtgtcctgccgcactccggccagctggtgtggtacatggactacgacgccttcctgggatgagggcgcctgtgccccttgcccgcttcgctcctgtgctttccttcgcccgtgtcttccctcccttctcggccccgccacctgcccagcgtgccctggctctccagaaccttctatcccacagtcaggccccagagagggcaggacaagccttgtcccgatgcctttgaccggcagctctgtgtattggtggatagatgcagaaacaaggaagaaatggagtctgctcctgagaagcttcaaattcaggccaggagagaagtcttaagaaaagacctccagcagttacacattcatatcaaccagcacaacacgggatggcgcccaaactccggcgttyacaagaggagacgtgacgtggtgggctgaggttaatcagggaaggtttcctgggggaggtgatccttgaactggctcccggggaacattcagagcatgattggtagacagaagggtgcagaggcgcccaggggagtacattgccccgtgcaaagcaggggcattggggactgtcttgagaccctgagggggtcaagcccctccttccccagctgcccctccttctagaacctctgcacatctagcctctggccctcctcttcactgcctccacctgctcccgcttgccatccctgtctcctccatcctggctgtgcagtaggaattccaggctcctccctgtgtctttgctgttcttcagactccatttatagagaatgagggctgataaca

SEQ ID NO: 4242 - DNA, 4630 bp, Homo sapiens
tgaggcctgaggcctggggcggggtggcggccgggctggcsttggcctcgcgccttcccctgcggccgccgcgggctccgcgggcggtatcggagtgtcgtgcggcgcgtggccgcgtgacacgcgcacttgtcggagtgacgggccctgcggaagaggaggtgcggcccagggcgcaggggagccctcgggagcgggcccggccctcagcgccgccccggccgtgtcccggaggagcggcctgcgccgccgcgcgagaggaagcacccaggcatgtggaatatgctcatagtggcgatgtgcttggcccttctgggctgcctgcaagcccaggagctccagggacatgtctccataatcctgctgggagcaactggggacctggctaagaagtacttatggcagggactgttccagctgtacctggatgaagcggggaggggtcacagttttagcttccatggagctgctctgacagcccccaagcagggtcaagagctcatggccaaggccctggaatccctctcctgccccaaggacatggcacccagtcactgtgcagagcacaaggatcagttcctgcagctgagccagtaccgccaactgaagacggccgaggactatcaggccctgaacaaggacatcgaggcacagctccagcacgcaggcctccgggaggctggcaggatcttctacttctcagtgccacccttcgcctatgaagmcattgcccgcaacatcaacagtagctgccggccaggcccgggcgcctggctgygggttgtccttgagaaaccctttggccatgaccacttctcagcccagcagctggccacagaactcgggacctttttccaggaggaggagatgtaccgggtggaccattacttaggcaagcaggctgtggcrcagatcctgcctttccragaccagaaccgcaaggctttggayggcctctggaaccrgcaccatgtggagcgggtggagatcatcatgaaagagaccgtggatgcygaaggccgcaccagcttctatgaggagtacggtgtcattcgcgacgtcctccagaaccatctgacggaggtcctcaccctcgtggccatggagctgccccacaatgtcagcagtgcggaggctgtgctgcggcacaagcttcaggtcttccaggcgctgcggggcctgcagaggggcagtgccgtygtgggccagtaccagtcttacagtgagcaggtgcgcagagagctgcagaagccagacagcttccacagcctgacgccgaccttcgcagccgtcctagtgcacattgacaaccttcgctgggagggygtgcctttcatcctgatgtctggcaaagccttggacgagagagtgggctacgctcggatcttgttcaagaaccaggcctgctgtgtgcagagcgaaaagcactgggccgcggcgcagagccagtgcctgccccrgcagctcgtcttccacatcggccatggcgacctgggcagccctgccgtgctggtcagcaggaacctgttcaggccctccctgccctccagctggaaggaaatggagggaccacctgggctccgccttttcrgcagccctctgtccgattactacrcctacagccctgtgcrggagcgggacgcccactccgtcctcttatcccatatcttycatggccggaagaatttcttcatcaccacagagaacttgctggcctcctggracttctggacccctctgctggagagcctggcccataaggccccacgcctctaccctggaggagctgagaatggccgtctgttggactttgagttcagtagcggcyggttgttcttttcccagcagcagccggagcagctggtgccagggccagggccggccccaatgcccagtgacttccaggtcctcagggccaagtaccgagagagccygctggtctccgcctggtccgaggagctgatctctaagctggctaatgacatcgaggccaccgctgtgcgagccgtgcggcgctttggccagttccacctggcactgtcggggggctcgagccccgtggccctgttccagcagctggccacggcgcactatggcttcccctgggcccacacgcacctgtggctggttgacgagcgctgcgtcccactctcagacccggagtccaacttccagggcctgcaggcccacctgctgcagcacgtccggatcccctactacaacatccaccccatgcctgtgcacctgcagcagcggctctgcgccgaggaggaccagggcgcccagatctaygccagggagatctcagccctggtggccaacagcagcttcgacctggtgctgctgggcatgggtgccgacgggcacacagcctccctcttcccacagtcrcccactggcctggatggcgagcagctggtcgtgctgaccacgagcccctcccagccacaccgccgcatgagccttagcctgcctctcatcaaccgygccaagaaggtggcagtcctggtcatgggcaggatgaagcgtgagatcaccacgctggtgagccgggtgggccatgagcccaagaagtggcccatctcgggtgtcctgccgcactccggccagctggtgtggtacatggactacgacgccttcctgggatgagggcgcctgtgccccttgcccgcttcgctcctgtgctttccttcgcccgtgtcttccctcccttctcggccccgccacctgcccagcgtgccctggctctccagaaccttctatcccacagtcaggccccagagagggcaggacaagccttgtcccgatgcctttgaccggcagctctgtgtattggtggatagatgcagaaacaaggaagaaatggagtctgctcctgagaagcttcaaattcaggccaggagagaagtcttaagaaaagacctccagcagttacacattcatatcaaccagcacaacacgggatggcgcccaaactccggcgttyacaagaggagacgtgacgtggtgggctgaggttaatcagggaaggtttcctgggggaggtgatccttgaactggctcccggggaacattcagagcatgattggtagacagaagggtgcagaggcgcccaggggagtacattgccccgtgcaaagcaggggcattggggactgtcttgagaccctgagggggtcaagcccctccttccccagctgcccctccttctagaacctctgcacatctagcctctggccctcctcttcactgcctccacctgctcccgcttgccatccctgtctcctccatcctggctgtgcagtaggaattccaggctcctccctgtgtctttgctgttcttcagactccatttatagagaatgagggctgataacaggaatacagtggcaaagaytagactgtggaaagggttccagaaatcttttttcttttttaattaaaaaaaatatttgcagagatgagctcttgstatgttgcccaggctggtctcaaactcctgggctcaagcgatcctcccatctcagcctcccagagtgctgggattacaggtgtgagctactgcgcccagccccagaaatctcagtgctgtttggagctccatttctcatttgatgacttgctctgcgtggggaggtggggtctcattcccccaacttcctcagggaggacccctgccctccgctgctcctctgtcctgctagccttcctccaggaagcacactgggtgcagataatcaggacattccagagatccccaatttaagagggtcatttccatctcaggggactcccggatgggtgtttccgctctcaatagcccctcttgttttaccaggaaagatccagttaaatcacccactgaggtgacagctcattagcggggagagagatggagcatcgagtgacactgggccatccaggcggctctgctcccaccagacaggagctaggcctcactggcaggggggctgcccacagccttttcaggggctcgcttggcgggtgacggggccgcagccaggccttctctccctgccccttggtgaccccgtggcttcctgtctgctggcctctcctgctacttatcacttcaccacgaactctctgcctgagactggggaagtaagcgggtatcttctcagtgagcataggttggggactgtgatcttgagaagccatgggccagcaatacctgcttttctgaagcccccaaggagggctctgacattctttttaaaaacaccacaaagcaaaattcccaggacatgtgtagttttgtttgttcagtatcccacaacttaaggctgggagatggaactcttggttaaggtcgatttttctgtctggcttctccgcaccttccacttgctctctggatcaggcagatataaactttctagcgcattttgagagagggctttcttgggtgagggagcatggcaaagtcggtttctctctggactgtttacacttcaaggcggtggatttagaggaatcctggctttcattttcaatgccatctgaggtgggaggaycrcctgagcccaggagactgaggctgcagtrrggtgtgattgcactattgctctctagcctggaaaacagagtgagaccctatctcaaaaaa

SEQ ID NO: 4243 - DNA, 1532 bp, Homo sapiens
tggcgtcacttcccttcccgcgatggcggcacagggagctgctgcggcggttgcggcggggacttcaggggtcgcgggggagggcgagcccgggcccggggagaatgcggccgctgaggggaccgccccatccccgggccgcgtctctccgccgaccccggcgcgcggcgagccggaagtcacggtggagatcggagaaacgtacctgtgccggcgaccggatagcacctggcattctgctgaagtgatccagtctcgagtgaacgaccaggagggccgagaggaattctatgtacactacgtgggctttaaccggcggctggacgagtgggtagacaagaaccggctggcgctgaccaagacagtgaaggatgctgtacagaagaactcagagaagtacctgagcgagctcgcagagcagcctgagcgcaagatcactcgcaaccaaaagcgcaagcatgatgagatcaaccatgtgcagaagacttatgcagagatggaccccaccacagcagccttggagaaggagcatgaggcgatcaccaaggtgaagtatgtggacaagatccacatcgggaactacgaaattgatgcctggtatttctcaccattccccgaagactatgggaaacagcccaagctctggctctgcgagtactgcctcaagtacatgaaatatgagaagagctaccgcttccacttgggtcagtgccagtggcggcagccccccgggaaagagatctaccgcaagagcaacatctccgtgtacgaagttgatggcaaagaccataagatttactgtcagaacctgtgtctgctggccaagcttttcctggaccataagacactgtactttgacgtggagccgttcgtcttttacatcctgactgaggtggaccggcagggggcccacattgttggctacttctccaaggagaaggagtccccggatggaaacaatgtggcctgcatcctgaccttgcccccctaccaacgccgcggctacgggaagttcctcatcgctttcagttatgagctctccaagctggagagcacagtcggctccccggagaagccrctgtctgacctgggcaagctcagctaccgcagctactggtcctgggtgctgctrgagatcctgcggracttccggggcacactgtccatcaaggacckcagccagatgaccagtatcacccaaaatgacatcatcagtaccctgcaatccctcaatatggtcaagtactggaagggccagcacgtgatctgtgtcacacccaagctggtggaggagcacctcaaaagtgcccagtataagaaaccacccatcacagtggactccgtytgcctcaagtgggcaccccccaagcacaagcaagtcaagctctccaagaagtgagcagcctggcccctgctgtcggacctgagcctcctggctcccagcctgtaaatatgtatagacctgttttgtcatttttttaataaagtcagttctggtggccctggactttggaggggaaggggaggccaag

SEQ ID NO: 4244 - DNA, 4743 bp, Homo sapiens
gcagccaatcccagagaagcagacgggatggctagttcagcccgggagcacctgctttttgtgaggcgtcgaaatccccagatgcggtacacattgagcccagagaacctccagagccttgccgcccagagctccatgccagagaacatgaccctgcagcgggccaacagcgacaccgacctggtgacttctgaragccgctccagcttawctgccagcatgtacgagtacacgctggggcaagcccagaacctcattatcttctgggacattaaagaggaggtggaccccagtgattggattggactttatcatatagatgagaattctccagccaacttctgggattctaagaacaggggtgtgactggaayacaaaaagggcaaattgtatggagaattgagcctggrccctatttcatggaaccggagataaaaatctgttttaaatattaccacggcattagtggagccctgcgagccacgaccccctgcatcaccgtgaagaacccagctgtgatgatgggggcagaaggcatggagggaggtgcttcaggaaacctgcattctcgaaaacttgttagctttacattgtcagatcttagggcagttgggctaaagaaagggatgttcttcaatcctgacccttatcttaagatgtcaattcagccaggaaagaagagcagtttccccacctgtgcccaccacgggcaggagagacggtctactatcatcagtaayaccaccaatccaatttggcaccgagagaaatattccttttttgcacttcttactgatgtcttagaaattgaaattaaagacaaatttgccaagagccgtcccatcatcaagcgttttctggggaaactaaccattccagtccagaggctgctggagcgacaagccatcggtgatcaaatgctcagctacaaccttggcagaaggctcccagctgaccaygtgagtgggtacctccagtttaaagtggaggttacgtcttctgttcatgaagatgcctctccagaagctgttggcacaatacttggagtcaattctgtgaatggagacttaggtagcccttccgatgacgaggacatgccagggagccatcacgacagccaggtgtgctctaatgggccagtttctgaggacagtgctgccgatggaacccccaagcattcattcaggactagctccactctggaaatagacacagaggaattaacctctacgtcttcaaggacctcacctcccagaggacgtcaggattcactcaatgattacttagatgctatcgaacacaatggccactccaggccrgggacagcgacctgctctgagaggtccatgggtgcctctccgaaactgaggagtagttttcccactgacacaagactcaatgccatgcttcatattgattcagatgaagaagatcacgagttccagcaagacctgggttacccatcttccttggaggaggagggaggcctgatcatgtttagcagggcatccagagctgatgatggaagcctgacatctcagacaaagctggaggacaaccctgttgagaatgaggaagcctccacacacgaagctgcttcctttgaggataagccagaaaatcttccagagcttgcagagagctccttacctgcaggcccagccccagaggaaggtgaaggcggcccagagcctcaacccagtgctgaccagggcagtgctgaactgtgtggctctcaagaggtagatcagcccacaagtggcgcagacacagggacttccgaygcatcaggaggaagccgaagagccgtcagtgagaccgagtctctcgatcagggctctgagccttcccaggtgtcctctgaaacagaacccagtgatcctgccaggacagagagtgtgagcgaagccagcaccaggcctgagggagagagtgacctggaatgcgctgacagctcctgcaatgagagtgtgaccacgcagctgtcctctgtggacacacggtgctcctctcttgagagcgcacggtttcctgaaaccccagccttttcttctcaggaggaggaagacggagcctgtgcagcagagcccaccagcagtggccctgccgaagggtcgcaggaatccgtgtgcactgctggttctttacctgtggtacaggtgcccagtggggaggatgaagggccaggggcagaatcggccactgtacctgaccaggaggagctgggggaggtctggcagcggagggggagcctggagggagctgcagctgctgccgagagcccaccgcaagaagaaggcagtgctggggaggcccaaggcacctgtgaaggggcaactgcccaggaggagggcgctactggaggttctcaagccaacggccaccagccactgcgatcactaccttcagtgcgccaggatgttagccggtaccagagggtggacgaggctctcccaccaaactgggaggcacgcattgacagccacggcaggatcttctacgtggatcacgtaaacagaaccacgacgtggcagcgaccgacagctcccccagccccgcaggtgctgcagagatctaactccatacagcaaatggagcagctgaaccggcgatatcagagtatccgcagaaccatgaccaatgagaggcctgaggaaaataccaatgctattgatggggcaggggaggaagctgactttcaccaagccagtgcagatttccgacgggagarcatcctgcctcactctacctccagatccaggatcacgttgctgttacagtctccccccgtgaagttcctcatcagcccagagttcttcaccgtgctgcattctaaccctagtgcctaccgcatgtttacaaacaacacrtgtttgaagcacatgatcaccaaagtccggagggacacccaccactttgaacgctaccagcataaccgcgaccttgtgggattcctcaacatgttcgcgaacaaacagctagagctgccgcggggatgggaaatgaaacatgatcaccagggcaaggcattctttgtggaccacaactcccgcaccaccactttcattgatccccggctcccacttcagagcagtagacccacaagtgcgctggttcatcggcaacacctgacaaggcaacgcagccacagtgcgggtgaggtaggagaagattctcgacatgcaggaccaccagttcttcccaggccatccagtacattcaatacagtcagtaggccacagtaccaggacatggttccagtggcttacaatgacaagattgttgcatttctacgtcaacccaatatctttgaaattctacaggagcgtcaacctgatcttaccaggaatcactcactcagggagaagatccaatttatccgaactgaagggactccaggattggtgcgcctttcaagcgatgcagaccttgttatgttgctgagcttatttgaagaagagataatgtcrtatgtgcctccacatgccttactccaccccagctactgtcagtccccacgtggctctcccgtgtcatctcctcagaactcgccaggtacccagcgtgccaatgcccgggctccagccccttacaagcgggatttcgaagccaaactgaggaacttttacaggaagttagagactaaaggatatggacaaggcccagggaagttaaagttaattatccgaagagatcacttactagaagatgcttttaatcagattatgggctactccagaaaagacctgcagagaaataagctatatgtcaccttcgttggggaggaagggctggattacagtgggccttctagagagtttttcttcctggtatccagagaactctttaacccatattatggcttatttgaatattcagccaatgacacatacacagtacaaataagtcctatgtctgcttttgtagacaatcaccatgaatggttccgattcagtggtaggatccttggtcttgcactaatacaccagtatttgttggatgccttcttcacacggcccttttataaggctcttctcagaattctrtgtgacctgagtgacctagaataccttgatgaagagttccatcagagcctgcagtggatgaaagacaatgatatccatgacatcctagacctcacgttcactgtgaacgaagaagtatttgggcagataactgaacgagaattaaagccagggggtgccaatatcccagttacagagaagaacaagaaggagtacatcgagaggatggtgaagtggaggattgagaggggtgttgtacagcaaacagagagcttagtgcgtggcttctatgaggtggtggatgccaggctggtatctgtttttgatgcaagagaactggaattggtcatcgcaggcacagctgaaatagacctaagtgattggagaaacaacacagaatatagaggaggataccatgacaatcatattgtaattcggtggttctgggctgcagtggaaagattcaacaatgaacaacgactaaggttgttacagtttgttacaggcacatccagcattccctatgaaggatttgcttcactccgagggagtaacggcccaagaagattctgtgtggagaaatgggggaaaatcactgctcttcccagagcgcatacatgttttaaccgtctggatctgcctccctacccatccttttccatgctttatgaaaaactgttgacagcagttgaagaaaccagtacttttggacttgag

SEQ ID NO: 4245 - DNA, 5139 bp, Homo sapiens
cacagagcgacgctggtctcccagattgttgcagaaggagacggcgtcgacgtctgactggactcgcggcgacttacctttcagtcgtgcgctcctgatccggcgctcggaatttgtccccggcttcagggctgcggggcctggaaggaggcgtatcgaggcggctcgaaaacgatccaggggagccgaggcgctcctcttgtcatcccactcagcgccatgtcctggatgttcaagagggatccagtttggaagtacttgcagactgtccagtatggagttcatggaaattttccacgcctctcatatccaactttctttccacgttttgaattccaagatgttatccctccagatgactttctaactagtgatgaagaagtagattccgttttatttggaagtttgagaggtcatgtggttggactacgctattacacgggagtagttaataataatgaaatggttgcattacaacgagatcctaataacccttatgataagaatgcaattaaagtaaacaatgtgaatggaaatcaagttggccatttaaagaaagagcttgcaggtgctttggcctatatcatggacaacaaattggcacaaattgaaggggtagttccttttggtgcaaacaatgcttttaccatgcctctgcatatgactttttggggaaaaraagaaaatagaaaagcggtttcagatcagttgaagaaacatggatttaaattgggtcctgcaccaaaaactttaggattcaatttggaaagtggttggggctctggaagagctggaccaagctatagtatgccagtgcatgctgcagtacagatgacaactgaacagcttaaaacagaatttgacaaattgtttgaagatttaaaagaagatgataaaacccatgaaatggaaccagctgaggctattgaaacaccactgcttccacatcaaaaacaagctctagcttggatggtgtcacgggaaaatagcaaagaacttccaccattctgggaacagcgaaatgacttatactataacacaataacaaatttttctgagaaggaccgaccagaaaatgtccatggaggaattttagctgatgatatgggtttgggtaaaactcttacrgccattgcagtaatccttaccarcttccatgatggcagacctcttcctattgaaagagttaaaaagaatctactgaagaaggaatataatgttaacgatgactctatgaaacttggaggaaacaataccagtgaaaaggcagatggactaagcaaagacgcatctagatgtagtgaacaacccagtatttcagatatcaaggagaagagtaagtttcgcatgtcagaattgtctagctcccgccccaaaagaagaaaaactgctgtccagtacatagaaagcagtgattcagaggaaattgaaacaagtgaattgccgcagaaaatgaaaggcaaactgaaaaatgtacagtctgaaactaaaggcagggcgaaaggatcttctaaggttatagaagatgtggcatttgcatgtgcattaacttcatctgttcctacaacaaaaaagaaaatgttgaaaaagggagcttgtgcagtggaggggtcaaagaaaactgatgttgaggagagaccaagaacaacactgatcatctgtccgctttctgtgttaagcaactggattgaccagtttggacaacatataaaatcagatgtacacttgaatttttatgtttattatggtcctgatcgtattagagaaccggccttactttcaaaacaggatattgttttgactacgtataatattttaactcatgactatggagtaagagatagtccattacatagcataaggtggctaagagtgatcctggatgaaggacatgccatacgaaatccaaatgctcagcagacaaaagctgtacttgacttagaatcagaaagragatgggttttgacaggtactccaatccagaattctttaaaggacttgtggtctcttctttcctttttaaaacttaaaccatttattgatagagaatggtggcatagaacaatacagcgtcctgtcacaatgggagatgaaggaggacttaggcgtttacagtccctaattaaaaatattacacttagaagaacaaagacaagcaaaattaaaggaaaacctgttttggagttaccagaacgtaaagtatttattcagcacattacactttcagatgaagagagaaagatttatcagtctgtgaaaaatgaaggcagagccactattggaagagaagaaaagaaaaatgccattttactctgctgttttagaataggaagttattattgtttagcggacttaataatatttgacattttaatctctaggtattttaatgaagggactgtcctggcacattatgcagatgtcctgggtcttttgcttagactgcggcaaatttgttgccatacttaccttcttacaaatgcagtgtcttccaatggcccctcagccttttctctaggaaatgatacacctgaagaactgagaaagaagttaataaggaagatgaagttaattctgagctcaggttcagatgaggaataagaattagcacrtgacagtgagaaaaagtctgatatggaatggacatccagttcaaagattaatgcgctaatgcacgcattgactgacttaagaaagaagaatcccaacataaaaagtttggttgtttctcagtttacaacattcctgtctttaatagaaataccacttaaagcctctggatttgtgtttactcgtttggatggttccatggcccaaaagaaaagagttgaatcaattcagtgttttcaaaacactgaagcaggatctccaactataatgcttctgtccttaaaagcaggtggagttggtttgaatctgtctgcagcttctcgagtgtttttaatggatccagcctggaatcctgctgctgaagatcagtgctttgacagatgccatagacttggtcagaagcaagaagttatcatcacaaaattcattgtaaaggactctgttgaagaaaatatgctgaaaatacaaaacaaaaagagagaacttgcagcaggagcctttggaactaaaaaaccaaatgctgacgaaatgaaacaagccaaaattaatgaaatcagaacattaattgacttataatttgtgggattttagtaaggtcagtttgattggatacttaagttttagaaatgagaaaaatacagagttttagaaatgagatctagagaacacgtcttctaaaaggggcatattttatattagtgaagaggtattactgacacaatttcttctatatatgaacctatttttaatgaaacttcaaatagcaataagttccgttatatactgtggcctgaaataatttgagaaaaaaggttactttgttattcagcttttcataatatctatgctgagtattttcacgtatcttccaagtactcagctttttcgtatttcaaataaggtcagaccttttatacttttgaccaaatagttattttctatgttggacacttagttatttrccaaagcctccgatttgtgatgcagtgtttgtagtccttgtaaacaatatatacagactakacaagaattaattttattgggctttcaaaaaccatatttgcattccagaaccaaatcttaaatgagaccaaagtccaggttagcacaggtttttatttttcctacagctacattgagatatagttcacataaatgacttggagttttatgttcatgaaaaaattagggattatgttaagagtactattttttccattttagttaagyagtactacactcattgtttaaatgtaacttgctgtgtctgaggtataaatatagtctgtgggagtgagaggcaaaccagtcctacccaatttgatttgaatattttaaattatggaactgctaaatagatatttctataaatagataatttttatttatgtagctttttttggaagtaactttataaatttttataattcagaagactactatatgtgagaggcgtgatatctggatggaagttgggctggatgatctccaaagtcgtttcaactcttaaagacatcttaatcctgaatgtaaacaattgttawgtgtttagaatcagaatttgattttgaacttgagtaattcatccttacagctatctgtagaattagtcatcttttttcttttcttttttttttacttttttgttaataagcaaacttatttgctgcagaatttgggttgactcctgagcatatttaaaacaaagaagctagaaatttagcagtcagattaggtaggtggttttatttcaaagggaaactttaatccaaagaaagattaattactctaacaaacaagagaagcttcatgtttgatgatacagatttaagaatacctgagacttaagagtgttggaagtcatttgatagaaagatgagatcggagacaatgttgtgttayagggcacacattgaaggtatatgccaaatctctcaccagataagtccttttctccctgtgccgttttcttgctcaaagggaacagtgaattagccagctagaatcttcctggtccctttttgaggcagtagcaggtaaggaaagggctgattttcatcaaaaccaagacctttctgcagggatgatagtggaataataatgtgggattagcccgctagcattaggagcagttgggaagttacctggtagatcaagcattacacacaaaaaatcaagttgatcagagtatgggttctccatrtagcaatacttcagtgagattaagtataaacataagtttggcaagttgtttaaaaaatgtctctttgttttgtacagttctgttagatgttgttatattttaaaagtttaatttaaaaaatttaatttgtccttcctaagaaggataaatatataaaaaagccactggaatgaaaacttcctatatgctatgctgttgtcttattattatatagaaaaataactttagaaaaatattgaagacattgtattaccacttgtgattcaaacaattttgtggttaaaactggattttaaatttaaaaatcaataaaaatttcaaatgtt

SEQ ID NO: 4246 - DNA, 4326 bp, Homo sapiens
cacagagcgacgctggtctcccagattgttgcagaaggagacggcgtcgacgtctgactggactcgcggcgacttacctttcagtcgtgcgctcctgatccggcgctcggaatttgtccccggcttcagggctgcggggcctggaaggaggcgtatcgaggcggctcgaaaacgatccaggggagccgaggcgctcctcttgtcatcccactcagcgccatgtcctggatgttcaagagggatccagtttggaagtacttgcagactgtccagtatggagttcatggaaattttccacgcctctcatatccaactttctttccacgttttgaattccaagatgttatccctccagatgactttctaactagtgatgaagaagtagattccgttttatttggaagtttgagaggtcatgtggttggactacgctattacacgggagtagttaataataatgaaatggttgcattacaacgagatcctaataacccttatgataagaatgcaattaaagtaaacaatgtgaatggaaatcaagttggccatttaaagaaagagcttgcaggtgctttggcctatatcatggacaacaaattggcacaaattgaaggggtagttccttttggtgcaaacaatgcttttaccatgcctctgcatatgactttttggggaaaaraagaaaatagaaaagcggtttcagatcagttgaagaaacatggatttaaattgggtcctgcaccaaaaactttaggattcaatttggaaagtggttggggctctggaagagctggaccaagctatagtatgccagtgcatgctgcagtacagatgacaactgaacagcttaaaacagaatttgacaaattgtttgaagatttaaaagaagatgataaaacccatgaaatggaaccagctgaggctattgaaacaccactgcttccacatcaaaaacaagctctagcttggatggtgtcacgggaaaatagcaaagaacttccaccattctgggaacagcgaaatgacttatactataacacaataacaaatttttctgagaaggaccgaccagaaaatgtccatggaggaattttagctgatgatatgggtttgggtaaaactcttacrgccattgcagtaatccttaccarcttccatgatggcagacctcttcctattgaaagagttaaaaagaatctactgaagaaggaatataatgttaacgatgactctatgaaacttggaggaaacaataccagtgaaaaggcagatggactaagcaaagacgcatctagatgtagtgaacaacccagtatttcagatatcaaggagaagagtaagtttcgcatgtcagaattgtctagctcccgccccaaaagaagaaaaactgctgtccagtacatagaaagcagtgattcagaggaaattgaaacaagtgaattgccgcagaaaatgaaaggcaaactgaaaaatgtacagtctgaaactaaaggcagggcgaaagcaggatcttctaaggttatagaagatgtggcatttgcatgtgcattaacttcatctgttcctacaacaaaaaagaaaatgttgaaaaagggagcttgtgcagtggaggggtcaaagaaaactgatgttgaggagagaccaagaacaacactgatcatctgtccgctttctgtgttaagcaactggattgaccagtttggacaacatataaaatcagatgtacacttgaatttttatgtttattatggtcctgatcgtattagagaaccggccttactttcaaaacaggatattgttttgactacgtataatattttaactcatgactatggaactaaaggagatagtccattacatagcataaggtggctaagagtgatcctggatgaaggacatgccatacgaaatccaaatgctcagcagacaaaagctgtacttgacttagaatcagaaagragatgggttttgacaggtactccaatccagaattctttaaaggacttgtggtctcttctttcctttttaaaacttaaaccatttattgatagagaatggtggcatagaacaatacagcgtcctgtcacaatgggagatgaaggaggacttaggcgtttacagtccctaattaaaaatattacacttagaagaacaaagacaagcaaaattaaaggaaaacctgttttggagttaccagaacgtaaagtatttattcagcacattacactttcagatgaagagagaaagatttatcagtctgtgaaaaatgaaggcagagccactattggaaggtattttaatgaagggactgtcctggcacattatgcagatgtcctgggtcttttgcttagactgcggcaaatttgttgccatacttaccttcttacaaatgcagtgtcttccaatggcccctcaggaaatgatacacctgaagaactgagaaagaagttaataaggaagatgaagttaattctgagctcaggttcagatgaggaatgtgcartttgcctggattctttaacagttcctgtgataacacattgtgcrcatgtattttgtaaaccctgtatttgccaagtcattcagaatgagcagccacatgctaaatgccctttatgcagaaatgatatacatgaagataatttattagaatgtcctccagaagaattagcacrtgacagtgagaaaaagtctgatatggaatggacatccagttcaaagattaatgcgctaatgcacgcattgactgacttaagaaagaagaatcccaacataaaaagtttggttgtttctcagtttacaacattcctgtctttaatagaaataccacttaaagcctctggatttgtgtttactcgtttggatggttccatggcccaaaagaaaagagttgaatcaattcagtgttttcaaaacactgaagcaggatctccaactataatgcttctgtccttaaaagcaggtggagttggtttgaatctgtctgcagcttctcgagtgtttttaatggatccagcctggaatcctgctgctgaagatcagtgctttgacagatgccatagacttggtcagaagcaagaagttatcatcacaaaattcattgtaaaggactctgttgaagaaaatatgctgaaaatacaaaacaaaaagagagaacttgcagcaggagcctttggaactaaaaaaccaaatgctgacgaaatgaaacaagccaaaattaatgaaatcagaacattaattgacttataatttgtgggattttagtaagaagactactatatgtgagaggcgtgatatctggatggaagttgggctggatgatctccaaagtcgtttcaactcttaaagacatcttaatcctgaatgtaaacaattgttawgtgtttagaatcagaatttgattttgaacttgagtaattcatccttacagctatctgtagaattagtcatcttttttcttttcttttttttttacttttttgttaataagcaaacttatttgctgcagaatttgggttgactcctgagcatatttaaaacaaagaagctagaaatttagcagtcagattaggtaggtggttttatttcaaagggaaactttaatccaaagaaagattaattactctaacaaacaagagaagcttcatgtttgatgatacagatttaagaatacctgagacttaagagtgttggaagtcatttgatagaaagatgagatcggagacaatgttgtgttayagggcacacattgaaggtatatgccaaatctctcaccagataagtccttttctccctgtgccgttttcttgctcaaagggaacagtgaattagccagctagaatcttcctggtccctttttgaggcagtagcaggtaaggaaagggctgattttcatcaaaaccaagacctttctgcagggatgatagtggaataataatgtgggattagcccgctagcattaggagcagttgggaagttacctggtagatcaagcattacacacaaaaaatcaagttgatcagagtatgggttctccatrtagcaatacttcagtgagattaagtataaacagtttttggcaaaaaacaacacagtctactctttctgcttacaaagacaaagccttacaaactcactatgaaggtaaagggaggacagcttgcttctttgcccagacatttacaaagttgtttttaaaacacactcataagtaagtttggcaagttgtttaaaaaatgtctctttgttttgtacagttctgttagatgttgttatattttaaaagtttaatttaaaaaatttaatttgtccttcctaagaaggata

SEQ ID NO: 4247 - DNA, 5128 bp, Homo sapiens
ctgactggactcgcggcgacttacctttcagtcgtgcgctcctgatccggcgctcggaatttgtccccggcttcagggctgcggggcctggaaggaggcgatccaggggagccgaggcgctcctcttgtcatcccactcagcgccatgtcctggatgttcaagagggatccagtttggaagtacttgcagactgtccagtatggagttcatggaaattttccacgcctctcatatccaactttctttccacgttttgaattccaagatgttatccctccagatgactttctaactagtgatgaagaagtagattccgttttatttggaagtttgagaggtcatgtggttggactacgctattacacgggagtagttaataataatgaaatggttgcattacaacgagatcctaataacccttatgataagaatgcaattaaagtaaacaatgtgaatggaaatcaagttggccatttaaagaaagagcttgcaggtgctttggcctatatcatggacaacaaattggcacaaattgaaggggtagttccttttggtgcaaacaatgcttttaccatgcctctgcatatgactttttggggaaaaraagaaaatagaaaagcggtttcagatcagttgaagaaacatggatttaaattgggtcctgcaccaaaaactttaggattcaatttggaaagtggttggggctctggaagagctggaccaagctatagtatgccagtgcatgctgcagtacagatgacaactgaacagcttaaaacagaatttgacaaattgtttgaagatttaaaagaagatgataaaacccatgaaatggaaccagctgaggctattgaaacaccactgcttccacatcaaaaacaagctctagcttggatggtgtcacgggaaaatagcaaagaacttccaccattctgggaacagcgaaatgacttatactataacacaataacaaatttttctgagaaggaccgaccagaaaatgtccatggaggaattttagctgatgatatgggtttgggtaaaactcttacrgccattgcagtaatccttaccarcttccatgatggcagacctcttcctattgaaagagttaaaaagaatctactgaagaaggaatataatgttaacgatgactctatgaaacttggaggaaacaataccagtgaaaaggcagatggactaagcaaagacgcatctagatgtagtgaacaacccagtatttcagatatcaaggagaagagtaagtttcgcatgtcagaattgtctagctcccgccccaaaagaagaaaaactgctgtccagtacatagaaagcagtgattcagaggaaattgaaacaagtgaattgccgcagaaaatgaaaggcaaactgaaaaatgtacagtctgaaactaaaggcagggcgaaagcaggatcttctaaggttatagaagatgtggcatttgcatgtgcattaacttcatctgttcctacaacaaaaaagaaaatgttgaaaaagggagcttgtgcagtggaggggtcaaagaaaactgatgttgaggagagaccaagaacaacactgatcatctgtccgctttctgtgttaagcaactggattgaccagtttggacaacatataaaatcagatgtacacttgaatttttatgtttattatggtcctgatcgtattagagaaccggccttactttcaaaacaggatattgttttgactacgtataatattttaactcatgactatggaactaaaggagatagtccattacatagcataaggtggctaagagtgatcctggatgaaggacatgccatacgaaatccaaatgctcagcagacaaaagctgtacttgacttagaatcagaaagragatgggttttgacaggtactccaatccagaattctttaaaggacttgtggtctcttctttcctttttaaaacttaaaccatttattgatagagaatggtggcatagaacaatacagcgtcctgtcacaatgggagatgaaggaggacttaggcgtttacagtccctaattaaaaatattacacttagaagaacaaagacaagcaaaattaaaggaaaacctgttttggagttaccagaacgtaaagtatttattcagcacattacactttcagatgaagagagaaagatttatcagtctgtgaaaaatgaaggcagagccactattggaaggtattttaatgaagggactgtcctggcacattatgcagatgtcctgggtcttttgcttagactgcggcaaatttgttgccatacttaccttcttacaaatgcagtgtcttccaatggcccctcaggaaatgatacacctgaagaactgagaaagaagttaataaggaagatgaagttaattctgagctcaggttcagatgaggaatgtgcartttgcctggattctttaacagttcctgtgataacacattgtgcrcatgtattttgtaaaccctgtatttgccaagtcattcagaatgagcagccacatgctaaatgccctttatgcagaaatgatatacatgaagataatttattagaatgtcctccagaagaattagcacrtgacagtgagaaaaagtctgatatggaatggacatccagttcaaagattaatgcgctaatgcacgcattgactgacttaagaaagaagaatcccaacataaaaagtttggttgtttctcagtttacaacattcctgtctttaatagaaataccacttaaagcctctggatttgtgtttactcgtttggatggttccatggcccaaaagaaaagagttgaatcaattcagtgttttcaaaacactgaagcaggatctccaactataatgcttctgtccttaaaagcaggtggagttggtttgaatctgtctgcagcttctcgagtgtttttaatggatccagcctggaatcctgctgctgaagatcagtgctttgacagatgccatagacttggtcagaagcaagaagttatcatcacaaaattcattgtaaaggactctgttgaagaaaatatgctgaaaatacaaaacaaaaagagagaacttgcagcaggagcctttggaactaaaaaaccaaatgctgacgaaatgaaacaagccaaaattaatgaaatcagaacattaattgacttataatttgtgggattttagtaaggtcagtttgattggatacttaagttttagaaatgagaaaaatacagagttttagaaatgagatctagagaacacgtcttctaaaaggggcatattttatattagtgaagaggtattactgacacaatttcttctatatatgaacctatttttaatgaaacttcaaatagcaataagttccgttatatactgtggcctgaaataatttgagaaaaaaggttactttgttattcagcttttcataatatctatgctgagtattttcacgtatcttccaagtactcagctttttcgtatttcaaataaggtcagaccttttatacttttgaccaaatagttattttctatgttggacacttagttatttrccaaagcctccgatttgtgatgcagtgtttgtagtccttgtaaacaatatatacagactakacaagaattaattttattgggctttcaaaaaccatatttgcattccagaaccaaatcttaaatgagaccaaagtccaggttagcacaggtttttatttttcctacagctacattgagatatagttcacataaatgacttggagttttatgttcatgaaaaaattagggattatgttaagagtactattttttccattttagttaagyagtactacactcattgtttaaatgtaacttgctgtgtctgaggtataaatatagtctgtgggagtgagaggcaaaccagtcctacccaatttgatttgaatattttaaattatggaactgctaaatagatatttctataaatagataatttttatttatgtagctttttttggaagtaactttataaatttttataattcagaagactactatatgtgagaggcgtgatatctggatggaagttgggctggatgatctccaaagtcgtttcaactcttaaagacatcttaatcctgaatgtaaacaattgttawgtgtttagaatcagaatttgattttgaacttgagtaattcatccttacagctatctgtagaattagtcatcttttttcttttcttttttttttacttttttgttaataagcaaacttatttgctgcagaatttgggttgactcctgagcatatttaaaacaaagaagctagaaatttagcagtcagattaggtaggtggttttatttcaaagggaaactttaatccaaagaaagattaattactctaacaaacaagagaagcttcatgtttgatgatacagatttaagaatacctgagacttaagagtgttggaagtcatttgatagaaagatgagatcggagacaatgttgtgttayagggcacacattgaaggtatatgccaaatctctcaccagataagtccttttctccctgtgccgttttcttgctcaaagggaacagtgaattagccagctagaatcttcctggtccctttttgaggcagtagcaggtaaggaaagggctgattttcatcaaaaccaagacctttctgcagggatgatagtggaataataatgtgggattagcccgctagcattaggagcagttgggaagttacctggtagatcaagcattacacacaaaaaatcaagttgatcagagtatgggttctccatrtagcaatacttcagtgagattaagtataaacataagtttggcaagttgtttaaaaaatgtctctttgttttgtacagttctgttagatgttgttatattttaaaagtttaatttaaaaaatttaatttgtccttcctaagaaggataaatatataaaaaagccactggaatgaaaacttcctatatgctatgctgttgtcttattattatatagaaaaataactttagaaaaatattgaagacattgtattaccacttgtgattcaaacaattttgtggttaaaactggattttaaatttaaaaatcaataaaaatttcaaatgtt

SEQ ID NO: 4248 - DNA, 5623 bp, Homo sapiens
cacagagcgacgctggtctcccagattgttgcagaaggagacggcgtcgacgtctgactggactcgcggcgacttacctttcagtcgtgcgctcctgatccggcgctcggaatttgtccccggcttcagggctgcggggcctggaaggaggcgtatcgaggcggctcgaaaacgatccaggggagccgaggcgctcctcttgtcatcccactcagcgccatgtcctggatgttcaagagggatccagtttggaagtacttgcagactgtccagtatggagttcatggaaattttccacgcctctcatatccaactttctttccacgttttgaattccaagatgttatccctccagatgactttctaactagtgatgaagaagtagattccgttttatttggaagtttgagaggtcatgtggttggactacgctattacacgggagtagttaataataatgaaatggttgcattacaacgagatcctaataacccttatgataagaatgcaattaaagtaaacaatgtgaatggaaatcaagttggccatttaaagaaagagcttgcaggtgctttggcctatatcatggacaacaaattggcacaaattgaaggggtagttccttttggtgcaaacaatgcttttaccatgcctctgcatatgactttttggggaaaaraagaaaatagaaaagcggtttcagatcagttgaagaaacatggatttaaattgggtcctgcaccaaaaactttaggattcaatttggaaagtggttggggctctggaagagctggaccaagctatagtatgccagtgcatgctgcagtacagatgacaactgaacagcttaaaacagaatttgacaaattgtttgaagatttaaaagaagatgataaaacccatgaaatggaaccagctgaggctattgaaacaccactgcttccacatcaaaaacaagctctagcttggatggtgtcacgggaaaatagcaaagaacttccaccattctgggaacagcgaaatgacttatactataacacaataacaaatttttctgagaaggaccgaccagaaaatgtccatggaggaattttagctgatgatatgggtttgggtaaaactcttacrgccattgcagtaatccttaccarcttccatgatggcagacctcttcctattgaaagagttaaaaagaatctactgaagaaggaatataatgttaacgatgactctatgaaacttggaggaaacaataccagtgaaaaggcagatggactaagcaaagacgcatctagatgtagtgaacaacccagtatttcagatatcaaggagaagagtaagtttcgcatgtcagaattgtctagctcccgccccaaaagaagaaaaactgctgtccagtacatagaaagcagtgattcagaggaaattgaaacaagtgaattgccgcagaaaatgaaaggcaaactgaaaaatgtacagtctgaaactaaaggcagggcgaaagcaggatcttctaaggttatagaagatgtggcatttgcatgtgcattaacttcatctgttcctacaacaaaaaagaaaatgttgaaaaagggagcttgtgcagtggaggggtcaaagaaaactgatgttgaggagagaccaagaacaacactgatcatctgtccgctttctgtgttaagcaactggattgaccagtttggacaacatataaaatcagatgtacacttgaatttttatgtttattatggtcctgatcgtattagagaaccggccttactttcaaaacaggatattgttttgactacgtataatattttaactcatgactatggaactaaaggagatagtccattacatagcataaggtggctaagagtgatcctggatgaaggacatgccatacgaaatccaaatgctcagcagacaaaagctgtacttgacttagaatcagaaagragatgggttttgacaggtactccaatccagaattctttaaaggacttgtggtctcttctttcctttttaaaacttaaaccatttattgatagagaatggtggcatagaacaatacagcgtcctgtcacaatgggagatgaaggaggacttaggcgtttacagtccctaattaaaaatattacacttagaagaacaaagacaagcaaaattaaaggaaaacctgttttggagttaccagaacgtaaagtatttattcagcacattacactttcagatgaagagagaaagatttatcagtctgtgaaaaatgaaggcagagccactattggaaggtattttaatgaagggactgtcctggcacattatgcagatgtcctgggtcttttgcttagactgcggcaaatttgttgccatacttaccttcttacaaatgcagtgtcttccaatggcccctcaggaaatgatacacctgaagaactgagaaagaagttaataaggaagatgaagttaattctgagctcaggttcagatgaggaatgtgcartttgcctggattctttaacagttcctgtgataacacattgtgcrcatgtattttgtaaaccctgtatttgccaagtcattcagaatgagcagccacatgctaaatgccctttatgcagaaatgatatacatgaagataatttattagaatgtcctccagaagaattagcacrtgacagtgagaaaaagtctgatatggaatggacatccagttcaaagattaatgcgctaatgcacgcattgactgacttaagaaagaagaatcccaacataaaaagtttggttgtttctcagtttacaacattcctgtctttaatagaaataccacttaaagcctctggatttgtgtttactcgtttggatggttccatggcccaaaagaaaagagttgaatcaattcagtgttttcaaaacactgaagcaggatctccaactataatgcttctgtccttaaaagcaggtggagttggtttgaatctgtctgcagcttctcgagtgtttttaatggatccagcctggaatcctgctgctgaagatcagtgctttgacagatgccatagacttggtcagaagcaagaagttatcatcacaaaattcattgtaaaggactctgttgaagaaaatatgctgaaaatacaaaacaaaaagagagaacttgcagcaggagcctttggaactaaaaaaccaaatgctgacgaaatgaaacaagccaaaattaatgaaatcagaacattaattgacttataatttgtgggattttagtaaggtcagtttgattggatacttaagttttagaaatgagaaaaatacagagttttagaaatgagatctagagaacacgtcttctaaaaggggcatattttatattagtgaagaggtattactgacacaatttcttctatatatgaacctatttttaatgaaacttcaaatagcaataagttccgttatatactgtggcctgaaataatttgagaaaaaaggttactttgttattcagcttttcataatatctatgctgagtattttcacgtatcttccaagtactcagctttttcgtatttcaaataaggtcagaccttttatacttttgaccaaatagttattttctatgttggacacttagttatttrccaaagcctccgatttgtgatgcagtgtttgtagtccttgtaaacaatatatacagactakacaagaattaattttattgggctttcaaaaaccatatttgcattccagaaccaaatcttaaatgagaccaaagtccaggttagcacaggtttttatttttcctacagctacattgagatatagttcacataaatgacttggagttttatgttcatgaaaaaattagggattatgttaagagtactattttttccattttagttaagyagtactacactcattgtttaaatgtaacttgctgtgtctgaggtataaatatagtctgtgggagtgagaggcaaaccagtcctacccaatttgatttgaatattttaaattatggaactgctaaatagatatttctataaatagataatttttatttatgtagctttttttggaagtaactttataaatttttataattcagaagactactatatgtgagaggcgtgatatctggatggaagttgggctggatgatctccaaagtcgtttcaactcttaaagacatcttaatcctgaatgtaaacaattgttawgtgtttagaatcagaatttgattttgaacttgagtaattcatccttacagctatctgtagaattagtcatcttttttcttttcttttttttttacttttttgttaataagcaaacttatttgctgcagaatttgggttgactcctgagcatatttaaaacaaagaagctagaaatttagcagtcagattaggtaggtggttttatttcaaagggaaactttaatccaaagaaagattaattactctaacaaacaagagaagcttcatgtttgatgatacagatttaagaatacctgagacttaagagtgttggaagtcatttgatagaaagatgagatcggagacaatgttgtgttayagggcacacattgaaggtatatgccaaatctctcaccagataagtccttttctccctgtgccgttttcttgctcaaagggaacagtgaattagccagctagaatcttcctggtccctttttgaggcagtagcaggtaaggaaagggctgattttcatcaaaaccaagacctttctgcagggatgatagtggaataataatgtgggattagcccgctagcattaggagcagttgggaagttacctggtagatcaagcattacacacaaaaaatcaagttgatcagagtatgggttctccatrtagcaatacttcagtgagattaagtataaacagtttttggcaaaaaacaacacagtctactctttctgcttacaaagacaaagccttacaaactcactatgaaggtaaagggaggacagcttgcttctttgcccagacatttacaaagttgtttttaaaacacactcataagtaagtttggcaagttgtttaaaaaatgtctctttgttttgtacagttctgttagatgttgttatattttaaaagtttaatttaaaaaatttaatttgtccttcctaagaaggataaatatataaaaaagccactggaatgaaaacttcctatatgctatgctgttgtcttattattatatagaaaaataactttagaaaaatattgaagacattgtattaccacttgtgattcaaacaattttgtggttaaaactggattttaaatttaaaaatcaataaaaatttcaaatgtttattaccttcctcggtgccataattttgactttatcttcaaataaaatccttcattaattgtgacatttctatgcaagtgttacatttttttgagagtacatgaagattactgtaacagaataatgtcctcatatcctaactaactttattttgctcaatttagctggttgaaattcttgttcagaaatcaagagtgcttatttaaaatgccttgatctaaaaacattggtcccaattaatttcttcatctggaagaaaaaaaggagttgtgataatacct

SEQ ID NO: 4249 - DNA, 2656 bp, Homo sapiens
gcagcgcctggccccgccgcgcaggccgggcggggtctggagcggcgccgtttccgcttccgctccctcacagctcccgtcccgttaccgcctcctggccggcctcgcgcctttcaccggcaccttgcgtcggtcgcgccgcggggcctgctcctgccgcgcgcacccccggggcttcggctccggcacgggtcgcgcccagctttcctgcacctgaggccgccggccagccgccgccatgggtgcctacctctcccagcccaacacggtgaagtgctccggggacggggtcggcgccccgcgcctgccgctgccctacggcttctccgccatgcaaggctggcgcgtctccatggaggatgctcacaactgtattcctgagctggacagtgagacagccatgttttctgtctacgatggacatggaggggaggaagttgccttgtactgtgccaaatatcttcctgatatcatcaaagatcagaaggcctacaaggaaggcaagctacagaaggctttagaagatgccttcttggctattgacgccaaattgaccactgaagaagtcattaaagagctggcacagattgcagggcgacccactgaggatgaagatgaaaaagaaaaagtagctgatgaagatgatgtggacaatgaggaggctgcactgctgcatgaagaggctaccatgactattgaagagctgctgacacgctacgggcagaactgtcacaagggccctccccacagcaaatctggaggtgggacaggcgaggaaccagggtcccagggcctcaatggggaggcaggacctgaggactcaactagggaaactccttcacaagaaaatggccccacagccaaggcctacacaggcttttcctccaactcggaacgtgggactgaggcaggccaagttggtgagcctggcattcccactggtgaggctgggccttcctgctcttcagcctctgacaagctgcctcgagttgctaagtccaagttctttgaggacagtgaggatgagtcagatgaggcggaggaagaagaggaagacagtgaggaatgcagcgaggaagaggatggctacagcagtgaggaggcagagaatgaggaagatgaggatgacaccgaggaggctgaagaggacgatgaagaagaagaagaagagatgatggtgccagggatggaaggcaaagaggagcctggctctgacagtggtacaacagcggtggtggccctgatacgagggaagcagttgattgtagccaacgcaggagactctcgctgtgtggtatctgaggctggcaaagctttagacatgtcctatgatcacaaaccagaggatgaagtagaactagcacgcatcaagaatgctggtggcaaggtcaccatggatgggcgagtcaacgggggcctcaacctctccagagccattggggaccacttctataagagaaacaagaacctgccacctgaggaacagatgatttcagcccttcctgacatcaaggtgctgactctcactgacgaccatgaattcatggtcattgcctgtgatggcatctggaatgtgatgagcagccaggaagttgtagatttcattcaatcaaagatcagccagcgtgatgaaaatggggagcttcggttattgtcatccattgtggaagagctgctggatcagtgcctggcaccagacacttctggggatggtacagggtgtgacaacatgacctgcatcatcatttgcttcaagccccgaaacacagcagagctccagccagagagtggcaagcgaaaactagaggaggtgctctctactgagggggctgaagaaaatggcaacagcgacaagaagaagaaggccaagcgagactagcagtcatccagmcccctgcccacctagactgttttytgagccctccggacctgagactgagttttgtctttttcctttagccttagcagtgggtatgaggtgtgcagggggagctgggtggcttcactccgcccattccaaagagggctctccctccacactgcagccgggagcctctgctgtcctycccagccgcctctgctcctcgggctcatcaccggttctgtgcctgtgctctgttgtgttggagggaaggactggcggttctggtttttactctgtgaactttatttaaggacattcttttttattggcggctccatggccctcggccgcttgcacccgctctctgttgtacactttcaatcaacactttttcagactaaaggccaaaacctaatcgtacgcatcgtgtccttttttttctgctgccgtggcccccgacttggtcccatctgtagcatgtggcgagcccccatgtgagtgtgtgcgtgtgctcgtgtgtgtcctgcgcgtgtataggagagcccagagcgagctgctggtaggccggcctggcgggcgtcgcggctgcccctcgccccctcctgcagccagaaatgatctagttcccccagggacaggttgggaccggtctggctggcctgaagcctggagtcgggcaggacgcctcctgcgctgctccctggccggctccccgctgccgctgattggcttgctccccgcctcgtcacaatcacttcccggtcacgccattgaggctcccgccgcggccgc

SEQ ID NO: 4250 - DNA, 343 bp, Homo sapiens
agactcgctgtatcccccaggctggagtgtagtggcgtcatctcagctcactgcaacctctgcctcccgagttcaagcaattctcctgagctatcatggtgaacttacttcagattgtgcgggaccactgggttcatgttcttgtccctatgggatttgtcattggatgttatttagacagaaagagtgatgaacggctaactgccttccggaacaagagtatgttatttaaaagggaattgcaacccagtgaagaagttacctggaagtaaagactggctagattatcgaatgttcacattttaaagttctgagagaaataaaaacatgaagaatytgaaat

SEQ ID NO: 4251 - DNA, 387 bp, Homo sapiens
tgttgcccttggtctcggggtcgctgtmggcgctgaggctgcagagactcgctgtatcccccaggctggagtgtagtggcgtcatctcagctcactgcaacctctgcctcccgagttcaagcaattctcctgagctatcatggtgaacttacttcagattgtgcgggaccactgggttcatgttcttgtccctatgggatttgtcattggatgttatttagacagaaagagtgatgaacggctaactgccttccggaacaagagtatgttatttaaaagggaattgcaacccagtgaagaagttacctggaagtaaagactggctagattatcgaatgttcacattttaaagttctgagagaaataaaaacatgaagaatytgaaat

SEQ ID NO: 4252 - DNA, 415 bp, Homo sapiens
tgttgcccttggtctcggggtcgctgtmggcgctgaggctgcagagactcgctgtatcccccaggctggagtgtagtggcgtcatctcagctcactgcaacctctgcctcccgagttcaagcaattctcctgcctcagcctcctgagtarctgggactacagctatcatggtgaacttacttcagattgtgcgggaccactgggttcatgttcttgtccctatgggatttgtcattggatgttatttagacagaaagagtgatgaacggctaactgccttccggaacaagagtatgttatttaaaagggaattgcaacccagtgaagaagttacctggaagtaaagactggctagattatcgaatgttcacattttaaagttctgagagaaataaaaacatgaagaatytgaaat

SEQ ID NO: 4253 - DNA, 406 bp, Homo sapiens
gaggaggaaaaagtagtatgatttgctggcgtcacccctctgctccgtgcgggcgcggcgaatggcaggtcccgaggtcgcagcttccactggcgcgggttgagttccctgttgcccttggtctcggggtcgctgtmggcgctgaggctgcagctatcatggtgaacttacttcagattgtgcgggaccactgggttcatgttcttgtccctatgggatttgtcattggatgttatttagacagaaagagtgatgaacggctaactgccttccggaacaagagtatgttatttaaaagggaattgcaacccagtgaagaagttacctggaagtaaagactggctagattatcgaatgttcacattttaaagttctgagagaaataaaaacatgaagaatytgaaat

SEQ ID NO: 4254 - DNA, 462 bp, Homo sapiens
cgtagagatgtgacccagtgaccgcccgctaaccggactggagagaagaccggcccggatcccacgcctggcctgaagcagggaagacgctgcctcccctccgcgagcagcttacattcgtccaagttccagccttctgtcttctcgctaacctcgctctyttccaaatcgcaaatcctcttgagccgacaccgttgcgcctaaatgatctatcatggtgaacttacttcagattgtgcgggaccactgggttcatgttcttgtccctatgggatttgtcattggatgttatttagacagaaagagtgatgaacggctaactgccttccggaacaagagtatgttatttaaaagggaattgcaacccagtgaagaagttacctggaagtaaagactggctagattatcgaatgttcacattttaaagttctgagagaaataaaaacatgaagaatytgaaay

SEQ ID NO: 4255 - DNA, 3695 bp, Homo sapiens
ctcattttttttttttttagcttccaaacattaccaataayttctgaataaaatttcgctccagacaracgaggcgtgcaggcgtgaccgccgtcgccttccgacagcaccgtgcccaccccccggagatggtctcgccctggttcctcctcgtctccgccgctagtctccagctccaaaatggcggctgccactgtggggcttctgccggccggtagtccctggcgctgctgacccagcatcggcttttctacgtcttgaacctggattcgcctaggggttgggaagggctgtggacggcgttgggggaggcctgacgaggcaaattaataaagaactcttcagaattcctggtgtttcatcatatatacgactaagatatcaactcttctagcttgctgtttctggaccaaaaaaaatgacgtctattatcaaattaactaccctttctggggtccaagaagaatctgccctttgctatcttctccaagttgatgagtttagatttttattggactgtggctgggatgagcacttttctatggatattattgattccctgaggaagcatgttcaccagattgatgcagtgctgttgtctcaccctgatcctctccaccttggtgccctcccgtatgctgtcggaaagttgggtctgaactgtgctatctatgcaaccattcctgtttataaaatgggacagatgttcatgtatgatctttatcagtctcgacacaatacagaagattttacactctttacattagatgatgtggatgcagcctttgataaaatacagcagctaaaattctctcagattgtgaatttgaaaggtaaaggacatggcctgtctatcacacctctgccagctggtcatatgataggtggaacaatatggaaaatagtcaaagatggagaagaagaaattgtttatgcagttgacttcaaccacaagagggagatccatttaaatggatgttccctggaaatgctaagcaggccttccctacttatcacagattcattcaatgctacatatgtacagcctagaagaaaacagagagatgagcagcttctgacaaatgtcctggaaacacttcgaggtgatggaaatgtgttaatagcagtggacacagcaggcagagttttggaacttgctcaacttcttgatcagatttggaggactaaagatgcaggattgggtgtttactcattggcactcctaaataatgtcagttacaatgtggtggagttttctaagtcccagttgaggaaacgtgtgaagcttgaagggaaagaacttgaagaatacttggaaaaagagaaactaaagaaagaagctgccaaaaagcttgagcagtcaaaagaggcagatatagattccagtgatgagagtgatattgaggaagatattgaccagccatcagctcataagacgaagcatgacttgatgatgaaaggtgaaggcagtcgtaaaggaagttttttcaaacaggcaaaaaagtcctatcctatgtttcctgccccagaagaaagaattaaatgggatgaatatggagagattatcaaagacttattatttagaccagaggatttcttagtgccagagcttcaagctactgaagaagaaaaaagcaaattagaatctggtttgacaaatggagatgaacctatggatcaggatttatctgatgttcctactaaatgtatttctacaacagagtctattgaaataaaagcccgggttacctacatagactatgaaggacgctctgatggggattccattaaaaaaatcattaatcagatgaaaccacgacagttgatcatcgtccatggcccaccagaggccagtcaagatctggcagagtgctgtcgcgcctttggtgggaaagatattaaagtgtacatgccaaagctacatgaaacagttgatgccactagtgaaactcacatctaccaggtgaggttaaaagactcacttgtcagctctcttcagttttgtaaggcaaaagatgctgaattagcttggatagatggtgtcttagatatgagagtttccaaagtggacacaggggttattttagaagaaggagaactaaaggatgatggagaagactcagagatgcaagtggaagctccctcagattctagcgttatagcacaacaaaaggccatgaaaagtctgttcggagatgatgaaaaagaaacaggtgaagaaagtgagatcattcctactttggaacccttgccacctcatgaggttccwggacatcagtcagtttttatgaatgaaccaaggctgtcagacttcaagcaagttctcttacgggaggggattcaagctgaatttgtaggaggtgtacttgtttgcaacaatcaagtagcagtccgcagaacggaaactggacgcattggattagaaggctgcctttgtcaagatttttataggataagagaccttttatatgaacaatatgccattgtataaaggacatgatgtcaagaagtatctgcttgacctttctaagaaaaagggattcttatcttactctgagcttttgatgttttgttttgtaacatacaaaaagaatctgccagaaaamcttacatgtatcagatttttaaaaatataaatagagaacattttgcaaatgctcaaatgagcattctatcttttggctttcagagtgatagagctcctaacaggtgtacaggcccaagagttgaaggtgattggttttctttacagactccttgttctctagaagggctttttacttgaataaaacaatgcaacttagcaaaccaatttatggccttagagaaacatttttgcatgagttcttacaaactgtttgttatattttctggaatgataagtgagaattatttagaaaagacatgctccaaaaaaaaaacaaaactgataaaacagtttttcgaaacttacttttaaaagcatacgtgctatgactctctccagtttgaatatgcaattgttttcacaggcaggatgtctgttttctgcctgtatttcccagtgatttactctagggtaaggtagtacacatttggttcagaaattaatttttatttctcctatatcttgttttatcaagattttgttgtggcatttcaatgtaaattataacaccatcatttgagtatacataattcaaaagaactacttgatgcagtatagtcttaagggttctgcatacattttagaaacatcttagccgtaagttaggtcctgtgttaaactgtttagtgctctgtttttaagaaaacaaatgttgaacctcacacttttatgtggtgacagtgtaatttaattaaaaggtgtaaatgktttcatctcttaggcttgctgtctcctaaggtcacccaagcagtggttggattttatacacattactactaaaataatactgaagttggataaggttatcctttctgtatttgcgtctttcttgtgactaaccaccctgatatagtattaaccactgtgttcaagagtaaaaacaatatatgcaattttcattgaacttaaagagtgaaaaccatgtaaactattgaaactattgtaatccattaatgcttttttagaatggcagaccttgatgtttatttctcaaatggttaagccctcttctttactcttaatttttttttgagacagagtcacccag

SEQ ID NO: 4256 - DNA, 3936 bp, Homo sapiens
caaaatggcggctgccactgtggggcttctgccggccggtagtccctggcgctgctgacccagcatcggcttttctacgtcttgaacctggattcgcctaggggttgggaagggctgtggacggcgttgggggaggcctgacgagattaataaagaactcttcagaattcctggtgtttcatcatatatacgactaagatatcaactcttctagcttgctgtttctggaccaaaaaaaatgacgtctattatcaaattaactaccctttctggggtccaagaagaatctgccctttgctatcttctccaagttgatgagtttagatttttattggactgtggctgggatgagcacttttctatggatattattgattccctgaggaagcatgttcaccagattgatgcagtgctgttgtctcaccctgatcctctccaccttggtgccctcccgtatgctgtcggaaagttgggtctgaactgtgctatctatgcaaccattcctgtttataaaatgggacagatgttcatgtatgatctttatcagtctcgacacaatacagaagattttacactctttacattagatgatgtggatgcagcctttgataaaatacagcagctaaaattctctcagattgtgaatttgaaaggtaaaggacatggcctgtctatcacacctctgccagctggtcatatgataggtggaacaatatggaaaatagtcaaagatggagaagaagaaattgtttatgcagttgacttcaaccacaagagggagatccatttaaatggatgttccctggaaatgctaagcaggccttccctacttatcacagattcattcaatgctacatatgtacagcctagaagaaaacagagagatgagcagcttctgacaaatgtcctggaaacacttcgaggtgatggaaatgtgttaatagcagtggacacagcaggcagagttttggaacttgctcaacttcttgatcagatttggaggactaaagatgcaggattgggtgtttactcattggcactcctaaataatgtcagttacaatgtggtggagttttctaagtcccaggtagaatggatgagtgataaattgatgagatgttttgaagacaaaagaaataatccgtttcagtttcgccatctctctttatgtcatggtctttctgacttggcccgtgtacctagccctaaagttgtacttgccagccaacctgacctggaatgcggattttcaagggatctctttattcagtggtgtcaggaccctaaaaactcaatcattctaacctacagaactactcctgggactttagcacgtttcctaattgataatccttctgaaaaaattacagaaatagagttgaggaaacgtgtgaagcttgaagggaaagaacttgaagaatacttggaaaaagagaaactaaagaaagaagctgccaaaaagcttgagcagtcaaaagaggcagatatagattccagtgatgagagtgatattgaggaagatattgaccagccatcagctcataagacgaagcatgacttgatgatgaaaggtgaaggcagtcgtaaaggaagttttttcaaacaggcaaaaaagtcctatcctatgtttcctgccccagaagaaagaattaaatgggatgaatatggagagattatcaaaccagaggatttcttagtgccagagcttcaagctactgaagaagaaaaaagcaaattagaatctggtttgacaaatggagatgaacctatggatcaggatttatctgatgttcctactaaatgtatttctacaacagagtctattgaaataaaagcccgggttacctacatagactatgaaggacgctctgatggggattccattaaaaaaatcattaatcagatgaaaccacgacagttgatcatcgtccatggcccaccagaggccagtcaagatctggcagagtgctgtcgcgcctttggtgggaaagatattaaagtgtacatgccaaagctacatgaaacagttgatgccactagtgaaactcacatctaccaggtgaggttaaaagactcacttgtcagctctcttcagttttgtaaggcaaaagatgctgaattagcttggatagatggtgtcttagatatgagagtttccaaagtggacacaggggttattttagaagaaggagaactaaaggatgatggagaagactcagagatgcaagtggaagctccctcagattctagcgttatagcacaacaaaaggccatgaaaagtctgttcggagatgatgaaaaagaaacaggtgaagaaagtgagatcattcctactttggaacccttgccacctcatgaggttccwggacatcagtcagtttttatgaatgaaccaaggctgtcagacttcaagcaagttctcttacgggaggggattcaagctgaatttgtaggaggtgtacttgtttgcaacaatcaagtagcagtccgcagaacggaaactggacgcattggattagaaggctgcctttgtcaagatttttataggataagagaccttttatatgaacaatatgccattgtataaaggacatgatgtcaagaagtatctgcttgacctttctaagaaaaagggattcttatcttactctgagcttttgatgttttgttttgtaacatacaaaaagaatctgccagaaaamcttacatgtatcagatttttaaaaatataaatagagaacattttgcaaatgctcaaatgagcattctatcttttggctttcagagtgatagagctcctaacaggtgtacaggcccaagagttgaaggtgattggttttctttacagactccttgttctctagaagggctttttacttgaataaaacaatgcaacttagcaaaccaatttatggccttagagaaacatttttgcatgagttcttacaaactgtttgttatattttctggaatgataagtgagaattatttagaaaagacatgctccaaaaaaaaaacaaaactgataaaacagtttttcgaaacttacttttaaaagcatacgtgctatgactctctccagtttgaatatgcaattgttttcacaggcaggatgtctgttttctgcctgtatttcccagtgatttactctagggtaaggtagtacacatttggttcagaaattaatttttatttctcctatatcttgttttatcaagattttgttgtggcatttcaatgtaaattataacaccatcatttgagtatacataattcaaaagaactacttgatgcagtatagtcttaagggttctgcatacattttagaaacatcttagccgtaagttaggtcctgtgttaaactgtttagtgctctgtttttaagaaaacaaatgttgaacctcacacttttatgtggtgacagtgtaatttaattaaaaggtgtaaatgktttcatctcttaggcttgctgtctcctaaggtcacccaagcagtggttggattttatacacattactactaaaataatactgaagttggataaggttatcctttctgtatttgcgtctttcttgtgactaaccaccctgatatagtattaaccactgtgttcaagagtaaaaacaatatatgcaattttcattgaacttaaagagtgaaaaccatgtaaactattgaaactattgtaatccattaatgcttttttagaatggcagaccttgatgtttatttctcaaatggttaagccctcttctttactcttaatttttttttgagacagagtcacccaggctggtctcaaactcctgacctcaagcgatccacccacctaggcctcccaaagtgctgggattacaggcatgaatcaccacaactagcctacccttagatttttggaaggatcgatcttatttaactatgtgtggaacaacccag

SEQ ID NO: 4257 - DNA, 1510 bp, Homo sapiens
caatatgaagagctacggccaagttcatgcagtcacaggcaatgacaactatatcaccaatgctgcctggctgagagtgatttaagacatcattgattggaagttttccaagagataacttcaccaagatgtccagtgataggcaaaggtccgatgatgagagccccagcaccagcagtggcagttcagatgcggaccagcgwgacccagccgctccagagcctgaagaacaagaggaaagaaaaccttctgccacccagcagaagaaaaacaccaaactctctagcaaaaccactgctaagttatccactagtgctaaaagaattcagaaggagctagctgaaataacccttgatcctcctcctaattgcagtgctgggcctaaaggagataacatttatgaatggagatcaactatacttggtccaccgggttctgtatatgaaggtggtgtgttttttctggatatcacattttcatcagattatccatttaagccaccaaaggttactttccgcaccagaatctatcactgcaacatcaacagtcagggagtcatctgtctggacatccttaaagacaactggagtcccgctttgactatttcaaaggttttgctgtctatttgttcccttttgacagactgcaaccctgcggatcctctggttggaagcatagccactcagtatttgaccaacagagcagaacacgacaggatagccagacagwggaccaagagatacgcaacrtaattcacataatttgtatgcagtgtgaaggagcagaaggcatcttctcactgtgctgcaaatctttatagcctttacaatacggacttctgtgtatatgttatactgattctactctgcttttatcctttggagcctgggagactccccaaaaaggtaaatgctatcaagagtagaactttgtagctgtagattagttatgtttaaaacgcctacttgcaagtcttgcttctttgggatatcaaaatgtattttgtgatgtactaaggatactggtcctgaagtctaccaaatattatagtgcattttagcctaattcattatctgtatgaagttataaaagtagctgtagatggctaggaattatgtcatttgtattaaacccagatctatttctgagtatgtggttcatgctgttgtgaaaaatgttttaccttttacctttgtcagtttgtaatgagaggatttccttttaccctttgtagctcagagagcacctgatgtatcatctcaaacacaataaacatgctcctgaaggcatagtttcctgtcgtaatattttaagtcagtcttgttagaaagtgtgtctgagatgattgttgatgaagtaaaaatgtggctatgaagattactaaagactagcacaaataaacccattcttaaattgaaaacatttaaaatcctattaaatgcatagagtttttttcctttgttattgaaagaatgaccttaaataatcaaaagtggattttgacccattg

SEQ ID NO: 4258 - DNA, 1407 bp, Homo sapiens
ttttccaagagataacttcaccaagatgtccagtgataggcaaaggtccgatgatgagagccccagcaccagcagtggcagttcagatgcggaccagcgwgacccagccgctccagagcctgaagaacaagaggaaagaaaaccttctgccacccagcagaagaaaaacaccaaactctctagcaaaaccactgctaagttatccactagtgctaaaagaattcagaaggagctagctgaaataacccttgatcctcctcctaattgcagtgctgggcctaaaggagataacatttatgaatggagatcaactatacttggtccaccgggttctgtatatgaaggtggtgtgttttttctggatatcacattttcatcagattatccatttaagccaccaaaggttactttccgcaccagaatctatcactgcaacatcaacagtcagggagtcatctgtctggacatccttaaagacaactggagtcccgctttgactatttcaaaggttttgctgtctatttgttcccttttgacagactgcaaccctgcggatcctctggttggaagcatagccactcagtatttgaccaacagagcagaacacgacaggatagccagacagwggaccaagagatacgcaacrtaattcacataatttgtatgcagtgtgaaggagcagaaggcatcttctcactgtgctgcaaatctttatagcctttacaatacggacttctgtgtatatgttatactgattctactctgcttttatcctttggagcctgggagactccccaaaaaggtaaatgctatcaagagtagaactttgtagctgtagattagttatgtttaaaacgcctacttgcaagtcttgcttctttgggatatcaaaatgtattttgtgatgtactaaggatactggtcctgaagtctaccaaatattatagtgcattttagcctaattcattatctgtatgaagttataaaagtagctgtagatggctaggaattatgtcatttgtattaaacccagatctatttctgagtatgtggttcatgctgttgtgaaaaatgttttaccttttacctttgtcagtttgtaatgagaggatttccttttaccctttgtagctcagagagcacctgatgtatcatctcaaacacaataaacatgctcctgaaggcatagtttcctgtcgtaatattttaagtcagtcttgttagaaagtgtgtctgagatgattgttgatgaagtaaaaatgtggctatgaagattactaaagactagcacaaataaacccattcttaaattgaaaacatttaaaatcctattaaatgcatagagtttttttcctttgttattgaaagaatgaccttaaataatcaaaagtggattttgacccattg

SEQ ID NO: 4259 - DNA, 1320 bp, Homo sapiens
caatatgaagagctacggccaagttcatgcagtcacaggcaatgacaactatatcaccaatgctgcctggctgagagtgatttaagacatcattgattggaagttttccaagagataacttcaccaagatgtccagtgataggcaaaggtccgatgatgagagccccagcaccagcagtggcagttcagatgcggaccagcgwgacccagccgctccagagcctgaagaacaagaggaaagaaaaccttctgccacccagcagaagaaaaacaccaaactctctagcaaaaccactgctaagttatccactagtgctaaaagaattcagaaggagctagctgaaataacccttgatcctcctcctaattgcagtgctgggcctaaaggagataacatttatgaatggagatcaactatacttggtccaccgggttctgtatatgaaggtggtgtgttttttctggatatcacattttcatcagattatccatttaagccaccaaaggttactttccgcaccagaatctatcactgcaacatcaacagtcagggagtcatctgtctggacatccttaaagacaactggagtcccgctttgactatttcaaaggttttgctgtctatttgttcccttttgacagactgcaaccctgcggatcctctggttggaagcatagccactcagtatttgaccaacagagcagaacacgacaggatagccagacagwggaccaagagatacgcaacrtaattcacataatttgtatgcagtgtgaaggagcagaaggcatcttctcactgtgctgcaaatctttatagcctttacaatacggacttctgtgtatatgttatactgattctactctgcttttatcctttggagcctgggagactccccaaaaagattgaagtttattaattgctgagaaggaaataaaggtgtggtggaaaggtcttccagaaccagaggctaagcacacagcagtacaaatataaattctttattccagcttccagaattcctcctcttcagccttgcctgctcactggaataatgaagcaattaaacagtggtgtaaagaagttccatccagtggttgaagttcaatagaaaacaaggaaataggctgatgtatatcaaatacaccatcggcactctgagtccttcccaggttccctaaagggggaggaggggacaccgttttagatttaatttgtactgtacctgatatgattgtgataattttccaatgaataattgttaatcttacctaattaaaataattatatgttaaataaaatatgcagatgttaaattg

SEQ ID NO: 4260 - DNA, 1333 bp, Homo sapiens
atggccagccaccttgtgctcaacaatggcaccaagatgcccatcctggggctgggcacctggaagtcccctccaggccgggtgactgaggccgtgaatgtggccatcaatgtcgggtactgccacattgactgtgcccacgtgtactagcatgagaatgaggtgggggtggccattcaggagaagctcagggagcaggtggtaaagcgtgaggagctcttcatcgttagtaagctgtggtgcacataccatgggaagggcctggtgaagggagcctgccagaagaccctcagcagcctgaagctggactacctggacctctaccttattcattggccgactggctttaagcctgggagggaatttttccattgaatgagttgggtaatgtggttcccagtgacaccaacattctggacacatgggcagccatggaagagctggtggatgaatggctgatgaaagctattggcatctccaacttcaaccacctccaagtggagaggctcttaaacaaacctggcttaaagtataagcctgtggttaaccagattgagtgccacccttacctcactcaggagaagttaatccagtactgccagtccaaaggcatcgtggtgacygcctatagccccgttggcactcccagcaggccctgggtcaaccccgaggacccttccctcctgagggatcccaggatcaaggcgattgcagccaagcacaataaaactacagcccaggtcctgatccggttccccatgcagaggaatttgggtgtgatccccaagtctgtgacaccagaactcattgctgacaactttaaggtttttgactttgaactgaacagccaggatatgaccgccttactcagctacaacaggaattggagagtctgtgccttggtgagctgtgcctcccacaaggattaccccttccatgaagagttttgaagctgtggatgcctgctcatccctaagtgacctatacctgtgtttcctgtctcatttttttccttgcaaatgtagcatggcctgtgtcactcagcagtgggacagcaacctgtagagtggccagcaagggcatgtctagcttgatgttggatctgaagagccctgtcaatagagtagaagtctcttccagtttgctttgccctcctttttgccccactggggaaagtacaacctgaatacccttttctgaccaaagagaagcaacatctaccaggtcaaaatagtgccactaacagttgagttttggctgcttggaactgtaatcccttcagcaagacttctctttgcctcaaataaaaagtgtttttgtggagaaaaaaaaa

SEQ ID NO: 4261 - DNA, 1211 bp, Homo sapiens
atggccagccaccttgtgctcaacaatggcaccaagatgcccatcctggggctgggcacctggaagtcccctccaggccgggtgactgaggccgtgaatgtggccatcaatgtcgggtactgccacattgactgtgcccacgtgtactagcatgagaatgaggtgggggtggccattcaggagaagctcagggagcaggtggtaaagcgtgaggagctcttcatcgttacctgggagggaatttttccattgaatgagttgggtaatgtggttcccagtgacaccaacattctggacacatgggcagccatggaagagctggtggatgaatggctgatgaaagctattggcatctccaacttcaaccacctccaagtggagaggctcttaaacaaacctggcttaaagtataagcctgtggttaaccagattgagtgccacccttacctcactcaggagaagttaatccagtactgccagtccaaaggcatcgtggtgacygcctatagccccgttggcactcccagcaggccctgggtcaaccccgaggacccttccctcctgagggatcccaggatcaaggcgattgcagccaagcacaataaaactacagcccaggtcctgatccggttccccatgcagaggaatttgggtgtgatccccaagtctgtgacaccagaactcattgctgacaactttaaggtttttgactttgaactgaacagccaggatatgaccgccttactcagctacaacaggaattggagagtctgtgccttggtgagctgtgcctcccacaaggattaccccttccatgaagagttttgaagctgtggatgcctgctcatccctaagtgacctatacctgtgtttcctgtctcatttttttccttgcaaatgtagcatggcctgtgtcactcagcagtgggacagcaacctgtagagtggccagcaagggcatgtctagcttgatgttggatctgaagagccctgtcaatagagtagaagtctcttccagtttgctttgccctcctttttgccccactggggaaagtacaacctgaatacccttttctgaccaaagagaagcaacatctaccaggtcaaaatagtgccactaacagttgagttttggctgcttggaactgtaatcccttcagcaagacttctctttgcctcaaataaaaagtgtttttgtggagaaaaaaaaa

SEQ ID NO: 4262 - DNA, 2190 bp, Homo sapiens
ggttttaagtgataytaagagtattggcttatatttaagaagtcaaaagataccactttatgaggaatgccagcttttggtgagaaaaggatttgattttcagagaaaacagtatggcaaactaaagaagtttactactgtaaatcctgagttttataatgaaccaaaaaccaaactttatcttaagctaagtcggaaggaaagatcttcagcttatagcaaaaatgatctttgggtggtttcaaaaaccctagactttgagctggatacttttatcgcatgtagtgctttctttggaccatcatctatcaatgagatagaaatactgcctttgaaaggctatttcccttctaattggcccactaacatggttgtccatgcgttattggtttgtaatgctagcacagaactgactactttgaaaaacattcaggactactttaatccagctactctacctctaacacagtacctgttaacaacgtcttcgccaactatagttagtaacaaaagagtcagtaagagaaaatttatcccaccagccttcacaaatgtcagtacaaaatttgaactactcagcctaggagcaacattgaagttagctagtgagttgattcaggtacacaagttaaacaaggatcaagctacagctctaattcaaatagctcaaatgatggcatcacatgaaagcattgaagaagtgaaggaactgcaaactcataccttccctatcacaatcatacatggtgtgtttggagcaggaaagagttacttgctggcagtggtgattttgttctttgtacagctgtttgaaaagagtgaagctcccaccattggaaatgcaaggccgtggaaacttctgatttcttcttstactaatgtggctgttgacagagtacttcttgggcttctcagtcttggatttgaaaactttatcagagttgggagtgttaggaagattgccaaaccaattttaccttatagcttgcatgctggctcagaaaatgaaagtgaacagttaaaagaactacatgcactaatgaaagaagacctgactcctacggaaagagtctatgtgagaaaaagcattgagcagcataaactggggaccaatagaaccctgctgaagcaggtttgagtgtgaaaagctgattcttgttggggatcccaaacagctacctcctactattcagggttctgatgcagctcatgaaaatggattggaacaaactctttttgatcgactttgcttaatgggtcacaagccaattctattgagaactcaataccgttgtcatcctgcaatcagtgctattgctaatgatctgttttacaaaggagccctcatgaatggtgtaacagaaatagagcggagccctttattggaatggctaccaaccctgtgtttttataatgttaaaggactagaacagatagaaagagataacagctttcataatgtggcagaagctacgtttacactcaagctgattcaatcactgattgcaagtggaatagcaggctctatgattggtgtgataacattatacaaatcccagatgtacaagctttgtcatttactcagtgctgtggactttcaccatcctgatattaaaactgtgcaggtgtccacagtagatgcttttcagggagctgaaaaggagatcattattctgtcctgtgtaaggacaagacaagtaggattcattgattcagaaaaaagaatgaatgttgcattgactagaggaaagaggcatttgttgattgygggaaatttagcctgtttgaggaaaaatcaactttggggacgagtgatccaacactgcgaaggaagggaagatggattgcaacatgcaaaccagtatgaaccacagctgaaccatctccttaaagattattttgaaaaacaagtggaagaaaaacagaagaaaaagagtgaaaaagagaaatctaaagataaatctcattcataaaaagacatggtgtaaatattttgtatttatgtaaattcagactcattttacatgatatattttttatatttttattactctaaaccctcttattaaaaatatgatatttaaataacatagtaaacacatgtaaaaattttgttcttcaaaaaagtgtacaaaaggtagtataaaatcctactaataaaaataagcttttttctaagaagaatgattt

SEQ ID NO: 4263 - DNA, 2670 bp, Homo sapiens
agcccctctacctccggaagagacgagtgcggtaacaccgttcacagagctagccggacgtcctccgactcaagatatttgtcaaatattttcaraaratggctgatccttggcaggaatgcatggattatgcagtaactctagcaagacaagctggagaggtagtttgtgaagctataaaaaatgaaatgaatgttatgctgaaaagttctccagttgatttggtaactgctacggaccaaaaagttgaaaaaatgcttatctcttccataaaggaaaagtatccatctcacagtttcattggtgaagaatctgtggcagctggggaaaaaagtatyttaaccgacaaccccacatggatcattgaccctattgatggaacaactaactttgtacatagatttccttttgtagctgtttcarttggctttgctgtaaataaaaagatagaatttggagttgtgtacagttgtgtggaaggcaagatgtacactgccagaaaaggaaaaggtgccttttgtaatggtcaaaaactacaagtttcacaacaagaagatrttaccaaatctctcttggtgactgagttgggctcttccagaacaccagagactgtgagaatggttctttctaatatggaaaagcttttttgcattcctgttcatgggatccggagtgttggaacagcagctgttaatatgtgccttgtggcaactggcggagcagatgcatattatgaaatgggaattcactgctgggatgttgcaggagctggcattattgttactgaagctggtggcgtgctaatggatgttacaggtggaccatttgatttgatgtcacgaagagtaattgctgcaaataatagaatattagcagaaaggatagctaaagaaattcaggttatacctttgcaacgagacgacgaagattaattaaggcagcctcatagtcaatcccagttgcttttccccagatttggtgactcatcaatggatatgtgttttggatgtatgatatgcttggtttaaattctctttgtccaggtcaaaaatttggaacttgtttcttattttactatgtctakgtttgcaagaattgacataatgtttgtttcactgatttaaaaaattttgcatgtaagaatgtactttaggaaacatacccaggaagtacagttgataaatataacatcaactgaaatagtcaattagcaattttgtgtttctaaatatctatggtcccctgaaattttgacttagtatataggtgcagagacacccacttagaaagttaactgtttggaaaaacatttctctttagtttcaaaaaccatatataattaaatttgtaaggatatactgagtaccctaggccaacttttttttctttgcagagaaccttttttgttttattcttcagtgttcatatagcacctggcccattacatatctaggcaactaaaaacaaacattgtaagaatgaatatttttaatgtagtaattcctagttacaatagatacataaagtaatgaactcagcattctgtacttttgcttcaggtttgaagtaaaaattatctagttaaattttttttatttcacgttaccatgccatttcacattaccataccatcagatagcatggcttattgtgggcatttctgcagtgaatacattttccaaaacagttaaattgtctgtttggatttgctttaaagtcttgtgtaagagagaagaaactatttctataataaaaagcactctcatcagatatctgacataattagatacaatataacattttactaagttcagtattcatgttttaaaggtgtttatactgatttgattgtgctggcaaatatactgtattgttaatattgaactrtttatttttctcttagtcktcttatttaattaacttcattgccgctggattmtgttcagcctttaaaaatatttcttagtggtcattgctctgcagaactcaaaaagaaaattgtacttgttcatagacatttttaaagggttaatttattgttcagccttatcccttggcacgtaaacagactactagacttattgtaggttcgtttgagctttgtgttgtaaaattaaaaatgcttctrtaaagttttcaaggtagggagtgattttattattgtgtatatctaatatattaagtatgtgtgatactaaggtttgactgctataattatttgtactgttgatcacatgtacttaaaacatctgatactgtattctaagacaggttgtttttgcaattaaatttattttaataagacratcatgaataaaactttaaattgatatttttattattattaccattatcattattattatttttagattcagggtctcgctctgttgcccagggtctgtctctgactgtgctgtggtgcagtcatagctcactgtatccttawaktccygggctcargwgatcctcctctttcagtctcytgagtagctgggactataagttcatgccaccatgccctactaatgttttaattttatttttgtaaagatgggatcttcctatgttttccaggccccttggcctcccaaagtgctgggattacagatgtgagccaccgagccaggccaygatatttacattattaaagttaatagttcaaactac

SEQ ID NO: 4264 - DNA, 2624 bp, Homo sapiens
agcccctctacctccggaagagacgagtgcggtaacaccgttcacagagctagccggacgtcctccgactcaagatatttgtcaaatattttcaraaratggctgatccttggcaggaatgcatggattatgcagtaactctagcaagacaagctggagaggtagtttgtgaagctataaaaaatgaaatgaatgttatgctgaaaagttctccagttgatttggtaactgctacggaccaaaaagttgaaaaaatgcttatctcttccataaaggaaaagtatccatctcacagtttcattggtgaagaatctgtggcagctggggaaaaaagtatyttaaccgacaaccccacatggatcattgaccctattgatggaacaactaactttgtacatagatagaatttggagttgtgtacagttgtgtggaaggcaagatgtacactgccagaaaaggaaaaggtgccttttgtaatggtcaaaaactacaagtttcacaacaagaagatrttaccaaatctctcttggtgactgagttgggctcttccagaacaccagagactgtgagaatggttctttctaatatggaaaagcttttttgcattcctgttcatgggatccggagtgttggaacagcagctgttaatatgtgccttgtggcaactggcggagcagatgcatattatgaaatgggaattcactgctgggatgttgcaggagctggcattattgttactgaagctggtggcgtgctaatggatgttacaggtggaccatttgatttgatgtcacgaagagtaattgctgcaaataatagaatattagcagaaaggatagctaaagaaattcaggttatacctttgcaacgagacgacgaagattaattaaggcagcctcatagtcaatcccagttgcttttccccagatttggtgactcatcaatggatatgtgttttggatgtatgatatgcttggtttaaattctctttgtccaggtcaaaaatttggaacttgtttcttattttactatgtctakgtttgcaagaattgacataatgtttgtttcactgatttaaaaaattttgcatgtaagaatgtactttaggaaacatacccaggaagtacagttgataaatataacatcaactgaaatagtcaattagcaattttgtgtttctaaatatctatggtcccctgaaattttgacttagtatataggtgcagagacacccacttagaaagttaactgtttggaaaaacatttctctttagtttcaaaaaccatatataattaaatttgtaaggatatactgagtaccctaggccaacttttttttctttgcagagaaccttttttgttttattcttcagtgttcatatagcacctggcccattacatatctaggcaactaaaaacaaacattgtaagaatgaatatttttaatgtagtaattcctagttacaatagatacataaagtaatgaactcagcattctgtacttttgcttcaggtttgaagtaaaaattatctagttaaattttttttatttcacgttaccatgccatttcacattaccataccatcagatagcatggcttattgtgggcatttctgcagtgaatacattttccaaaacagttaaattgtctgtttggatttgctttaaagtcttgtgtaagagagaagaaactatttctataataaaaagcactctcatcagatatctgacataattagatacaatataacattttactaagttcagtattcatgttttaaaggtgtttatactgatttgattgtgctggcaaatatactgtattgttaatattgaactrtttatttttctcttagtcktcttatttaattaacttcattgccgctggattmtgttcagcctttaaaaatatttcttagtggtcattgctctgcagaactcaaaaagaaaattgtacttgttcatagacatttttaaagggttaatttattgttcagccttatcccttggcacgtaaacagactactagacttattgtaggttcgtttgagctttgtgttgtaaaattaaaaatgcttctrtaaagttttcaaggtagggagtgattttattattgtgtatatctaatatattaagtatgtgtgatactaaggtttgactgctataattatttgtactgttgatcacatgtacttaaaacatctgatactgtattctaagacaggttgtttttgcaattaaatttattttaataagacratcatgaataaaactttaaattgatatttttattattattaccattatcattattattatttttagattcagggtctcgctctgttgcccagggtctgtctctgactgtgctgtggtgcagtcatagctcactgtatccttawaktccygggctcargwgatcctcctctttcagtctcytgagtagctgggactataagttcatgccaccatgccctactaatgttttaattttatttttgtaaagatgggatcttcctatgttttccaggccccttggcctcccaaagtgctgggattacagatgtgagccaccgagccaggccaygatatttacattattaaagttaatagttcaaactac

SEQ ID NO: 4265 - DNA, 2654 bp, Homo sapiens
agcccctctacctccggaagagacgagtgcggtaacaccgttcacagagctagccggacgtcctccgactcaagatatttgtcaaatattttcaraaratggctgatccttggcaggaatgcatggattatgcagtaactctagcaagacaagctggagaggtagtttgtgaagctataaaaaatgaaatgaatgttatgctgaaaagttctccagttgatttggtaactgctacggaccaaaaagttgaaaaaatgcttatctcttccataaaggaaaagtatccatctcacagtttcattggtgaagaatctgtggcagctggggaaaaaagtatyttaaccgacaaccccacatggatcattgaccctattgatggaacaactaactttgtacatagatttccttttgtagctgtttcarttggctttgctgtaaataaaaagatagaatttggagttgtgtacagttgtgtggaaggcaagatgtacactgccagaaaaggaaaaggtgccttttgtaatggtcaaaaactacaagtttcacaacaagaagatrttaccaaatctctcttggtgactgagttgggctcttccagaacaccagagactgtgagaatggttctttctaatatggaaaagcttttttgcattcctgttcatgggatccggagtgttggaacagcagctgttaatatgtgccttgtggcaactggcggagcagatgcatattatgaaatgggaattcactgctgggatgttgcaggagctggcattattgttactgaagctggtggcgtgctaatggatgttacaggtggaccatttgatttgatgtcacgaagagtaattgctgcaaataatagaatattagcagaaaggatagctaaagaaattcaggttatacctttgcaacgagacgacgaagattaattaaggcagcctcatagtcaatcccagttgcttttccccagatttggtgactcatcaatggatatgtgttttggatgtatgatatgcttggtttaaattctctttgtccaggtcaaaaatttggaacttgtttcttattttactatgtctakgtttgcaagaattgacataatgtttgtttcactgatttaaaaaattttgcatgtaagaatgtactttaggaaacatacccaggaagtacagttgataaatataacatcaactgaaatagtcaattagcaattttgtgtttctaaatatctatggtcccctgaaattttgacttagtatataggtgcagagacacccacttagaaagttaactgtttggaaaaacatttctctttagtttcaaaaaccatatataattaaatttgtaaggatatactgagtaccctaggccaacttttttttctttgcagagaaccttttttgttttattcttcagtgttcatatagcacctggcccattacatatctaggcaactaaaaacaaacattgtaagaatgaatatttttaatgtagtaattcctagttacaatagatacataaagtaatgaactcagcattctgtacttttgcttcaggtttgaagtaaaaattatctagttaaattttttttatttcacgttaccatgccatttcacattaccataccatcagatagcatggcttattgtgggcatttctgcagtgaatacattttccaaaacagttaaattgtctgtttggatttgctttaaagtcttgtgtaagagagaagaaactatttctataataaaaagcactctcatcagatatctgacataattagatacaatataacattttactaagttcagtattcatgttttaaaggtgtttatactgatttgattgtgctggcaaatatactgtattgttaatattgaactrtttatttttctcttagtcktcttatttaattaacttcattgccgctggattmtgttcagcctttaaaaatatttcttagtggtcattgctctgcagaactcaaaaagaaaattgtacttgttcatagacatttttaaagggttaatttattgttcagccttatcccttggcacgtaaacagactactagacttattgtaggttcgtttgagctttgtgttgtaaaattaaaaatgcttctrtaaagttttcaaggtagggagtgattttattattgtgtatatctaatatattaagtatgtgtgatactaaggtttgactgctataattatttgtactgttgatcacatgtacttaaaacatctgatactgtattctaagacaggttgtttttgcaattaaatttattttaataagacratcatgaatgagtagctgggactataagttcatgccaccatgccctactaatgttttaattttatttttgtaaagatgggatcttcctatgttttccaggccccttggcctcccaaagtgctgggattacagatgtgagccaccgagccaggccaygatatttacattattaaagttaatagttcaaactacttttagaggctttgttttgtttttgttttttgaagacagtrtcttgctcttctgctcaaacagtaatgcagtggcatgatcaccattcattgcagtctcaaccttctgggctcaagcagtcctcccacctcagcctccctagtaactggaaccacy

SEQ ID NO: 4266 - DNA, 2151 bp, Homo sapiens
cgttcacagagctagccggacgtcctccgactcaagatrttaccaaatctctcttggtgactgagttgggctcttccagaacaccagagactgtgagaatggttctttctaatatggaaaagcttttttgcattcctgttcatgggatccggagtgttggaacagcagctgttaatatgtgccttgtggcaactggcggagcagatgcatattatgaaatgggaattcactgctgggatgttgcaggagctggcattattgttactgaagctggtggcgtgctaatggatgttacaggtggaccatttgatttgatgtcacgaagagtaattgctgcaaataatagaatattagcagaaaggatagctaaagaaattcaggttatacctttgcaacgagacgacgaagattaattaaggcagcctcatagtcaatcccagttgcttttccccagatttggtgactcatcaatggatatgtgttttggatgtatgatatgcttggtttaaattctctttgtccaggtcaaaaatttggaacttgtttcttattttactatgtctakgtttgcaagaattgacataatgtttgtttcactgatttaaaaaattttgcatgtaagaatgtactttaggaaacatacccaggaagtacagttgataaatataacatcaactgaaatagtcaattagcaattttgtgtttctaaatatctatggtcccctgaaattttgacttagtatataggtgcagagacacccacttagaaagttaactgtttggaaaaacatttctctttagtttcaaaaaccatatataattaaatttgtaaggatatactgagtaccctaggccaacttttttttctttgcagagaaccttttttgttttattcttcagtgttcatatagcacctggcccattacatatctaggcaactaaaaacaaacattgtaagaatgaatatttttaatgtagtaattcctagttacaatagatacataaagtaatgaactcagcattctgtacttttgcttcaggtttgaagtaaaaattatctagttaaattttttttatttcacgttaccatgccatttcacattaccataccatcagatagcatggcttattgtgggcatttctgcagtgaatacattttccaaaacagttaaattgtctgtttggatttgctttaaagtcttgtgtaagagagaagaaactatttctataataaaaagcactctcatcagatatctgacataattagatacaatataacattttactaagttcagtattcatgttttaaaggtgtttatactgatttgattgtgctggcaaatatactgtattgttaatattgaactrtttatttttctcttagtcktcttatttaattaacttcattgccgctggattmtgttcagcctttaaaaatatttcttagtggtcattgctctgcagaactcaaaaagaaaattgtacttgttcatagacatttttaaagggttaatttattgttcagccttatcccttggcacgtaaacagactactagacttattgtaggttcgtttgagctttgtgttgtaaaattaaaaatgcttctrtaaagttttcaaggtagggagtgattttattattgtgtatatctaatatattaagtatgtgtgatactaaggtttgactgctataattatttgtactgttgatcacatgtacttaaaacatctgatactgtattctaagacaggttgtttttgcaattaaatttattttaataagacratcatgaataaaactttaaattgatatttttattattattaccattatcattattattatttttagattcagggtctcgctctgttgcccagggtctgtctctgactgtgctgtggtgcagtcatagctcactgtatccttawaktccygggctcargwgatcctcctctttcagtctcytgagtagctgggactataagttcatgccaccatgccctactaatgttttaattttatttttgtaaagatgggatcttcctatgttttccaggccccttggcctcccaaagtgctgggattacagatgtgagccaccgagccaggccaygatatttacattattaaagttaatagttcaaactac

SEQ ID NO: 4267 - DNA, 2565 bp, Homo sapiens
agcccctctacctccggaagagacgagtgcggtaacaccgttcacagagctagccggacgtcctccgactcaagatatttgtcaaatattttcaraaratggctgatccttggcaggaatgcatggattatgcagtaactctagcaagacaagctggagaggtagtttgtgaagctataaaaaatgaaatgaatgttatgctgaaaagttctccagttgatttggtaactgctacggaccaaaaagttgaaaaaatgcttatctcttccataaaggaaaagtatccatctcacagatttccttttgtagctgtttcarttggctttgctgtaaataaaaagatagaatttggagttgtgtacagttgtgtggaaggcaagatgtacactgccagaaaaggaaaaggtgccttttgtaatggtcaaaaactacaagtttcacaacaagaagatrttaccaaatctctcttggtgactgagttgggctcttccagaacaccagagactgtgagaatggttctttctaatatggaaaagcttttttgcattcctgttcatgggatccggagtgttggaacagcagctgttaatatgtgccttgtggcaactggcggagcagatgcatattatgaaatgggaattcactgctgggatgttgcaggagctggcattattgttactgaagctggtggcgtgctaatggatgttacaggtggaccatttgatttgatgtcacgaagagtaattgctgcaaataatagaatattagcagaaaggatagctaaagaaattcaggttatacctttgcaacgagacgacgaagattaattaaggcagcctcatagtcaatcccagttgcttttccccagatttggtgactcatcaatggatatgtgttttggatgtatgatatgcttggtttaaattctctttgtccaggtcaaaaatttggaacttgtttcttattttactatgtctakgtttgcaagaattgacataatgtttgtttcactgatttaaaaaattttgcatgtaagaatgtactttaggaaacatacccaggaagtacagttgataaatataacatcaactgaaatagtcaattagcaattttgtgtttctaaatatctatggtcccctgaaattttgacttagtatataggtgcagagacacccacttagaaagttaactgtttggaaaaacatttctctttagtttcaaaaaccatatataattaaatttgtaaggatatactgagtaccctaggccaacttttttttctttgcagagaaccttttttgttttattcttcagtgttcatatagcacctggcccattacatatctaggcaactaaaaacaaacattgtaagaatgaatatttttaatgtagtaattcctagttacaatagatacataaagtaatgaactcagcattctgtacttttgcttcaggtttgaagtaaaaattatctagttaaattttttttatttcacgttaccatgccatttcacattaccataccatcagatagcatggcttattgtgggcatttctgcagtgaatacattttccaaaacagttaaattgtctgtttggatttgctttaaagtcttgtgtaagagagaagaaactatttctataataaaaagcactctcatcagatatctgacataattagatacaatataacattttactaagttcagtattcatgttttaaaggtgtttatactgatttgattgtgctggcaaatatactgtattgttaatattgaactrtttatttttctcttagtcktcttatttaattaacttcattgccgctggattmtgttcagcctttaaaaatatttcttagtggtcattgctctgcagaactcaaaaagaaaattgtacttgttcatagacatttttaaagggttaatttattgttcagccttatcccttggcacgtaaacagactactagacttattgtaggttcgtttgagctttgtgttgtaaaattaaaaatgcttctrtaaagttttcaaggtagggagtgattttattattgtgtatatctaatatattaagtatgtgtgatactaaggtttgactgctataattatttgtactgttgatcacatgtacttaaaacatctgatactgtattctaagacaggttgtttttgcaattaaatttattttaataagacratcatgaataaaactttaaattgatatttttattattattaccattatcattattattatttttagattcagggtctcgctctgttgcccagggtctgtctctgactgtgctgtggtgcagtcatagctcactgtatccttawaktccygggctcargwgatcctcctctttcagtctcytgagtagctgggactataagttcatgccaccatgccctactaatgttttaattttatttttgtaaagatgggatcttcctatgttttccaggccccttggcctcccaaagtgctgggattacagatgtgagccaccgagccaggccaygatatttacattattaaagttaatagttcaaactac

SEQ ID NO: 4268 - DNA, 1871 bp, Homo sapiens
agcccctctacctccggaagagacgagtgcggtaacaccgttcacagagctagccggacgtcctccgactcaagatatttgtcaaatattttcaraaratggctgatccttggcaggaatgcatggattatgcagtaactctagcaagacaagctggagaggtagtttgtgaagctataaaaaatgaaatgaatgttatgctggggaaaaaagtatyttaaccgacaaccccacatggatcattgaccctattgatggaacaactaactttgtacatagatttggtgactcatcaatggatatgtgttttggatgtatgatatgcttggtttaaattctctttgtccaggtcaaaaatttggaacttgtttcttattttactatgtctakgtttgcaagaattgacataatgtttgtttcactgatttaaaaaattttgcatgtaagaatgtactttaggaaacatacccaggaagtacagttgataaatataacatcaactgaaatagtcaattagcaattttgtgtttctaaatatctatggtcccctgaaattttgacttagtatataggtgcagagacacccacttagaaagttaactgtttggaaaaacatttctctttagtttcaaaaaccatatataattaaatttgtaaggatatactgagtaccctaggccaacttttttttctttgcagagaaccttttttgttttattcttcagtgttcatatagcacctggcccattacatatctaggcaactaaaaacaaacattgtaagaatgaatatttttaatgtagtaattcctagttacaatagatacataaagtaatgaactcagcattctgtacttttgcttcaggtttgaagtaaaaattatctagttaaattttttttatttcacgttaccatgccatttcacattaccataccatcagatagcatggcttattgtgggcatttctgcagtgaatacattttccaaaacagttaaattgtctgtttggatttgctttaaagtcttgtgtaagagagaagaaactatttctataataaaaagcactctcatcagatatctgacataattagatacaatataacattttactaagttcagtattcatgttttaaaggtgtttatactgatttgattgtgctggcaaatatactgtattgttaatattgaactrtttatttttctcttagtcktcttatttaattaacttcattgccgctggattmtgttcagcctttaaaaatatttcttagtggtcattgctctgcagaactcaaaaagaaaattgtacttgttcatagacatttttaaagggttaatttattgttcagccttatcccttggcacgtaaacagactactagacttattgtaggttcgtttgagctttgtgttgtaaaattaaaaatgcttctrtaaagttttcaaggtagggagtgattttattattgtgtatatctaatatattaagtatgtgtgatactaaggtttgactgctataattatttgtactgttgatcacatgtacttaaaacatctgatactgtattctaagacaggttgtttttgcaattaaatttattttaataagacratcatgaataaaactttaaattgatatttttattattattaccattatcattattattatttttagattcagggtctcgctctgttgcccagggtctgtctctgactgtgctgtggtgcagtcatagctcactgtatccttawaktccygggctcargwgatcctcctctttcagtctcytgagtagctgggactataagttcatgccaccatgccctactaatgttttaattttatttttgtaaagatgggatcttcc

SEQ ID NO: 4269 - DNA, 3615 bp, Homo sapiens
attttgctcattctttaaaaacctacgaattttaaaaatcaaactttaaaaaactttttgtttttttttttaaaaaaacggcagcgtaatacaatatttggacacgctatactatgggctttgaagaacgcctgtccagaacacccaacaagctccattatgtcaaacgctcccgcgcctctgtgatgtcaccacgacgcgctgggcgctctgcgacttggcagacgtcgtgcgtcattaccaacgaggcgcagkggtcaggacgactctcggcagcgccattgcgcgccctctagtggcagccggttttgaggccggcctccggctttgaagttcctcaccgcgtctccttccctctccccaaagcctggatcaccgcccagcgtcaggcgaggggcgacgtctcgaggtaaaacggaggaggtgcgggacgcggagactgcgcgggcccggtagccctggagaggccgaggctctaggccgcgaggggcgggtgcaatggcggaggaacaggtgaaccgcagcgccggcctggcccccgactgtgaggcctcggcgactgcagaaactacggtttcctcagtggggacctgtgaagccgctgscaagtcaccagagcccaaggactacgacagcacctgcgtgttctgccggatcgcggggcggcaggacccgggcaccgaactcctgcactgcgagaatgaggacctaatttgcttcaaagatatcaaaccagcagcaactcatcattatcttgtggtgccaaagaagcatattggaaactgcagaactctaaggaaagatcaagtagaactggttgagaacatggtaactgttggaaaaaccattcttgaaagaaataatttcactgacttcacgaatgtgaggatgggttttcatatgccaccattctgttccatttcccacttgcaccttcatgttctggcaccagtggatcagcttggcttcttatccaagttggtttatagagtcaattcctattggtttatcacagctgatcacttgattgaaaaactaagaacatgaaaatgtcaagagtggaagatttttctaatcttggttcagcatgaagtggtatttaggtcccttttaagtctaattgcaattttaagatttgttgggttttatgagaggctgttacttagtggccttaaatcttttctgaatgtctgtttcctaagatctgtgatacagttatgtgaatattttgttactgacttgtttcaatggttacttgtataaggattttatatatatgatactatagataaaatcctatttaagacaaattctgttaatcaacaagggctctgtatttttttaagttaaaatattttcatttctcagtaagtagtcagttataatagtgatttatttatgaagaataaactactatagaaagtactttgtgggaacctttattactgtgaaggagaaaaatagctatttcttgacagttctatagttwtacacataaattttcaaaataaagaataccatactacacaatgatctctgattttgctgagggaaggaattatatatgtgccactttttcctcaaatttcagatgccagttttcactttttgaagcattgcatctttttaataaatctatcctgaaagctatataatatatataatttatatcaatgaatttacaataactatcaaattggctatcagaattcactgtaatggaattttgcctctaataacataaagggggaagaaacataaagtggttctcttaataaaactagcagaaaatgttgctttatggcatgtttttgtatcaaagagaaatcagaggttaaactttgcttttatcatgaaaagggcctgatttgaaggtagagataggcttagatgagaaaaattgataacgcaatgttaatactattgatatttcataggtatattttgttagaaattggttttttggtgctaatctataggcacaatagtgaatatgaatgaagagtaggtgctgcaagttaatcctacattgtgccagtgtatattagtaccatgtaaatgaatatgaataaatgaacatgaggattaacgaactgttgaaaataggctgagatactagttttctttcttttttagagggggcatgatattaaagatagttttaagtaacaaattacttattacaaagttacaacatgtggaatcaatagttttatttgttcattaatttattcattcagcaaacatttgttgaacatttaatgtgtaccagatattgccaggatcaggaaataaagaactaaaaatggacattcagactgcaattgctagtacaggggtcaaacaaaatcagtgattagaatttagtgcgttaagttccctgatgccttcacagccagaagaggctgtgaagggataaacacttctgagagtgggtggtagtagaactgagtattcaagactgaatgttaggcaggtagacagtgactggttaagctgagaaacttacaagtattttcgttgagttctgcttccactattatttactttacaatggatatgaagttcagatttcatcttatttactgaaggtggagaaaggatgtggaagtaggggttatgggctctcaaaagtagatttagagagatttttttatcactgttttatgatatagttcactgagcacttacatagattaacagttacaagtttccataaatcagttagaatatgactagcttcagggaaggaattttcaacaactgcaatctttgattgttttactgtgggaacttgcagtgatataattgacaacattatttaacaataataggtaaagtaggccgggtgtggtggctcacgcctgtaatcctagcactttgggaggccgaggtgggtggatcacaaggtcaggagttcgagaccagcctggccaatatggtgaaaccccgtctcttctaaaaaaatacaaaaattagccgggtatggtggcgcatgcctgtagtcccagctactggggaggctgaggcaagagaattgcttgaactcgggaggcggaggtcgcagtgagccgagatcgtgccactgcactccagcctgggtgacagagtgagactttgtctcaaagaaaaaaaaacaataataggtaaagtatttaaggaattctcagatgccttatggacctcttcaaraatgtggttagccaattgattcaacttttataggtttatatgctctcatgtaaacctatttgtttccgagatcagacgagatcgggcgcgttcagggtggtatggccgtagacaacctatttgttaaaaacccttggaaacacatcttttagtagaggttcttatttacttataaagattaataatcaaattactacaattaatatccatttagccttttcagtagtctaaatatttggtaactccctagccatctataacactagttcaaaacaaggctaattcataacctgtcttaaaaatgtttgaagtggtatcaagagcattgtttatgcatgttgtgatactatttgtggaactgtttaatgagctatttcaaactgctagaagaaaatgaaataaaaatggaaaaatactgtcaaa

SEQ ID NO: 4270 - DNA, 3639 bp, Homo sapiens
attttgctcattctttaaaaacctacgaattttaaaaatcaaactttaaaaaactttttgtttttttttttaaaaaaacggcagcgtaatacaatatttggacacgctatactatgggctttgaagaacgcctgtccagaacacccaacaagctccattatgtcaaacgctcccgcgcctctgtgatgtcaccacgacgcgctgggcgctctgcgacttggcagacgtcgtgcgtcattaccaacgaggcgcagkggtcaggacgactctcggcagcgccattgcgcgccctctagtggcagccggttttgaggccggcctccggctttgaagttcctcaccgcgtctccttccctctccccaaagcctggatcaccgcccagcgtcaggcgaggggcgacgtctcgaggtaaaacggaggaggtgcgggacgcggagactgcgcgggcccggtagccctggagaggccgaggctctaggccgcgaggggcgggtgcaatggcggaggaacaggtgaaccgcagcgccggcctggcccccgactgtgaggcctcggcgactgcagaaactacggtttcctcagtggggacctgtgaagccgctgscaagtcaccagagcccaaggactacgacagcacctgcgtgttctgccggatcgcggggcggcaggacccgggcaccgaactcctgcactgcgaggtgggcggcgacgcgcggccggggaatgaggacctaatttgcttcaaagatatcaaaccagcagcaactcatcattatcttgtggtgccaaagaagcatattggaaactgcagaactctaaggaaagatcaagtagaactggttgagaacatggtaactgttggaaaaaccattcttgaaagaaataatttcactgacttcacgaatgtgaggatgggttttcatatgccaccattctgttccatttcccacttgcaccttcatgttctggcaccagtggatcagcttggcttcttatccaagttggtttatagagtcaattcctattggtttatcacagctgatcacttgattgaaaaactaagaacatgaaaatgtcaagagtggaagatttttctaatcttggttcagcatgaagtggtatttaggtcccttttaagtctaattgcaattttaagatttgttgggttttatgagaggctgttacttagtggccttaaatcttttctgaatgtctgtttcctaagatctgtgatacagttatgtgaatattttgttactgacttgtttcaatggttacttgtataaggattttatatatatgatactatagataaaatcctatttaagacaaattctgttaatcaacaagggctctgtatttttttaagttaaaatattttcatttctcagtaagtagtcagttataatagtgatttatttatgaagaataaactactatagaaagtactttgtgggaacctttattactgtgaaggagaaaaatagctatttcttgacagttctatagttwtacacataaattttcaaaataaagaataccatactacacaatgatctctgattttgctgagggaaggaattatatatgtgccactttttcctcaaatttcagatgccagttttcactttttgaagcattgcatctttttaataaatctatcctgaaagctatataatatatataatttatatcaatgaatttacaataactatcaaattggctatcagaattcactgtaatggaattttgcctctaataacataaagggggaagaaacataaagtggttctcttaataaaactagcagaaaatgttgctttatggcatgtttttgtatcaaagagaaatcagaggttaaactttgcttttatcatgaaaagggcctgatttgaaggtagagataggcttagatgagaaaaattgataacgcaatgttaatactattgatatttcataggtatattttgttagaaattggttttttggtgctaatctataggcacaatagtgaatatgaatgaagagtaggtgctgcaagttaatcctacattgtgccagtgtatattagtaccatgtaaatgaatatgaataaatgaacatgaggattaacgaactgttgaaaataggctgagatactagttttctttcttttttagagggggcatgatattaaagatagttttaagtaacaaattacttattacaaagttacaacatgtggaatcaatagttttatttgttcattaatttattcattcagcaaacatttgttgaacatttaatgtgtaccagatattgccaggatcaggaaataaagaactaaaaatggacattcagactgcaattgctagtacaggggtcaaacaaaatcagtgattagaatttagtgcgttaagttccctgatgccttcacagccagaagaggctgtgaagggataaacacttctgagagtgggtggtagtagaactgagtattcaagactgaatgttaggcaggtagacagtgactggttaagctgagaaacttacaagtattttcgttgagttctgcttccactattatttactttacaatggatatgaagttcagatttcatcttatttactgaaggtggagaaaggatgtggaagtaggggttatgggctctcaaaagtagatttagagagatttttttatcactgttttatgatatagttcactgagcacttacatagattaacagttacaagtttccataaatcagttagaatatgactagcttcagggaaggaattttcaacaactgcaatctttgattgttttactgtgggaacttgcagtgatataattgacaacattatttaacaataataggtaaagtaggccgggtgtggtggctcacgcctgtaatcctagcactttgggaggccgaggtgggtggatcacaaggtcaggagttcgagaccagcctggccaatatggtgaaaccccgtctcttctaaaaaaatacaaaaattagccgggtatggtggcgcatgcctgtagtcccagctactggggaggctgaggcaagagaattgcttgaactcgggaggcggaggtcgcagtgagccgagatcgtgccactgcactccagcctgggtgacagagtgagactttgtctcaaagaaaaaaaaacaataataggtaaagtatttaaggaattctcagatgccttatggacctcttcaaraatgtggttagccaattgattcaacttttataggtttatatgctctcatgtaaacctatttgtttccgagatcagacgagatcgggcgcgttcagggtggtatggccgtagacaacctatttgttaaaaacccttggaaacacatcttttagtagaggttcttatttacttataaagattaataatcaaattactacaattaatatccatttagccttttcagtagtctaaatatttggtaactccctagccatctataacactagttcaaaacaaggctaattcataacctgtcttaaaaatgtttgaagtggtatcaagagcattgtttatgcatgttgtgatactatttgtggaactgtttaatgagctatttcaaactgctagaagaaaatgaaataaaaatggaaaaatactgtcaaa

SEQ ID NO: 4271 - DNA, 1405 bp, Homo sapiens
tccgcgcgcacagcaggaccgtcattgacgccatgagcgcgctgctgcggctgctgcgyacgggtgccccagccgctgcgtgcctgcggttggggrccagtgcagggaccgggtcgcgccgtgctatggccctgtaccacactgaggagcgcggccagccctgctcgcagaattaccgcctcttctttaagaatgtaactggtcactacatttccccctttcatgatattcctctgaaggtgaactctaaagaggacactgaggctcaaggcatttttatagacttgtctaagatctgaatggcattcctatgaagaaagcacgaaatgatgaatatgagaatctgtttaatatgattgtagaaatacctcggtggacaaatgctaaaatggagattgccaccaaggagccaatgaatcccattaaacaatatgtaaaggatggaaagctacgctatgtggcgaatatcttcccttacaagggttatatatggaattatggtaccctccctcagacttgggaagatccccatgaaaaagataagagcacgaactgctttggagataatgatcctattgatgtttgcgaaataggctcaaagattctttcttgtggagaagttattcatgtgaagatccttggaattttggctcttattgatgaaggtgaaacagattggaaattaattgctatcaatgcgaatgatcctgaagcytcaaagtttcatgatattgatgatgttaagaagttcaaaccgggttacctggaagctactcttaattggtttagattatataaggtaccagatggaaaaccagaaaaccagtttgcttttaatggagaattcaaaaacaaggcttttgctcttgaagttattaaatccactcatcaatgttggaaagcattgcttatgaagaastgtaatggaggagctataaattgcacaaacgtgcagatatctgatagccctttccgttgcactcaagaggaagcaagatcattagttgaatcggtatcatcttcaccaaataaagaaagtaatgaagaagagcaagtgtggcacttccttggcaagtgattgaaacatctgaaattctgctgtcaagattcccatctctaaggactccaagtgctagagacaagggggtctatgagcattyactgacttcctgttaaaacttcattttttcaaactttttgagctatgcaatatataaataaacagtaagaattttaaattactctcctttggacatttattgatataaaaagaagattttggccaggcacggtggctcatgcctgtaatttcagcactttgggaggccgaggtgggcagatcacaaggtcaggagttcaagaccagcctggccagtatgttgaaaccccatctctattaaaaata

SEQ ID NO: 4272 - DNA, 1364 bp, Homo sapiens
tccgcgcgcacagcaggaccgtcattgacgccatgagcgcgctgctgcggctgctgcgyacgggtgccccagccgctgcgtgcctgcggttggggrccagtgcagggaccgggtcgcgccgtgctatggccctgtaccacactgaggagcgcggccagccctgctcgcagaattaccgcctcttctttaagaatgtaactggtcactacatttccccctttcatgatattcctctgaaggtgaactctaaagaggaaaatggcattcctatgaagaaagcacgaaatgatgaatatgagaatctgtttaatatgattgtagaaatacctcggtggacaaatgctaaaatggagattgccaccaaggagccaatgaatcccattaaacaatatgtaaaggatggaaagctacgctatgtggcgaatatcttcccttacaagggttatatatggaattatggtaccctccctcagacttgggaagatccccatgaaaaagataagagcacgaactgctttggagataatgatcctattgatgtttgcgaaataggctcaaagattctttcttgtggagaagttattcatgtgaagatccttggaattttggctcttattgatgaaggtgaaacagattggaaattaattgctatcaatgcgaatgatcctgaagcytcaaagtttcatgatattgatgatgttaagaagttcaaaccgggttacctggaagctactcttaattggtttagattatataaggtaccagatggaaaaccagaaaaccagtttgcttttaatggagaattcaaaaacaaggcttttgctcttgaagttattaaatccactcatcaatgttggaaagcattgcttatgaagaastgtaatggaggagctataaattgcacaaacgtgcagatatctgatagccctttccgttgcactcaagaggaagcaagatcattagttgaatcggtatcatcttcaccaaataaagaaagtaatgaagaagagcaagtgtggcacttccttggcaagtgattgaaacatctgaaattctgctgtcaagattcccatctctaaggactccaagtgctagagacaagggggtctatgagcattyactgacttcctgttaaaacttcattttttcaaactttttgagctatgcaatatataaataaacagtaagaattttaaattactctcctttggacatttattgatataaaaagaagattttggccaggcacggtggctcatgcctgtaatttcagcactttgggaggccgaggtgggcagatcacaaggtcaggagttcaagaccagcctggccagtatgttgaaaccccatctctattaaaaata

SEQ ID NO: 4273 - DNA, 1834 bp, Homo sapiens
atgagcgcgctgctgcggctgctgcgyacgggtgccccagccgctgcgtgcctgcggttggggrccagtgcagggaccgggtcgcgccgtgctatggccctgtaccacactgaggagcgcggccagccctgctcgcagaattaccgcctcttctttacggtagycgcgcggtccaggccaccttacttcccgcgggagcgcgcaccgagtcacgagaactgccagcgaggaggcggcggatcaagaccccaaagcggagagcagaggcgcagggctgccggctggggggtagatagcgccctgtgccctgccagccgccctccccgaggggtaggcagagtgcaagcggccaccccgcggcggcctgcagccattagccggcccggccgccgttcccggttcacacaactcagtgaggaagggaaggcagagcccgcccacacgccggccttcctagaggcgtaagaaacctcctactgcgggagctccctgacgtcggagaggcaggcggaactttgcggatgcctaatccagcgcgtcttctttttttggagggactctgatgaaggttctttccccagaagcttgacttgagaatgtaactggtcactacatttccccctttcatgatattcctctgaaggtgaactctaaagaggaaaatggcattcctatgaagaaagcacgaaatgatgaatatgagaatctgtttaatatgattgtagaaatacctcggtggacaaatgctaaaatggagattgccaccaaggagccaatgaatcccattaaacaatatgtaaaggatggaaagctacgctatgtggcgaatatcttcccttacaagggttatatatggaattatggtaccctccctcagacttgggaagatccccatgaaaaagataagagcacgaactgctttggagataatgatcctattgatgtttgcgaaataggctcaaagattctttcttgtggagaagttattcatgtgaagatccttggaattttggctcttattgatgaaggtgaaacagattggaaattaattgctatcaatgcgaatgatcctgaagcytcaaagtttcatgatattgatgatgttaagaagttcaaaccgggttacctggaagctactcttaattggtttagattatataaggtaccagatggaaaaccagaaaaccagtttgcttttaatggagaattcaaaaacaaggcttttgctcttgaagttattaaatccactcatcaatgttggaaagcattgcttatgaagaastgtaatggaggagctataaattgcacaaacgtgcagatatctgatagccctttccgttgcactcaagaggaagcaagatcattagttgaatcggtatcatcttcaccaaataaagaaagtaatgaagaagacagggtctcactcctgccacccagactgtagtgcagtggtgatcatggctcactgcagcctcggcttcctgarctcaggtgatcttctccctcagcctcacaagtagctggaactacagatactgcaacatggaagtggagtcaatacatactaatatagtggccaggcacacaggagccgtcacttgtagcatgtgagcacataaacaatttcaagtttatggtataactgaggccatgtggttacagacactctgactgctcctaattaatggctaaactgtacaattcagataatgaaatcatctcaagttattcacattagcaaatacaacttcttatcgcatgactgccaaacaggcattttgatgcccattttataaatgtaaaagtgcacgctgaactctcttcctttcaacca

SEQ ID NO: 4274 - DNA, 828 bp, Homo sapiens
gcgctgctgcggctgctgcgyacgggtgccccagccgctgcgtgcctgcggttggggrccagtgcagggaccgggtcgcgccgtgctatggccctgtaccacactgaggagcgcggccagccctgctcgcagaattaccgcctcttctttaatattgatgatgttaagaagttcaaaccgggttacctggaagctactcttaattggtttagattatataaggtaccagatggaaaaccagaaaaccagtttgcttttaatggagaattcaaaaacaaggcttttgctcttgaagttattaaatccactcatcaatgttggaaagcattgcttatgaagaastgtaatggaggagctataaattgcacaaacgtgcagatatctgatagccctttccgttgcactcaagaggaagcaagatcattagttgaatcggtatcatcttcaccaaataaagaaagtaatgaagaagagcaagtgtggcacttccttggcaagtgattgaaacatctgaaattctgctgtcaagattcccatctctaaggactccaagtgctagagacaagggggtctatgagcattyactgacttcctgttaaaacttcattttttcaaactttttgagctatgcaatatataaataaacagtaagaattttaaattactctcctttggacatttattgatataaaaagaagattttggccaggcacggtggctcatgcctgtaatttcagcactttgggaggccgaggtgggcagatcacaaggtcaggagttcaagaccagcctggccagtatgttgaaaccccatctctattaaaaata

SEQ ID NO: 4275 - DNA, 1277 bp, Homo sapiens
tccgcgcgcacagcaggaccgtcattgacgccatgagcgcgctgctgcggctgctgcgyacgggtgccccagccgctgcgtgcctgcggttggggrccagtgcagggaccgggtcgcgccgtgctatggccctgtaccacactgaggagcgcggccagccctgctcgcagaattaccgcctcttctttaagaatgtaactggtcactacatttccccctttcatgatattcctctgaaggtgaactctaaagaggaaaatggcattcctatgaagaaagcacgaaatgatgaatatgagaatctgtttaatatgattgtagaaatacctcggtggacaaatgctaaaatggagattgccaccaaggagccaatgaatcccattaaacaatatgtaaaggatggaaagctacgctatgtggcgaatatcttcccttacaagggttatatatggaattatggtaccctccctcagattctttcttgtggagaagttattcatgtgaagatccttggaattttggctcttattgatgaaggtgaaacagattggaaattaattgctatcaatgcgaatgatcctgaagcytcaaagtttcatgatattgatgatgttaagaagttcaaaccgggttacctggaagctactcttaattggtttagattatataaggtaccagatggaaaaccagaaaaccagtttgcttttaatggagaattcaaaaacaaggcttttgctcttgaagttattaaatccactcatcaatgttggaaagcattgcttatgaagaastgtaatggaggagctataaattgcacaaacgtgcagatatctgatagccctttccgttgcactcaagaggaagcaagatcattagttgaatcggtatcatcttcaccaaataaagaaagtaatgaagaagagcaagtgtggcacttccttggcaagtgattgaaacatctgaaattctgctgtcaagattcccatctctaaggactccaagtgctagagacaagggggtctatgagcattyactgacttcctgttaaaacttcattttttcaaactttttgagctatgcaatatataaataaacagtaagaattttaaattactctcctttggacatttattgatataaaaagaagattttggccaggcacggtggctcatgcctgtaatttcagcactttgggaggccgaggtgggcagatcacaaggtcaggagttcaagaccagcctggccagtatgttgaaaccccatctctattaaaaata

SEQ ID NO: 4276 - DNA, 2327 bp, Homo sapiens
agcagtakctgctgccacagtagctgactggtcaccctgccacccagtgctcacaccctctggccagtgcctggctatggcccgactgctcaggtctgcaacctgggagctgttcccctggaggggctactgctcccagaaggcaaagggagagctctgcagggacttcgtagaggctctgaaggccgtggtgggcggctcccacgtgtccactgccgcggtggtccgagagcagcacgggcgcgatgagtcggtgcacaggtgcgaacctcctgatgctgtggtgtggccccagaacgtggagcaggtcagccggctggcagccctgtgctatcgccaagggcggcgtctgcgttaacctgacgcatatggaccgaatcctggagctgaaccaggaggacttctctgtggtggtggagccaggtgtcacccgcaaagccctcaacgcccacctgcgggacagcggcctctggtttcccgtggacccrggcgcggacgcctctctctgtggcatggcggccaccggggcgtcggggaccaacgcggtccgctacggcaccatgcgggacaacgtgctcaacctggaggtggtgctgcccgacgggcggctgctgcacacggcgggccgaggccggcatttccggtgagygccctctgcsgggggcccgggctctggccctgrgcactgctggcgggctgccctgcagagaccgggctgtgaaaagcacctcctggcggccccctggtttggcaggctaggcttcctcaggctctgaagccctgtcagctgggccaaagtggatgggaccagggtttgctctccctgcctgaggccgactggctttgtggagcagaaagcactgggccagggaaactgggcccgagggaggccagcccagacctcagtgcctggggtcggtgtcttgggttccagcttcggcttctggccagaaatccctcatcacacagcctggtactcaccttgtgtgtccctgggacgtargaagagtgcagccggctacaacctcacggggctcttcgtgggctccgaggggacgctgggcctcatcacagccaccaccctgcgcctgcaccctgcccctgaggccacagtggccgccacgtgtgcgttccccagtgtccaggctgctgtggacagcactgtacacatyctccaggctgcagtgcccgtagcccgcattgagttcctggatgaagtcatgatggatgcctgcaacaggtacagcaagctgaattgcttagtggcgcccacactcttcctggagttccatggctcccagcaggcactggaggagcagctgcagcgcacagaggagatagtccagcagaacggagcctctgacttctcctgggccaaggaggccgaggagcgcagccggctttggacagcacggcacaatgcctggtacgcagccctggccacgcggccaggctgcaagggctactccacggatgtgtgtgtgcccatctcccggctgccggagatcgtggtgcagaccaaggaggatctgaatgcctcaggactcacaggaagcattgtcgggcatgtgggtgacggcaacttccactgcatcctgctggtcaaccctgatgacgccgaggaactgggcagsgtcaaggcttttgcagaacagctgggcaggcgggcactggctctccacggaacgtgcacgggggagcatggcatcggaatgggcaagcggcagctgctgcaggaggaggtgggcgccgtgggcgtggagaccatgcggcagctcaaggccgtgctagacccccaaggyctcatgaatccaggcaaagtgctgtgaagggggtctgagcacttagcccacaagttccctgactacggagccggttctggaacttttcttcatgccacggcccctgcaaggaaatagatgctgaggcagtcttcctgccagcgagcccactgtatctgggcccaaggccagagggcccagagagaagcctgagcaccgtgttacctccctggccctctggctggccccaggagcctttggttcagtaaacgacccagggtggttcccagcaaagctgcttcctctctgctcctacgcatcctgtcctggcgggaagagagcgtctgggtccattcaagactctgatgacacccctccccgaggcctcccactgccggggtcccaggacccttcccccttcacctggtgacaggaacactcctttcctggtatggaacgtgagctcccgtgacatgatgataggtcttctccttggggcctcccccaataaatctgtaataaacctgaaacccacctacagctacc

SEQ ID NO: 4277 - DNA, 2062 bp, Homo sapiens
agcagtakctgctgccacagtagctgactggtcaccctgccacccagtgctcacaccctctggccagtgcctggctatggcccgactgctcaggtctgcaacctgggagctgttcccctggaggggctactgctcccagaaggcaaagggagagctctgcagggacttcgtagaggctctgaaggccgtggtgggcggctcccacgtgtccactgccgcggtggtccgagagcagcacgggcgcgatgagtcggtgcacaggtgcgaacctcctgatgctgtggtgtggccccagaacgtggagcaggtcagccggctggcagccctgtgctatcgccaaggtgtgcccatcatcccattcggcaccggcaccgggcttgagggtggcgtctgtgctgtgcagggcggcgtctgcgttaacctgacgcatatggaccgaatcctggagctgaaccaggaggacttctctgtggtggtggagccaggtgtcacccgcaaagccctcaacgcccacctgcgggacagcggcctctggtttcccgtggacccrggcgcggacgcctctctctgtggcatggcggccaccggggcgtcggggaccaacgcggtccgctacggcaccatgcgggacaacgtgctcaacctggaggtggtgctgcccgacgggcggctgctgcacacggcgggccgaggccggcatttccgraagagtgcagccggctacaacctcacggggctcttcgtgggctccgaggggacgctgggcctcatcacagccaccaccctgcgcctgcaccctgcccctgaggccacagtggccgccacgtgtgcgttccccagtgtccaggctgctgtggacagcactgtacacatyctccaggctgcagtgcccgtagcccgcattgagttcctggatgaagtcatgatggatgcctgcaacaggtacagcaagctgaattgcttagtggcgcccacactcttcctggagttccatggctcccagcaggcactggaggagcagctgcagcgcacagaggagatagtccagcagaacggagcctctgacttctcctgggccaaggaggccgaggagcgcagccggctttggacagcacggcacaatgcctggtacgcagccctggccacgcggccaggctgcaaggcaggggtaactcataggcttccctctgaccagggctactccacggatgtgtgtgtgcccatctcccggctgccggagatcgtggtgcagaccaaggaggatctgaatgcctcaggactcacaggaagcattgtcgggcatgtgggtgacggcaacttccactgcatcctgctggtcaaccctgatgacgccgaggaactgggcagsgtcaaggcttttgcagaacagctgggcaggcgggcactggctctccacggaacgtgcacgggggagcatggcatcggaatgggcaagcggcagctgctgcaggaggaggtgggcgccgtgggcgtggagaccatgcggcagctcaaggccgtgctagacccccaaggyctcatgaatccaggcaaagtgctgtgaagggggtctgagcacttagcccacaagttccctgactacggagccggttctggaacttttcttcatgccacggcccctgcaaggaaatagatgctgaggcagtcttcctgccagcgagcccactgtatctgggcccaaggccagagggcccagagagaagcctgagcaccgtgttacctccctggccctctggctggccccaggagcctttggttcagtaaacgacccagggtggttcccagcaaagctgcttcctctctgctcctacgcatcctgtcctggcgggaagagagcgtctgggtccattcaagactctgatgacacccctccccgaggcctcccactgccggggtcccaggacccttcccccttcacctggtgacaggaacactcctttcctggtatggaacgtgagctcccgtgacatgatgataggtcttctccttggggcctcccccaataaatctgtaataaacctgaaacccacctacagctacc

SEQ ID NO: 4278 - DNA, 2098 bp, Homo sapiens
agcagtakctgctgccacagtagctgactggtcaccctgccacccagtgctcacaccctctggccagtgcctggctatggcccgactgctcaggtctgcaacctgggagctgttcccctggaggggctactgctcccagaaggcaaagggagagctctgcagggacttcgtagaggctctgaaggccgtggtgggcggctcccacgtgtccactgccgcggtggtccgagagcagcacgggcgcgatgagtcggtgcacaggtgcgaacctcctgatgctgtggtgtggccccagaacgtggagcaggtcagccggctggcagccctgtgctatcgccaaggtgtgcccatcatcccattcggcaccggcaccgggcttgagggtggcgtctgtgctgtgcagggcggcgtctgcgttaacctgacgcatatggaccgaatcctggagctgaaccaggaggacttctctgtggtggtggagccaggtgtcacccgcaaagccctcaacgcccacctgcgggacagcggcctctggtttcccgtggacccrggcgcggacgcctctctctgtggcatggcggccaccggggcgtcggggaccaacgcggtccgctacggcaccatgcgggacaacgtgctcaacctggaggtggtgctgcccgacgggcggctgctgcacacggcgggccgaggccggcatttccgcttcggcttctggccagaaatccctcatcacacagcctggtactcaccttgtgtgtccctgggacgtargaagagtgcagccggctacaacctcacggggctcttcgtgggctccgaggggacgctgggcctcatcacagccaccaccctgcgcctgcaccctgcccctgaggccacagtggccgccacgtgtgcgttccccagtgtccaggctgctgtggacagcactgtacacatyctccaggctgcagtgcccgtagcccgcattgagttcctggatgaagtcatgatggatgcctgcaacaggtacagcaagctgaattgcttagtggcgcccacactcttcctggagttccatggctcccagcaggcactggaggagcagctgcagcgcacagaggagatagtccagcagaacggagcctctgacttctcctgggccaaggaggccgaggagcgcagccggctttggacagcacggcacaatgcctggtacgcagccctggccacgcggccaggctgcaagggctactccacggatgtgtgtgtgcccatctcccggctgccggagatcgtggtgcagaccaaggaggatctgaatgcctcaggactcacaggaagcattgtcgggcatgtgggtgacggcaacttccactgcatcctgctggtcaaccctgatgacgccgaggaactgggcagsgtcaaggcttttgcagaacagctgggcaggcgggcactggctctccacggaacgtgcacgggggagcatggcatcggaatgggcaagcggcagctgctgcaggaggaggtgggcgccgtgggcgtggagaccatgcggcagctcaaggccgtgctagacccccaaggyctcatgaatccaggcaaagtgctgtgaagggggtctgagcacttagcccacaagttccctgactacggagccggttctggaacttttcttcatgccacggcccctgcaaggaaatagatgctgaggcagtcttcctgccagcgagcccactgtatctgggcccaaggccagagggcccagagagaagcctgagcaccgtgttacctccctggccctctggctggccccaggagcctttggttcagtaaacgacccagggtggttcccagcaaagctgcttcctctctgctcctacgcatcctgtcctggcgggaagagagcgtctgggtccattcaagactctgatgacacccctccccgaggcctcccactgccggggtcccaggacccttcccccttcacctggtgacaggaacactcctttcctggtatggaacgtgagctcccgtgacatgatgataggtcttctccttggggcctcccccaataaatctgtaataaacctgaaacccacctacagctacc

SEQ ID NO: 4279 - DNA, 2145 bp, Homo sapiens
cgctcagggtggcagcagagcagacgccgggctgcgcgctgggagctgcggtctccggccatggcccccgctccgccccccgccgcctccttctcgccctccgaggtccagcggcgcctggcggccggcgcgtgctgggtccgccgcggggcccgcctctacgacctctccagcttcgtgcggcaccacccggggggcgagcagctgctgcgggccagggcgggccaggacatcagcgccgacctggacgggccgccgcacaggcactcggccaacgcgcgccgctggytggagcagtactacgtgggagagctccgcggggagcagcagggctccatggagaacgagsctgtagcccttgaggaaactcagaagacagatcctgctatggaaccacggttcaaagtggtggattgggacaaggacctggtggactggcgaaagcctctcctgtggcaggtgggccacttgggagagaagtacgatgagtgggttcaccagccggtgaccaggcccatccgcctcttccactcagacctcattgagggcctctctaagactgtctggtacagtgtccccatcatctgggtgcccctggtgctgtatctcagctggtcctactaccgaacctttgcccagggcaacgtccgactcttcacgtcatttacaacagagtacacggtggcagtgcccaagtccatgttccccgggctcttcatgctggggacattcctctggagcctcatcgagtacctcatccaccgcttcctgttccacatgaagccccccagcgacagctattacctcatcatgctgcacttcgtcatgcacggccagcaccacaaggcacccttcgacggctcccgcctggtcttcccccctgtgccagcctccctggtgatcggcgtcttctacttgtgcatgcagctcatcctgccygaggcagtrgggggcactgtgtttgcggggggcctcctgggctacgtcctctaygacatgacccattactacctgcactttggctcgccgcacaagggctcctacctgtacagcctgaaggcccaccacgtcaagcaccactttgcacatcagaagtcaggagggtcacatccacttggtggccaggtggcccttggtgacccacttcttcctggagcgtccctgcctagagctcagcccacaggactgcttcaggccgtggccacaggtagcagccgcaaggggaaatgaagaaaactgagccctcgtggccacctgtgtcacccttgtgccttagcctcatgggctgcctaggagctgcctgcacggcacagctcgctttcacagtcagaagtgggtctgtgggatctgtggtccctgtcctccctgctgtcccttctggggaggctttggtggctctgaggtggacaaagagctctcgcaagaagagacagcgtgatgcctcccacagtccaccccagaccctggggcagcccctctggccctgccagctgcctgcgtcgttgggcccagggtggctggcaggagtcccagctgcttgctttaggacctggcagcttttcttgccgtccctcccctgcctccagaatcacagcccttctccccaagggaggctgaggaggcttctccaccagtggcagccccaccccgtccctggccattcttggcctccaccccgctcaggcccctactcgggcgctcccagaaggagccacctctcagtgcctcacctccccctgcctcccagcctccgcagatgaggttcctgccccttcctcctcgtaaccaaaaccctcactgctcccaggacggtcttatttataaaccagatacatgttcttagtctggtcccagaccaaggagctggtcagacggccctttctaatcctacatgttgagcttatgtaaaaaatgttgtttcctcctgtttttggttcctttcttacccacaaaccattactacttgaaacttaaaaaastcgccaagtgtaaaggctaaagagaagcagtttgacggaccttgtgatttgtactgtttgctgcggagctatttaaagattttggaataaatatacaaaactacggttgtgaaataaaaacttaaattgtatattttgaaaaataaaacmctgaaaagaaaccaac

SEQ ID NO: 4280 - DNA, 2413 bp, Homo sapiens
cgctcagggtggcagcagagcagacgccgggctgcgcgctgggagctgcggtctccggccatggcccccgctccgccccccgccgcctccttctcgccctccgaggtccagcggcgcctggcggccggcgcgtgctgggtccgccgcggggcccgcctctacgacctctccagcttcgtgcggcaccacccggggggcgagcagctgctgcgggccagggcgggccaggacatcagcgccgacctggacgggccgccgcacaggcactcggccaacgcgcgccgctggytggagcagtactacgtgggagagctccgcggggagcagcagggctccatggagaacgagsctgtagcccttgaggaaactcagaagacagatcctgctatggaaccacggttcaaagtggtggattgggacaaggacctggtggactggcgaaagcctctcctgtggcaggtgggccacttgggagagaagtacgatgagtgggttcaccagccggtgaccaggcccatccgcctcttccactcagacctcattgagggcctctctaagactgtctggtacagtgtccccatcatctgggtgcccctggtgctgtatctcagctggtcctactaccgaacctttgcccagggcaacgtccgactcttcacgtcatttacaacagagtacacggtggcagtgcccaagtccatgttccccgggctcttcatgctggggacattcctctggagcctcatcgagtacctcatccaccgcttcctgttccacatgaagccccccagcgacagctattacctcatcatgctgcacttcgtcatgcacggccagcaccacaaggcacccttcgacggctcccgcctggtcttcccccctgtgccagcctccctggtgatcggcgtcttctacttgtgcatgcagctcatcctgccygaggcagtrgggggcactgtgtttgcggggggcctcctgggctacgtcctctaygacatgacccattactacctgcactttggctcgccgcacaagggctcctacctgtacagcctgaaggcccaccacgtcaagcaccactttgcacatcagaagtcaggatttggtatcagcactaaattgtgggattactgtttccacaccctcactccagagaaaccccacctgaagacgcagtgacaactcccaccccctccgtcctgccctcagcccggccctggccccttcccgacccccacccgccattcagaccccattaagaaggttggcttggccaggcaggatgggctgtgtccggccctgcagcctagtggaaggtgctgagggggccctgaggcaggaccgccctcctgacccctggtaggagggtcacatccacttggtggccaggtggcccttggtgacccacttcttcctggagcgtccctgcctagagctcagcccacaggactgcttcaggccgtggccacaggtagcagccgcaaggggaaatgaagaaaactgagccctcgtggccacctgtgtcacccttgtgccttagcctcatgggctgcctaggagctgcctgcacggcacagctcgctttcacagtcagaagtgggtctgtgggatctgtggtccctgtcctccctgctgtcccttctggggaggctttggtggctctgaggtggacaaagagctctcgcaagaagagacagcgtgatgcctcccacagtccaccccagaccctggggcagcccctctggccctgccagctgcctgcgtcgttgggcccagggtggctggcaggagtcccagctgcttgctttaggacctggcagcttttcttgccgtccctcccctgcctccagaatcacagcccttctccccaagggaggctgaggaggcttctccaccagtggcagccccaccccgtccctggccattcttggcctccaccccgctcaggcccctactcgggcgctcccagaaggagccacctctcagtgcctcacctccccctgcctcccagcctccgcagatgaggttcctgccccttcctcctcgtaaccaaaaccctcactgctcccaggacggtcttatttataaaccagatacatgttcttagtctggtcccagaccaaggagctggtcagacggccctttctaatcctacatgttgagcttatgtaaaaaatgttgtttcctcctgtttttggttcctttcttacccacaaaccattactacttgaaacttaaaaaastcgccaagtgtaaaggctaaagagaagcagtttgacggaccttgtgatttgtactgtttgctgcggagctatttaaagattttggaataaatatacaaaactacggttgtgaaataaaaacttaaattgtatattttgaaaaataaaacmctgaaaagaaaccaacaaaa

SEQ ID NO: 4281 - DNA, 810 bp, Homo sapiens
gccggaagtgacgcagggcagcggcgtcgcgggggcggggctcgggaaagacccgtgccagcgggcgtgtggccgcgggtttcgcacggtccaataagggagggcggcgtggcccggcctggtagcgacgaggacgcgcctgcgcagaggcggcagcaccaccggggttgactccgggggcgcggcgaggagagacatgaggctgagctggttccrggtcctgacagtactgtccatctgcctgagcgccgtggccrcggccacgggggccgagggcaaaaggaagctgcagatcggggtcaagaagcgggtggaccactgtcccatcaaatcgcgcaaaggggatgtcctgcacatgcactacacggggaagctggaagatgggacagagtttgacagcagcctgccccagaaccagccctttgtcttctcccttggcacaggccaggtcatcaagggctgggaccaggggctgctggggatgtgtgagggggaaaagcgcaagctggtgatcccatccgagctagggtatggagagcggggagctcccccaaagattccaggyggtgcaaccctggtgttcgaggtggagctgctcaaaatagagcgacgaactgagctgtaaccagactggggaggggcagggggagaggcccccatcagggaccagactgttccaraaaaaaaacaaaaaacaaaaacaaacaaaaaaacacttaaaagcccaaggagtaagcctgtgtgtgtttgtgggccctgagagactcagagacctcagctccagcataccccaccaccttctcctttccc

SEQ ID NO: 4282 - DNA, 1084 bp, Homo sapiens
gtggtgtgggtggagcgggctcggcggccagcagacacagggccagtctgggtgccccggagacccccaagggctcagagttggggcggcgccccgggcggaagcacagggccaggctggggggtatctcccgaggacccgggctcctcggagccacccagtggggatgtgtgggtgcctcggggccggccccctgcagcggccgcagaggtgttggtgtgctggaccgggggcagctgggtgtggcgtgagtggggccgcccagtcggggcaactgcagtgcagccagatagggtctggactttgcgtaaagggacaggcgggaactgaagagcggaggtggggactgggagggagggaaggtatgggggtgagcaaaggggcgggtccctggctgctgtggcctcccctgaccccctccccccgctgctggggtcctcggccaagcccccttctcactggactgagacatgaggctgagctggttccrggtcctgacagtactgtccatctgcctgagcgccgtggccrcggccacgggggccgagggcaaaaggaagctgcagatcggggtcaagaagcgggtggaccactgtcccatcaaatcgcgcaaaggggatgtcctgcacatgcactacacggggaagctggaagatgggacagagtttgacagcagcctgccccagaaccagccctttgtcttctcccttggcacaggccaggtcatcaagggctgggaccaggggctgctggggatgtgtgagggggaaaagcgcaagctggtgatcccatccgagctagggtatggagagcggggagctcccccaaagattccaggyggtgcaaccctggtgttcgaggtggagctgctcaaaatagagcgacgaactgagctgtaaccagactggggaggggcagggggagaggcccccatcagggaccagactgttccaraaaaaaaacaaaaaacaaaaacaaacaaaaaaacacttaaaagcccaaggagtaagcctgtgtgtgtttgtgggccctgagagactcagagacctcagctccagcataccccaccaccttctcctttccc

SEQ ID NO: 4283 - DNA, 4330 bp, Homo sapiens
cggtccgggacagactggcgggcgggcgggcactgacgccgcggggccggagcgggccgcgcggtgggagcagcggcgccgtcggtccccgtcagggctccgtgggtccccgacccgcccctggccgggccatggcgggcgcccagcccggcgtccacgcgctgcagttggagccgcccaccgtggtggagaccctgcggcgcgggagtaagttcatcaaatgggacgaggagacctccagtcggaacctggtgaccctgcgtgtggaccccaatggcttcttcttgtactggacgggccccaacatggaggtggacacactggacatcagttccatcagggacacacggacaggccggtacgcccgcctgcccaaggaccccaagatccgggaagttctgggctttgggggtcccgatgcccggctggaggagaagctgatgacggtggtgtctgggccagacccrgtgaacacagtgttcttgaacttcatggccgtgcaggatgacacagccaaggtctggtctgaggagctattcaagctggctatgaacatcctggctcagaacgcctcccggaacaccttcctgcgcaaagcatacacgaagctgaagctgcaggtgaaccaggatggtcggatccccgtcaagaacatcctgaagatgttctcagcagacaagaagcgggtggagactgcgctggaatcctgtggcctcaaattcaaccggagtgagtccatccggcctgatgagttttccttggaaatctttgagcggttcctgaacaagctgtgtctgcggccggayattgacaagatcctgctggagataggcgccaagggcaagccatacctgacgctggagcagctcatggacttcatcaaccrgaagcaacgcgacccgagactcaacgaagtgctgtacccgcccctgcggccctcccaggcccggctrctcatcgaaaagtatgagcccaaccagcagtttctggagcgagaccagatgtccatggagggctttagccgctacctgggaggcgaggagaatggcatcctgcccctggaagccctggatctgagcacggacatgacccagccactgagtgcctacttcatcaactcctcgcataacacctatctcactgcggggcagctggctgggacctcgtcggtggagatgtaccgccaggcactactatggggctgccgctgcgtggagctggacgtgtggaagggacggccgcctgaggaggaacccttcattacccacggcttcaccatgaccacagaggtgcctctgcgcgacgtgctggaggccattgccgagactgccttcaagacctcrccctaccccgtcatcctctccttcgagaaccatgtggactcggcaaagcaacaggcaaagatggctgagtactgccgctccatctttggagacgcgctactcatcgagcctctggacaagtacccgctggccccaggcgttcccctgcccagcccccaggacctgatgggccgtatcctggtgaagaacaagaagcggcaccgacccagcgcaggtggcccagacagcgccgggcgcaagcggcccctggagcagagcaattctgccctgagcgagagctccgcggccaccgagccctcctccccgcagctggggtctcccagctctgacagctgcccaggcctgagcaatggggaggaggtagggcttgagaagcccagcctggagcctcagaagtctctgggtgacgagggcctgaaccgaggcccctatgttcttggacctgctgaccgtgaggatgaggaggaagatgaggaagaggaggaacagacagaccccaaaaagccaactacagatgagggcacagccagcagcgaggtgaatgccactgaggagatgtccacgcttgtcaactacatcgaacctgtcaagttcaagtcctttgaggctgctcgaaagaggaacaaatgcttcgagatgtcgtcctttgtggagaccaaggccatggagcaactgaccaagagccccatggagtttgtggaatacaacaagcagcagctcagccgcatctaccccaagggcacccgcgtggactcctccaactacatgccccagctcttctggaacgtagggtgccagcttgttgcgctcaacttccagaccctcgatgtggcgatgcagctcaacgcgggcgtttttgagtacaacgggcgcagcgggtacctgctcaagccggagttcatgcggcggccggacaagtccttcgaccccttcactgaggtcatcgtggatggcatcgtggccaatgccttgcgggtcaaggtgatctcagggcagttcctgtccgacaggaaggtgggcatctacgtggaggtggacatgtttggcctccctgttgatacgcggcgcaagtaccgcacccggacctctcaggggaactcgttcaaccccgtgtgggacgaagagcccttcgacttccccaaggtggtgctgcccacgctggcttcacttcgcattgcagcctttgaggaggggggtaaattcgtagggcaccggatcctgcctgtctctgccatccgctccggataccactacgtctgcctgcggaacgaggccaaccaaccgctgtgcctgccggccctgctcatctacaccgaagcctyggactacattcctgacgaccaccaggactatgcggaggccctgatcaaccccattaagcacgtcagcctgatggaccagagggcccggcagctggccgccctcattggggagagtgaggctcaggctggccaagagacgtgccaggacacccagtctcagcagctggggtctcagccgtcctcaaaccccacccccagcccactggatgcctccccccgccggccccctggccccaccacctcccctgccagcacctccctcagcagcccagggcagcgtgatgatctcatcgccagcatcctctcagaggtggcccccaccccgctggatgagctccgaggtcacaaggctctggtcaagctccggagccggcaagagcgagacctgcgggagctgcgcaagaagcatcagcggaaggcagtcaccctcacccgccgcctgctggatggcctggctcaggcacaggctgagggcaggtgccggctgcggccaggtgccctaggtggggccgctgatgtggaggacacgaaggagggggaggacgaggcaaagcggtatcaggagttccagaacagacaggtgcagagcctgctggarctgcgggaggcccaggtggacgcagaggcccagcggaggctggaacacctgagacaggctctgcagcggctcagggaggtcgtccttgatgcaaacacaactcagttcaagaggctgaaagagatgaacgagagggagaagaaggagctgcagaagatcctggacagaaagcgccataacagcatctcggaggccaagatgagggacaagcataagaaggaggcggaactgacggagattaaccgtcggcacatcactgagtcagtcaactccatccgtcggctggaggaggcccagaagcagcggcatgaccgtcttgtggctgggcagcagcaggtcctgcaacagctggcagaagaggagcccaagctgctggcccagctggcccaggagtgtcaggagcagcgggcraggctcccccaggagatccgccggagcctgctgggcgagatgccggaggggctgggggacgggcctctggtggcctgtgccagcaacggtcacgcacccgggagcagcgggcacctgtcgggcgctgactcggagagccaggaggagaacacgcagctctgaactggctgagcgaggtggccacagggccagggcgggcgctgggtggagggcaggaggcaatgacactaatgctttttttttttttttttaactttttatctagaaattttatttttttaaacccggggcaagtacctcagctaactcccttcatcctcctggggcccctccttcctgccctcagtcttaggttagggccttggtcagggctttgctccctgtgacacccacaccctcgagctagcagcgtctcctcccttccccgggagagctggctggagacttggagctccgggaagtaggagtcacatttttttctctattctttggggattttttttacatgaataaaagtggatttcagggaccctgtgtgcagtgtgatttggggtgacaggactctgggccctaagtttcctcatctataaaatggactttgggcatttggtggggttgaggtcacgcctccagccaagggctgctgggttgaacct

SEQ ID NO: 4284 - DNA, 2317 bp, Homo sapiens
gcgctcacctccctgcggcctcctgaggtggtttggtggccccctcctcgcgagttggtgccgctgcaactccgattccgagctttcggcacctctgccgggtggtaccgagccttcccggcgccccctcctctcctcccaccggcctgcccttccccgcgggactatcgcccccacgtttccctcagcccttttctctcccggccgagccgcggcggcagcagcagcagcagcagcagcaggaggaggagcccggtggcggcggtggccggggagcccatggcgtacagtcaaggaggcggcaaaaaaaaagtctgctactactacgacggtgatattggaaattattattatggacagggtcatcccatgaagcctcatagaatccgcatgacccataacttgctgttaaattatggcttatacagaaaaatggaaatatataggccccataaagccactgccgaagaaatgacaaaatatcacagtgatgagtatatcaaatttctacggtcaataagaccagataacatgtctgagtatagtaagcagatgcagagatttaatgttggagaagattgtccagtgtttgatggactctttgagttttgtcagctctcaactggcggttcagttgctggagctgtgaagttaaaccgacaacagactgatatggctgttaattgggctggaggattacatcatgctaagaaatcagaagcatcaggattctgttacgttaatgatattgtgcttgccatccttgaattactaaagtatcatcagagagtcttatatattgatatagatattcatcatggtgatggtgttgaagaagctttttatacaacagatcgtgtaatgacggtatcattccataaatatggggaatactttcctggcacaggagacttgagggatattggtgctggaaaaggcaaatactatgctgtcaattttccaatgwgwgatggtatagatgatgagtcatatgggcagatatttaagcctattatctcaaaggtgatggagatgtatcaacctagtgctgtggtattacagtgtggtgcagactcattatctggtgatagactgggttgtttcaatctaacagtcaaaggtcatgctaaatgtgtagaagttgtaaaaacttttaacttaccattactgatgcttggaggaggtggctacacaatccgtaatgttgctcgatgttggacatatgagactgcagttgcccttgattgtgagattcccaatgagttgccatataatgattactttgagtattttggaccagacttcaaactgcatattagtccttcaaacatgacaaaccagaacactccagaatatatggaaaagataaaacagcgtttgtttgaaaatttgcgcatgttacctcatgcacctggtgtccagatgcaagctattccagaagatgctgttcatgaagacagtggagatgaagatggagaagatccagacaagagaatttctattcgagcatcagacaagcggatagcttgtgatgaagaattctcagattctgaggatgaaggagaaggaggtcgaagaaatgtggctgatcataagaaaggagcaaagaaagctagaattgaagaagataagaaagaaacagaggacaaaaaaacagacgttaaggaagaagataaatccaaggacaacagtggtgaaaaaacagataccaaaggaaccaaatcagaacagctcagcaacccctgaatttgacagtctcaccaatttcagaaaatcattaaaaagaaaatattgaaaggaaaatgttttctttttgaagacttctggcttcattttatactactttggcatggactgtatttattttcaaatggctttttcgtttttgtttttcttggcaagttttattgtgagtttttctaattatgaagcaaaatttcttttctccaccakgctttatgtgatagtatttaaaattgatgtgagttattatgtcaaaaaaactgatctattaaagaagtaattggcctttctgagctgatttttccatcttttgtaattatctttattaaaaaattgtacttggattatcttttgtctgtttattactacaatrtgaagtcttgtttcagtggctaatgacatcatttctgtagacttacaatacactctaggtgaaagataatgattacagcttgaaagataactatttgctgtttctttgggaagagtatttatagtaattattacttatctttgcaatagaaattctaccaccttgccctctatagcttagccagttagtatcagtgaagat

SEQ ID NO: 4285 - DNA, 2195 bp, Homo sapiens
gcgagttggtgccgctgcaactccgattccgagctttcggcacctctgccgggtggtaccgagccttcccggcgccccctcctctcctcccaccggcctcagcagcagcagcagcagcaggaggaggagcccggtggcggcggtggccggggagcccatggcgtacagtcaaggaggcggcaaaaaaaaagtctgctactactacgacggtgatattggaaattattattatggacagggtcatcccatgaagcctcatagaatccgcatgacccataacttgctgttaaattatggcttatacagaaaaatggaaatatataggccccataaagccactgccgaagaaatgacaaaatatcacagtgatgagtatatcaaatttctacggtcaataagaccagataacatgtctgagtatagtaagcagatgcagagatttaatgttggagaagattgtccagtgtttgatggactctttgagttttgtcagctctcaactggcggttcagttgctggagctgtgaagttaaaccgacaacagactgatatggctgttaattgggctggaggattacatcatgctaagaaatcagaagcatcaggattctgttacgttaatgatattgtgcttgccatccttgaattactaaagtatcatcagagagtcttatatattgatatagatattcatcatggtgatggtgttgaagaagctttttatacaacagatcgtgtaatgacggtatcattccataaatatggggaatactttcctggcacaggagacttgagggatattggtgctggaaaaggcaaatactatgctgtcaattttccaatgwgwgatggtatagatgatgagtcatatgggcagatatttaagcctattatctcaaaggtgatggagatgtatcaacctagtgctgtggtattacagtgtggtgcagactcattatctggtgatagactgggttgtttcaatctaacagtcaaaggtcatgctaaatgtgtagaagttgtaaaaacttttaacttaccattactgatgcttggaggaggtggctacacaatccgtaatgttgctcgatgttggacatatgagactgcagttgcccttgattgtgagattcccaatgagttgccatataatgattactttgagtattttggaccagacttcaaactgcatattagtccttcaaacatgacaaaccagaacactccagaatatatggaaaagataaaacagcgtttgtttgaaaatttgcgcatgttacctcatgcacctggtgtccagatgcaagctattccagaagatgctgttcatgaagacagtggagatgaagatggagaagatccagacaagagaatttctattcgagcatcagacaagcggatagcttgtgatgaagaattctcagattctgaggatgaaggagaaggaggtcgaagaaatgtggctgatcataagaaaggagcaaagaaagctagaattgaagaagataagaaagaaacagaggacaaaaaaacagacgttaaggaagaagataaatccaaggacaacagtggtgaaaaaacagataccaaaggaaccaaatcagaacagctcagcaacccctgaatttgacagtctcaccaatttcagaaaatcattaaaaagaaaatattgaaaggaaaatgttttctttttgaagacttctggcttcattttatactactttggcatggactgtatttattttcaaatggctttttcgtttttgtttttcttggcaagttttattgtgagtttttctaattatgaagcaaaatttcttttctccaccakgctttatgtgatagtatttaaaattgatgtgagttattatgtcaaaaaaactgatctattaaagaagtaattggcctttctgagctgatttttccatcttttgtaattatctttattaaaaaattgtacttggattatcttttgtctgtttattactacaatrtgaagtcttgtttcagtggctaatgacatcatttctgtagacttacaatacactctaggtgaaagataatgattacagcttgaaagataactatttgctgtttctttgggaagagtatttatagtaattattacttatctttgcaatagaaattctaccaccttgccctctatagcttagccagttagtatcagtgaagat

SEQ ID NO: 4286 - DNA, 3264 bp, Homo sapiens
  misc_feature (1)...(3264): n = A,T,C or G
cccggcgggtcctgctcctccgcggcggaggcgtggcctcggctgggactaaccggggcggggcggggcggggcggggcggggccgccgcgaccgcgggcttcaggcagggctgcagatgcgmggcccagctgtacctcgcgtgtcccgggtcgggagtcggagacgcaggtgcaggagagtgcggggcaagtagcgcattttctctttgcattctcgagatcgcttagccgcgctttaaaaaggtttgcatcagctgtgagtccatctgacaagcgaggaaactaaggctgagaagtgggaggcgttgccatctgcaggcccaggcaacctgctacgggaagaccggggaccaagacctctgggttggctttcctagacccgctcgggtcttcgggtgtcgcgaggaagggccctgctcctttcgttccctgcacccctggccgctgcaggtggctccctggaggaggagctcccacgcggaggaggagccagggcagctgggagcggggacaccatcctcctggataagaggcagaggccgggaggaaccccgtcagccgggcgggcaggaagctctgggagtagcctcatggaagagaagcagatcctgtgcgtggggctagtggtgctggacgtcatcagcctggtggacaagtaccctaaggaggactcggagataaggtgtttgtcccagagatggcagcgcggaggcaacgcgtccaactcctgcaccnttctctccctgctcggagccccctgtgccttcatgggctcaatggctcctggccatgttgctgacttcctggtggccgacttcaggcggcggggcgtggacgtgtctcaggtggcctggcagascaagggggacacccccakctcctgstgcatcatcaacaactccaatggcaaccgtaccattgtgctccatgacacgagcctgccagatgtgtctgctacagactttgagaaggttgatctgacccagttcaagtggatccacattgagggccggaacgcatcggagcaggtgaagatgctgcagcggatagacgcacacaacaccaggcagcctccagagcagaagatccgggtgtccgtggaggtggagaagccacgagaggagctcttccagctgtttggctacggagacgtggtgtttgtcagcaaagatgtggccaagcacttggggttccagtcagcagaggaagccttgaggggcttgtatggtcrtgtgaggaaaggggctgtgcttgtctgtgcctgggctgaggagggcgccgacgccctgggccctgatggcaaattgctccactcggatgctttcccgccaccccgcgtggtggatacactgggagctggagacaccttcaatgcctccgtcatcttcagcctctcccaggggaggrgcgtgcaggaagcactgagattcgggtgccaggtggccggcaagaagtgtggcctgcagggctttgatggcatcgtgtgagagcaggtgccggctcctcacacaccatggagactaccattgcggctgcatcgccttctcccctccatccagcctggcgtccaggttgccctgttcaggggacagatgcaagctgtggggaggactctgcctgtgtcctgtgttccccacagggagaggctctggggggatggctggggsatgcagagcctcagagcaaataaatcttcctcagagccagcttctcctctcaatgtctgaactgctctggctgggcattcctgaggctctgactcttcgatcctccctctttgtgtccattccccaaattaacctctccgcccaggcccagaggaggggctgcctgggctagagcagcgagaagtgccctgggcttgccaccagctctgccctggctggggaggacactcggtgccccacacccagtgaacctgccaaagaaaccgtgagagctcttcggggccctgcgttgtgcagactctattcccacagctcagaagctgggagtccacaccgctgagctgaactgacaggccagtggggggcaggggtgcgcctcctctgccctgcccaccagcctgtgatttgatggggtcttcattgtccagaaatacctcctcccgctgactgccccagagcctgaaagtctcacccttggagcccaccttggaattaagggcgtgcctcagccacaaatgtgacccaggatacagagtgttgctgtcctcagggaggtccgatctggaacacatattggaattggggcyaactccaatatagggtgggtaaggccttataatgtaaagagcatataatgtaaagggctttagagtgagacagacctggattmaaatctgccatttaattagctgcatatcaccttagggtacagcacttaacgcaatctgcctcaatttcttcatctgtcaaatggaaccaattctgcttggctacagaattattgtgaggataaaatcatatataaaatgcccagcatgatgcctgatgtgtacaaggctctcaaaaagttctagtgatgattaatattactggggatggggtcacctgccctgagctgcaggagagcatggggtgtctgaacaccaggtgagggggaaccggtgagggtttggggcccagggatagactgagctttcctcactgggtcctctgcagccggccatggctagcaccatgcgctctgctgccggagcaccgtgaggcccagaaacactgggcaggcggcatccctgtcctttcggtccccaaccccgttcctctgagagggtctgggcaggctggacgggtagagaggtggccggggggatgaattcattcagttctttattggtaatctgccccttaacttagggtctccctgagctgcayagaaagacctgatacctactgggaccagrcagggggcacagagatggtccttgtcccagcgtacatttcccctgcccacttcagggcttatgttctggcactgagacttcgtggggtacctgtatcttcaagatctagatctcatcattctccacttgaacaatgtgcacctcaaagtcattttgggtgttcttagactccagtgtttcccctggaagttccttggcctcctctccattctccctggcctctgcctggcccccagcttcccctctgggcccrggggcatctccttyagcctctgcctggcccycagcttcccctctgggcccaggggcatctccttyagcctctgcctggccctcagcttcccctctgggccctgga

SEQ ID NO: 4287 - DNA, 3264 bp, Homo sapiens
  misc_feature (1)...(3264): n = A,T,C or G
cccggcgggtcctgctcctccgcggcggaggcgtggcctcggctgggactaaccggggcggggcggggcggggcggggcggggccgccgcgaccgcgggcttcaggcagggctgcagatgcgmggcccagctgtacctcgcgtgtcccgggtcgggagtcggagacgcaggtgcaggagagtgcggggcaagtagcgcattttctctttgcattctcgagatcgcttagccgcgctttaaaaaggtttgcatcagctgtgagtccatctgacaagcgaggaaactaaggctgagaagtgggaggcgttgccatctgcaggcccaggcaacctgctacgggaagaccggggaccaagacctctgggttggctttcctagacccgctcgggtcttcgggtgtcgcgaggaagggccctgctcctttcgttccctgcacccctggccgctgcaggtggctccctggaggaggagctcccacgcggaggaggagccagggcagctgggagcggggacaccatcctcctggataagaggcagaggccgggaggaaccccgtcagccgggcgggcaggaagctctgggagtagcctcatggaagagaagcagatcctgtgcgtggggctagtggtgctggacgtcatcagcctggtggacaagtaccctaaggaggactcggagataaggtgtttgtcccagagatggcagcgcggaggcaacgcgtccaactcctgcaccnttctctccctgctcggagccccctgtgccttcatgggctcaatggctcctggccatgttgctgattttgtcctggatgacctccgccgctattctgtggacctacgctacacagtctttcagaccacaggctccgtccccatcgccacggtcatcatcaacgaggccagtggtagccgcaccatcctatactatgacaggagcctgccagatgtgtctgctacagactttgagaaggttgatctgacccagttcaagtggatccacattgagggccggaacgcatcggagcaggtgaagatgctgcagcggatagacgcacacaacaccaggcagcctccagagcagaagatccgggtgtccgtggaggtggagaagccacgagaggagctcttccagctgtttggctacggagacgtggtgtttgtcagcaaagatgtggccaagcacttggggttccagtcagcagaggaagccttgaggggcttgtatggtcrtgtgaggaaaggggctgtgcttgtctgtgcctgggctgaggagggcgccgacgccctgggccctgatggcaaattgctccactcggatgctttcccgccaccccgcgtggtggatacactgggagctggagacaccttcaatgcctccgtcatcttcagcctctcccaggggaggrgcgtgcaggaagcactgagattcgggtgccaggtggccggcaagaagtgtggcctgcagggctttgatggcatcgtgtgagagcaggtgccggctcctcacacaccatggagactaccattgcggctgcatcgccttctcccctccatccagcctggcgtccaggttgccctgttcaggggacagatgcaagctgtggggaggactctgcctgtgtcctgtgttccccacagggagaggctctggggggatggctggggsatgcagagcctcagagcaaataaatcttcctcagagccagcttctcctctcaatgtctgaactgctctggctgggcattcctgaggctctgactcttcgatcctccctctttgtgtccattccccaaattaacctctccgcccaggcccagaggaggggctgcctgggctagagcagcgagaagtgccctgggcttgccaccagctctgccctggctggggaggacactcggtgccccacacccagtgaacctgccaaagaaaccgtgagagctcttcggggccctgcgttgtgcagactctattcccacagctcagaagctgggagtccacaccgctgagctgaactgacaggccagtggggggcaggggtgcgcctcctctgccctgcccaccagcctgtgatttgatggggtcttcattgtccagaaatacctcctcccgctgactgccccagagcctgaaagtctcacccttggagcccaccttggaattaagggcgtgcctcagccacaaatgtgacccaggatacagagtgttgctgtcctcagggaggtccgatctggaacacatattggaattggggcyaactccaatatagggtgggtaaggccttataatgtaaagagcatataatgtaaagggctttagagtgagacagacctggattmaaatctgccatttaattagctgcatatcaccttagggtacagcacttaacgcaatctgcctcaatttcttcatctgtcaaatggaaccaattctgcttggctacagaattattgtgaggataaaatcatatataaaatgcccagcatgatgcctgatgtgtacaaggctctcaaaaagttctagtgatgattaatattactggggatggggtcacctgccctgagctgcaggagagcatggggtgtctgaacaccaggtgagggggaaccggtgagggtttggggcccagggatagactgagctttcctcactgggtcctctgcagccggccatggctagcaccatgcgctctgctgccggagcaccgtgaggcccagaaacactgggcaggcggcatccctgtcctttcggtccccaaccccgttcctctgagagggtctgggcaggctggacgggtagagaggtggccggggggatgaattcattcagttctttattggtaatctgccccttaacttagggtctccctgagctgcayagaaagacctgatacctactgggaccagrcagggggcacagagatggtccttgtcccagcgtacatttcccctgcccacttcagggcttatgttctggcactgagacttcgtggggtacctgtatcttcaagatctagatctcatcattctccacttgaacaatgtgcacctcaaagtcattttgggtgttcttagactccagtgtttcccctggaagttccttggcctcctctccattctccctggcctctgcctggcccccagcttcccctctgggcccrggggcatctccttyagcctctgcctggcccycagcttcccctctgggcccaggggcatctccttyagcctctgcctggccctcagcttcccctctgggccctgga

SEQ ID NO: 4288 - DNA, 2192 bp, Homo sapiens
cacgagggagcgcgaagcggagggcgcctcgcggcaggagcgggatttccggggtcacgggaaccggcaggggaacgggataaagttcctggagaaaggaaagsagagcgtgggatagtaaaagagaagacgcggagaagaggagaggacctacaagaacggaggacaggggcgcacgatggtcccggggggagcggaaacaaaggcacgcaaaacggaaaagcgtgtgtaggggagcggaaaaggaagtcaccaccgtggcctgcgacgaaatggcgaaaagtcttttgaagacagcctctctgtctggaaggacaaaattgctacatcaaacaggattgtcactttatagtacatcccatggattttatgaggaagaagtgaaaaaaacacttcagcagtttcctggtggatccattgaccttcagaaggaagacaatggcattggcattcttactctgaacaatccaagtagaatgaatgccttttcaggatggaatggccgtatgcatgttcatgcaaaacaccttaacaagatttatgagacttcctttaataagtgttgcgctggttcaaggttgggcattgggtggaggagcagaatttactacagcatgtgatttcaggttaatgactccagagagtaagatcagattcgtccacaaagagatgggcataataccaagctggggtggcaccacccggctagttgaaataatcggaagtagacaagctctcaaagtgttgagtggggcccttaaactggattcaaaaaatgctctaaacataggaatggttgaagaggtcttgcagtcttcagatgaaactaaatctctagaagaggcacaagaatggctaaagcaattcatccaagggccaccggaagtaattagagctttgaaaaaatctgtttgttcaggcagagagctatatttggaggaagcattacagaacgaaagagatcttttaggaacagtttggggtgggcctgcaaatttagaggctattgctaagaaaggaaaatttaataaataattggtttttcgtgtggatgtactccaagtaaagctccagtgactaatatgtataaatgttaaatgatattaaatatgaacatcagaattactttgaaggctactattaatatgcagacttacttttaatcatttgaatatctgaactcatttacctcatttcttgccaattactcacttgggtatttactgcgtaatctggaacatttagctaaaatatacacttttggcttaaaaattattgctgtcaattccaataataattcttagcttataaccaaagagcagtgtttaaaaggagagcttctatacaaaacctattcctggcgttacttttcatacaatttttgttctgttttacctggaaataatttaccaaaataactgagtgttgctgctaaagaacaaaagtggggaggtatcagggaacaagaaaacaagaaagggtatgatcaatcattttcttctgctccaaacagctggagtaaaattcatgggaaatggcccttcatttaaaaaaagatgtacctcactacccactacaaatttggaactttgttcttttcaataattagttttctattgtaaattacctactaaacagtggtagccatgacatggaaagtcaactgattctacaattggacattcatttgtgtgccctggaatttccaactagtaataaacaactactgttgatgtagttttaaaccacttgaagggactcatgaagcatcctgcaacataaatttgcatttttacatcagatttcttttttttcctgaaaaacaactaaccttctaacaactatctttcaaaagtaaatgtaataaaaatgcacaacataaaatgtttatgatcccagcaatacactttttaaaaaatgtgaaagtcaaagaattaagttctagttctgactyatcacaagaggtcaaaagtatttgctactgtaacattcaattcacatttgagaatcatggtaaaaataacttgyatttgccttaccatcatgatcctactgttgagttaggaaaatatggttagacagactcacattactttttttcagaggtaaactctagattactgtgtcaacccaatactatttggccatagatgtaaaaactaccaaataaaagtggattttgtggtctacaa

SEQ ID NO: 4289 - DNA, 1864 bp, Homo sapiens
cacgagggagcgcgaagcggagggcgcctcgcggcaggagcgggatttccggggtcacgggaaccggcaggggaacgggataaagttcctggagaaaggaaagsagagcgtgggatagtaaaagagaagacgcggagaagaggagaggacctacaagaacggaggacaggggcgcacgatggtcccggggggagcggaaacaaaggcacgcaaaacggaaaagcgtgtgtaggggagcggaaaaggaagtcaccaccgtggcctgcgacgaaatggcgaaaagtcttttgaagacagcctctctgtctggaaggacaaaattgctacatcaaacaggattgtcactttatagtacatcccatggattttatgaggaagaagtgaaaaaaacacttcagcagtttcctggtggatccattgaccttcagaaggaagacaatggcattggcattcttactctgaacaatccaagtagaatgaatgccttttcaggtgttatgatgctacaacttctggaaaaagtaattgaattggaaaattggacagaggggaaaggcctcattgtccgtggggcaaaaaatactttctcttcaggatctgatctgaatgctgtgaaatcactaggaactccagaggatggaatggccgtatgcatgttcatgcaaaacaccttaacaagatttatgaggtaaagaagcaaagaggaaaaattcttcttggcctatcaagacttcctttaataagtgttgcgctggttcaaggttgggcattgggtggaggagcagaatttactacagcatgtgatttcaggttaatgactccagagagtaagatcagattcgtccacaaagagatgggcataataccaagctggggtggcaccacccggctagttgaaataatcggaagtagacaagctctcaaagtgttgagtggggcccttaaactggattcaaaaaatgctctaaacataggaatggttgaagaggtcttgcagtcttcagatgaaactaaatctctagaagaggcacaagaatggctaaagcaattcatccaagggccaccggaagtaattagagctttgaaaaaatctgtttgttcaggcagagagctatatttggaggaagcattacagaacgaaagagatcttttaggaacagtttggggtgggcctgcaaatttagaggctattgctaagaaaggaaaatttaataaataattggtttttcgtgtggatgtactccaagtaaagctccagtgactaatatgtataaatgttaaatgatattaaatatgaacatcagaattactttgaaggctactattaatatgcagacttacttttaatcatttgaatatctgaactcatttacctcatttcttgccaattactcacttgggtatttactgcgtaatctggaacatttagctaaaatatacacttttggcttaaaaattattgctgtcaattccaataataattcttagcttataaccaaagagcagtgtttaaaaggagagcttctatacaaaacctattcctggcgttacttttcatacaatttttgttctgttttacctggaaataatttaccaaaataactgagtgttgctgctaaagaacaaaagtggggaggtatcagggaacaagaaaacaagaaagggtatgatcaatcattttcttctgctccaaacagctggagtaaaattcatgggaaatggcccttcatttaaaaaaattttctattgtaaattacctactaaacagtggtagccatgacatggaaagtcaactgattctacaattggacattcatttgtgtgccctggaatttccaactagtaataaacaactactgttgat

SEQ ID NO: 4290 - DNA, 2399 bp, Homo sapiens
cacgagggagcgcgaagcggagggcgcctcgcggcaggagcgggatttccggggtcacgggaaccggcaggggaacgggataaagttcctggagaaaggaaagsagagcgtgggatagtaaaagagaagacgcggagaagaggagaggacctacaagaacggaggacaggggcgcacgatggtcccggggggagcggaaacaaaggcacgcaaaacggaaaagcgtgtgtaggggagcggaaaaggaagtcaccaccgtggcctgcgacgaaatggcgaaaagtcttttgaagacagcctctctgtctggaaggacaaaattgctacatcaaacaggattgtcactttatagtacatcccatggattttatgaggaagaagtgaaaaaaacacttcagcagtttcctggtggatccattgaccttcagaaggaagacaatggcattggcattcttactctgaacaatccaagtagaatgaatgccttttcaggtgttatgatgctacaacttctggaaaaagtaattgaattggaaaattggacagaggggaaaggcctcattgtccgtggggcaaaaaatactttctcttcaggatctgatctgaatgctgtgaaatcactaggaactccagaggcaagtttgcagatggaatacagagttcctgtacaccctgcatccagtttccccttttattaacatcttatattcctatggatggaatggccgtatgcatgttcatgcaaaacaccttaacaagatttatgaggtaaagaagcaaagaggaaaaattcttcttggcctatcaagacttcctttaataagtgttgcgctggttcaaggttgggcattgggtggaggagcagaatttactacagcatgtgatttcaggttaatgactccagagagtaagatcagattcgtccacaaagagatgggcataataccaagctggggtggcaccacccggctagttgaaataatcggaagtagacaagctctcaaagtgttgagtggggcccttaaactggattcaaaaaatgctctaaacataggaatggttgaagaggtcttgcagtcttcagatgaaactaaatctctagaagaggcacaagaatggctaaagcaattcatccaagggccaccggaagtaattagagctttgaaaaaatctgtttgaacagtttggggtgggcctgcaaatttagaggctattgctaagaaaggaaaatttaataaataattggtttttcgtgtggatgtactccaagtaaagctccagtgactaatatgtataaatgttaaatgatattaaatatgaacatcagaattactttgaaggctactattaatatgcagacttacttttaatcatttgaatatctgaactcatttacctcatttcttgccaattactcacttgggtatttactgcgtaatctggaacatttagctaaaatatacacttttggcttaaaaattattgctgtcaattccaataataattcttagcttataaccaaagagcagtgtttaaaaggagagcttctatacaaaacctattcctggcgttacttttcatacaatttttgttctgttttacctggaaataatttaccaaaataactgagtgttgctgctaaagaacaaaagtggggaggtatcagggaacaagaaaacaagaaagggtatgatcaatcattttcttctgctccaaacagctggagtaaaattcatgggaaatggcccttcatttaaaaaaagatgtacctcactacccactacaaatttggaactttgttcttttcaataattagttttctattgtaaattacctactaaacagtggtagccatgacatggaaagtcaactgattctacaattggacattcatttgtgtgccctggaatttccaactagtaataaacaactactgttgatgtagttttaaaccacttgaagggactcatgaagcatcctgcaacataaatttgcatttttacatcagatttcttttttttcctgaaaaacaactaaccttctaacaactatctttcaaaagtaaatgtaataaaaatgcacaacataaaatgtttatgatcccagcaatacactttttaaaaaatgtgaaagtcaaagaattaagttctagttctgactyatcacaagaggtcaaaagtatttgctactgtaacattcaattcacatttgagaatcatggtaaaaataacttgyatttgccttaccatcatgatcctactgttgagttaggaaaatatggttagacagactcacattactttttttcagaggtaaactctagattactgtgtcaacccaatactatttggccatagatgtaaaaactaccaaataaaagtggattttgtggtctacaa

SEQ ID NO: 4291 - DNA, 2286 bp, Homo sapiens
cacgagggagcgcgaagcggagggcgcctcgcggcaggagcgggatttccggggtcacgggaaccggcaggggaacgggataaagttcctggagaaaggaaagsagagcgtgggatagtaaaagagaagacgcggagaagaggagaggacctacaagaacggaggacaggggcgcacgatggtcccggggggagcggaaacaaaggcacgcaaaacggaaaagcgtgtgtaggggagcggaaaaggaagtcaccaccgtggcctgcgacgaaatggcgaaaagtcttttgaagacagcctctctgtctggaaggacaaaattgctacatcaaacaggattgtcactttatagtacatcccatggattttatgaggaagaagtgaaaaaaacacttcagcagtttcctggtggatccattgaccttcagaaggaagacaatggcattggcattcttactctgaacaatccaagtagaatgaatgccttttcaggtgttatgatgctacaacttctggaaaaagtaattgaattggaaaattggacagaggggaaaggcctcattgtccgtggggcaaaaaatactttctcttcaggatctgatctgaatgctgtgaaatcactaggaactccagaggcaaacttcctttaataagtgttgcgctggttcaaggttgggcattgggtggaggagcagaatttactacagcatgtgatttcaggttaatgactccagagagtaagatcagattcgtccacaaagagatgggcataataccaagctggggtggcaccacccggctagttgaaataatcggaagtagacaagctctcaaagtgttgagtggggcccttaaactggattcaaaaaatgctctaaacataggaatggttgaagaggtcttgcagtcttcagatgaaactaaatctctagaagaggcacaagaatggctaaagcaattcatccaagggccaccggaagtaattagagctttgaaaaaatctgtttgttcaggcagagagctatatttggaggaagcattacagaacgaaagagatcttttaggaacagtttggggtgggcctgcaaatttagaggctattgctaagaaaggaaaatttaataaataattggtttttcgtgtggatgtactccaagtaaagctccagtgactaatatgtataaatgttaaatgatattaaatatgaacatcagaattactttgaaggctactattaatatgcagacttacttttaatcatttgaatatctgaactcatttacctcatttcttgccaattactcacttgggtatttactgcgtaatctggaacatttagctaaaatatacacttttggcttaaaaattattgctgtcaattccaataataattcttagcttataaccaaagagcagtgtttaaaaggagagcttctatacaaaacctattcctggcgttacttttcatacaatttttgttctgttttacctggaaataatttaccaaaataactgagtgttgctgctaaagaacaaaagtggggaggtatcagggaacaagaaaacaagaaagggtatgatcaatcattttcttctgctccaaacagctggagtaaaattcatgggaaatggcccttcatttaaaaaaagatgtacctcactacccactacaaatttggaactttgttcttttcaataattagttttctattgtaaattacctactaaacagtggtagccatgacatggaaagtcaactgattctacaattggacattcatttgtgtgccctggaatttccaactagtaataaacaactactgttgatgtagttttaaaccacttgaagggactcatgaagcatcctgcaacataaatttgcatttttacatcagatttcttttttttcctgaaaaacaactaaccttctaacaactatctttcaaaagtaaatgtaataaaaatgcacaacataaaatgtttatgatcccagcaatacactttttaaaaaatgtgaaagtcaaagaattaagttctagttctgactyatcacaagaggtcaaaagtatttgctactgtaacattcaattcacatttgagaatcatggtaaaaataacttgyatttgccttaccatcatgatcctactgttgagttaggaaaatatggttagacagactcacattactttttttcagaggtaaactctagattactgtgtcaacccaatactatttggccatagatgtaaaaactaccaaataaaagtggattttgtggtctacaa

SEQ ID NO: 4292 - DNA, 2763 bp, Homo sapiens
actacctaaggtctacctttagtcccacgactctgacaaaatgatctcaatattggtgtaaaatcacctcccctttcaagggtcttccaaagcacttcctgtctgcggcatacaaaatgtattggcacggaattttaagcttactgagctttataaacacgtcacattcacacattcaagacacacactggatattcggataaaaacaaacaaacaaaaaactggctaaatacccattcccctcaataacttggataagatacctaaaaaaggtcgaccttcggtacctttctgtcttctcccctctcgctatttgcctacactggcttcctcacctccactttttctcacgtttatctgagcgaaaacaagcacggttcggcagcctcctttcccagccctacctttgtgctgcaaaagcgaaaattcaaaagccaagtacaataggagaccgcccaccctggctccctcgtgacacgagggagcgcgaagcggagggcgcctcgcggcaggagcgggatttccggggtcacgggaaccggcaggggaacgggataaagttcctggagaaaggaaagsagagcgtgggatagtaaaagagaagacgcggagaagaggagaggacctacaagaacggaggacaggggcgcacgatggtcccggggggagcggaaacaaaggcacgcaaaacggaaaagcgtgtgtaggggagcggaaaaggaagtcaccaccgtggcctgcgacggtaagtggtcaaatggcgaaaagtcttttgaagacagcctctctgtctggaaggacaaaattgctacatcaaacaggattgtcactttatagtacatcccatggattttatgaggaagaagtgaaaaaaacacttcagcagtttcctggtggatccattgaccttcagaaggaagacaatggcattggcattcttactctgaacaatccaagtagaatgaatgccttttcaggtgttatgatgctacaacttctggaaaaagtaattgaattggaaaattggacagaggggaaaggcctcattgtccgtggggcaaaaaatactttctcttcaggatctgatctgaatgctgtgaaatcactaggaactccagaggcaagtacttcctttaataagtgttgcgctggttcaaggttgggcattgggtggaggagcagaatttactacagcatgttaatgactccagagagtaagatcagattcgtccacaaagagatgggcataataccaagctggggtggcaccacccggctagttgaaataatcggaagtagacaagctctcaaagtgttgagtggggcccttaaactggattcaaaaaatgctctaaacataggaatggttgaagaggtcttgcagtcttcagatgaaactaaatctctagaagaggcacaagaatggctaaagcaattcatccaagggccaccggaagtaattagagctttgaaaaaatctgtttgttcaggcagagagctatatttggaggaagcattacagaacgaaagagatcttttaggaacagtttggggtgggcctgcaaatttagaggctattgctaagaaaggaaaatttaataaataattggtttttcgtgtggatgtactccaagtaaagctccagtgactaatatgtataaatgttaaatgatattaaatatgaacatcagaattactttgaaggctactattaatatgcagacttacttttaatcatttgaatatctgaactcatttacctcatttcttgccaattactcacttgggtatttactgcgtaatctggaacatttagctaaaatatacacttttggcttaaaaattattgctgtcaattccaataataattcttagcttataaccaaagagcagtgtttaaaaggagagcttctatacaaaacctattcctggcgttacttttcatacaatttttgttctgttttacctggaaataatttaccaaaataactgagtgttgctgctaaagaacaaaagtggggaggtatcagggaacaagaaaacaagaaagggtatgatcaatcattttcttctgctccaaacagctggagtaaaattcatgggaaatggcccttcatttaaaaaaagatgtacctcactacccactacaaatttggaactttgttcttttcaataattagttttctattgtaaattacctactaaacagtggtagccatgacatggaaagtcaactgattctacaattggacattcatttgtgtgccctggaatttccaactagtaataaacaactactgttgatgtagttttaaaccacttgaagggactcatgaagcatcctgcaacataaatttgcatttttacatcagatttcttttttttcctgaaaaacaactaaccttctaacaactatctttcaaaagtaaatgtaataaaaatgcacaacataaaatgtttatgatcccagcaatacactttttaaaaaatgtgaaagtcaaagaattaagttctagttctgactyatcacaagaggtcaaaagtatttgctactgtaacattcaattcacatttgagaatcatggtaaaaataacttgyatttgccttaccatcatgatcctactgttgagttaggaaaatatggttagacagactcacattactttttttcagaggtaaactctagattactgtgtcaacccaatactatttggccatagatgtaaaaactaccaaataaaagtggattttgtggtctacaa

SEQ ID NO: 4293 - DNA, 6081 bp, Homo sapiens
ttttacgtatctattgggaattgagctaggtagtcgaggcaccagcatgaggttcttaagaaatctgctttaatgaacaaatcagagtgatttgtacttaatacttgattttgtttcaaaggccacataggcatttgaaaaataagtttttgcctgaatcctgtaatttcagctttcttagcaatttctcttttctgaaacagtgaaaatgtaaactttagggtagcctctgttcaaataatcacaatatgtgaattgaagtttgaggagttcatagagtgttactgaatttgtctgttttctaaaggaaattgattcatttttttcaaattattttacaggatccttcaaaccaaaaatgtggtggaagaaagaaaaccgtgtctttcagcagcatgccatcggaaaagaaaattagcagtgcaaatgactgcatcagcttcatgcaagctggctgtgagttgaagaaagtccggccaaattctcgcatttacaaccgttttttcactctggacacagaccttcaagctcttcgctgggaaccttcaaagaaagacctcgagaaagccaagcttgatatttctgccataaaagagatcagactggggaaaaacacggaaacatttagaaacaatggccttgctgaccagatctgtgaggactgtgccttttccatactccacggggaaaactatgagtctctggacctagttgccaattcagcagatgtggcaaacatctgggtgtctgggttacggtacctggtttctcgaagtaagcagcctcttgattttatggagggcaaccagaacacaccacggttcatgtggttgaaaacagtgtttgaagcagcagatgttgatgggaatgggattatgttggaagacacctctgtagagttaataaaacaactcaaccctactctgaaggaagccaagatcaggttaaagtttaaagaaatccagaagagcaaggaaaaactaaccacccgcgtgaccgaagaggaattttgtgaagctttttgtgaactttgcaccaggccagaagtgtatttcttacttgtacagatatctaaaaacaaagaatatttggatgccaatgatctcatgctctttttagaagctgagcaaggagtcacccatatcaccgaggatatatgcttagacatcataaggagatacgaactttctgaagagggacgtcaaaaagggtttcttgcaattgatggctttacccagtatttattgtcatcagaatgtgacatttttgatcctgagcaaaagaaggttgcccaagatatgacccagccattatctcactactatatcaatgcctctcataacacctatctaatagaagaccagttcagggggccagctgacatcaatgggtacattagagctttgaaaatgggctgtcgaagcgttgaactcgatgtaagtgatggttcagataatgaaccaatcctttgtaatcgaaataacatgacaacccatgtttcctttcgaagtgtcatagaggtaataaataaatttgcctttgttgcttctgaatacccactcattctttgcttgggaaatcactgctccttgccgcagcagaaggtaatggctcaacagatgaaaaaggtctttggcaataaactctatactgaagcacctttgccctcagaatcctacctcccatcaccagaaaaattaaaaagaatgatcattgtgaaaggaaagaagttgccttctgatccagatgtgttagaaggagaagtaacagatgaagatgaagaagctgaaatgtctcgaaggatgtcggtagattacaatggtgagcagaagcaaatccgactctgtagggagctctctgatttggtgtctatttgtaaatctgttcartacagggattttgaactatctatgaaaagccaaaactattgggaaatgtgttcatttagtgaaacagaggccagccgcattgcaaatgagtacccagaggattttgttaattataataagaagtkcttatcaagaatctatccaagtgccatgaggatcgattccagtaacttgaatccacaggacttttggaattgtggctgtcagattrtagcaatgaattttcagactccgggtccaatgatggaccttcacacgggctggtttcttcaaaacgggggatgtggttatgttctaaggccgtctataatgcgagatgaagtttcttacttcagcgcaaatacaaagggcattctacctggggtgtctcctctagctcttcatatcaagatcatcagtggtcagaatttcccaaagcccaagggagcttgtgccaaaggggatgtcatagatccctatgtttgtatagagatacacggaattccagcggattgttcggaacaaagaactaaaactgtacagcaaaacagtgataatcctatttttgatgaaacttttgagttccaagtaaacctacctgagctggccatgatccgttttgttgttctggatgatgactacattggggatgagtttatagggcaatatacgataccatttgaatgtttgcagcctggatatcggcatgttcccctgcgttcttttgtgggtgacatcatggagcacgtaaccctttttgtccacatagcaataactaatcgaagtggaggaggaaaggcacagaagcgcagtctttcagtgagaatggggaagaaagttcgggaatataccatgctcaggaatatcggtcttaaaaccattgatgacatctttaaaatagcggttcatccattacgagaagccatagatatgagagaaaatatgcagaatgcaatcgtgtctattaaggaactatgtggactccctccaattgccagtctgaagcagtgcctgttaactctgtcatctcggctcatcaccagtgacaatactccttcagtctcacttgtgatgaaagacagctttccttacctggagcctctgggtgcaattccagatgtgcagaaaaagatgctgactgcttatgatctgatgattcaagagagccggtttctcatagaaatggcggacacagtccaggaaaagattgtacagtgtcagaaagcagggatggagttccatgaagaacttcataatttgggggcaaaagaaggcttgaagggaagaaaactcaacaaagcaactgagagctttgcttggaacattacagtattgaagggccaaggagatctgttgaagaatgccaagaatgaagctatagaaaacatgaagcagatccagctggcatgcctgtcctgtggactgagtaaagcccccagcagcagtgctgaggccaagagcaagcgcagcctggaagccatagaggagaaggaaagtagtgaggagaatgggaagctgtgactctgggcattatcgacacgttcacccatcttatcaaggactctggtttctcattcttgttttctttctttaaatgttttataagttcacaaaatggtgccctatatggggtattggacatagatattttcacaatgtcagtatttcagtgtagttaatttatctaaattaaagcctttagtatcagtgttttaaattctgagacatgtgtcaacacccctgtgtggatgcctgtggaagagtgtgtgtgtgtgtgtgtgtgtgtgtgtgtggcagagagagagaaagagagagagagagagaaattctgttaaaatctattctgtgttgcattattcatttagtgagttattccttgatcattttgggacaattgttttaatctgaaattctaaagagcacttactgtaacctgttgctgtgtttaatttgacttctctgcctttgacatttaatttagtgatcttagcatagcttattattgaaggaagccaaatttatcaaagcatagatgttttggtagattaaatatagattagaaaaattcctaagaatcagagtagaaataaaagtgaatgaaagattaaacagatgatgagaatttctaaaaagattagcaaggtcatttcttcagtcagaaaactttaaaaaatatttattaaataaaatcaatttttaggaagttttctgtagtcatttactaaacatatgatttcactagaaaagctgatcataagtgaatttatacctacctgtgtggtactctgaaacacactgaaagctctgttgcaattaggattttgatgtgacaataatattgttgtataatttcgagatttgtaggaaggtctcattcttccaagctgagagtctagcactcattttctataacagatatggcagcttagaggtgttggctttgtttggatgtaatttagggtactaaatttaaatttaaagatattgttcaaacaatatcatatcatcacattgagctgatataaattctgtgggtccgataatatctttgtgataatttaagagctaaccagttaccacacatctatgatataaccctaacacacacagaaaagcatacatgcaaaaagaaatgactaattagggtacatttataattgcatctaggtaatttttaccctaatgtcttcataaagtacttgagtgtaatgtttgttacctccaacagaactaaatgttctatggttatgaaagaatatatttatttaaagcattgcttttattttgaaaagcttcttaattaatttgattaacaaatatgctaatttggggaaacctagagaagataattgttgaaattttgcaaatataaacatctcctatagcttctgtgttatttctgacttcttaacactattatgtttatgttgcacattactgaaagagtaaagatatgaaaaaaacacttattgttttcttttattgtgaattgaaaaagcaaagctaatgaaaatgggttactacatcaaaaatatcttaaagagtttgctatttccatggaccagatatgatgaaattattccctgggtttaaaactgggcactcgaggaggaggtacctgaagtcatttgaaggcaagtttccaatgatgctacaatggcctgaaaaaatttctttaccctctgttatatttaacttgctggtaggaggaatagtggaatgcaggtgttaagccctttgtggtgaaaaagaggttctatagacagaaacaaaacccaccttacatcagctgattggttgattttactagtgtacctcttcatctacttgaattctatttggtaaatccatgtctttactggatatacagttaggtgggaagaggagataaaggatgacaaactctcaaacaatatttatacatttatttactccagggtcaaatccaatccttggaagtagcttctctagtttattttatttgtcccagagctctactcacacttaggacccacccaaaaattctcaaaaacgtaatatggattctgcctcatctgatgctatttctggcagtgggttgtcagccatactctgcttcattccactgggtgtccttgctagatggggagtgagatgtggagcagggaggagctttggattctgggagtggaggtggcaagggaaaagtctcctagtctcctgtgatgttcctgcctccagatagaatagcaaaaacaaacaatttttttttgtgtattatgcctccatgacattgttacattctatgaggagcatctgtctcctttctagacttgaactgtggtagaaaaagcccccttctctcttctatctacttagatttggtgatgctaggaatgtagtgttttagatattaattctatttttatttattcatttttacatcaccaataggatctgaggtggagatggcgggtattatcactggcattttacaggtgagaaagcccaaagccactgaggtaattaatggaataattgattttgaacttgggtctgtctgatttcatgtgcaagattatatacttagtgattttgattttaagtttattcttaacattttaaaccagactattaactcttacctttataaccacagatacaaagaactgtatcatttattttctgaatataaaatattaatggtcaatataaaaatacaaaaatagagaac

SEQ ID NO: 4294 - DNA, 1167 bp, Homo sapiens
gggacgttgcgccgggtcaaaggccagcggcgcaaaatggcggcggcgatgaccttctgccggctgctgaaccggtgtggcgaggcggcgcggagcctgcccctgggcgccaggtgtttcggggtgcgggtctcgccgaccggggagaaggtcacgcacactggccaggtttatgatgataaagactacaggagaattcggtttgtaggtcgtcagaaagaggtgaatgaaaactttgccattgatttsatagcagagcagcccgtgagcgaggtggagactcgggtgatagcgtgcgatggcggcgggggagctcttggccmcccaaaagtgtatataaacttggacaaagaaacaaaaaccggcacatgcggttactgtgggctccagttcagacagcmccmccactagagcgtgtggcacgccgggggtcccscagcatcctgtgagcatttccrcggggaagctgactcgctggttctgtgcgaagggtattcctggtgctgaataaagggygttgctgtcaaggctgacaatttatatctgtgtgaggctggattttctttgcctactccaaccaaagcgacacatcacagcagactggatgcagaagcgtgcgtgggaatgcagctgttttccatggaaccagacgctacagagactgcaacgtgtaaaacactgccattcttttcattcctttgaataatttttttaaaatttgctatttaacacgtaatagttttttattttaaaatgaattaatacttttttttttttgagaaggaatctagctctgtcacccaggctggagtgcagtggccccatctcagctcactgcaacctccacctcccagtttcaagtgattctcctgctccagcctctcaagtagctgggattacagggcaccaccgtgcccacctaatttttgtatttttagtagagacagcgttgaccatgttggtcaggctggtcccgaactcctgacctcgtgatccacctgcctcggtctcccagagtgctgagattacaggcgtgagccaccgcgcctggcaataaatattttaaatgatcggttttaattctaataaggtaaatatcaacgcacattgcccacataaacagaagctctttagggtcctcagtaatatttacaactgtaagggatg

SEQ ID NO: 4295 - DNA, 549 bp, Homo sapiens
gggacgttgcgccgggtcaaaggccagcggcgcaaaatggcggcggcgatgaccttctgccggctgctgaaccggtgtggcgaggcggcgcggagcctgcccctgggcgccaggtgtttcggggtgcgggtctcgccgaccggggagaaggtcacgcacactggccaggtttatgatgataaagactacaggagaattcggtttgtaggtcgtcagaaagaggtgaatgaaaactttgccattgatttsatagcagagcagcccgtgagcgaggtggagactcgggtgatagcgtgcgatggcggcgggggagctcttggccmcccaaaagtgtatataaacttggacaaagaaacaaaaaccggcacatgcggttactgtgggctccagttcagacagcmccmccactagagcgtgtggcacgccgggggtcccscagcatcctgtgagcatttccrcggggaagctgagcacgtgaagctcgctggttctgtgcgaagggtattcctggtgctgaataaagggygttgctgtcaaggctgacaattt

SEQ ID NO: 4296 - DNA, 4681 bp, Homo sapiens
ctccttccataagggtctggtccttcatccctcccgcttcaccagaccccctcaccctgggagccgccacctccctttccccaagaccagatgtcgcgcggccggacacagccagcacggagagtcgatgccggcgtctgagctgcgcagtggggtcttcccgctgcccagcagcctacaggcgcggtgcactctgggggaacatggccgcttccggtctccctcccgggccggcgctggcctgactgcggccccggtccgtagcactccgccctccgcttctcccgccctgtagccgcgaagactscttcagcctttccctgtgctgcccctgccgcgcgatggagamgagctcgagctgcgagagtcttggctcccagccggcggcggctcggccgcccagcgtggactccttgtccagtgcctccacttctcattcagagaattcagtgcatacaaaatcagcttctgttgtatcatcagattccatttcaacttctgccgacaacttttctcctgatttgagggtcctgagggagtctaacaagttagcagaaatggaagaaccacccttgcttccaggagaaaatattaaagacatggccaaagatgtaacttatatatgtccattcactggcgctgtacgagraactctgactgtcacgaattataggttatatttcaaaagcatggaacgggatcccccatttgttttagatgcttcccttggtgtgataaatagagtagaaaaaattggtggtgcttctagtcgaggtgaaaattcttatggactagaaactgtgtgtaaggatattaggaatttacgatttgctcataaacctgaggggcggacaagaagatccatatttgagaatctaatgaaatatgcatttcctgtctctaataacctgcctctttttgcttttgaatacaaagaagtattccctgaaaatgggtggaagctatatgaccctcttttagagtatagaaggcagggaattccaaatgaaagctggagaataacaaagataaatgaacgatatgaactttgtgatacataccctgccctcctggttgtgccagcaaatattcctgatgaagaattaaagagagtggcatccttcagatcaagaggccgtatcccagttttatcatggattcatcctkaaagtcaagccacaatcactcggtgtagccagcccatggttggagtgagtggaaagcgaagcaaagaagatgaaaaataccttcaagctatcatggattccaatgcccagtctcacaaaatctttatatttgatgcccggccaagtgttaatgctgttgccaacaaggcaaagggtggaggttatgaaagtgaagatgcctatcaaaatgctgaactagttttcctggatatccacaatattcatgttatgagagaatcattacgaaaacttaaggagattgtgtaccccaacattgaggaaacycactggttgtctaacttggaatctactcattggctagaacatattaagcttattcttgcaggggctcttaggattgctgacaaggtagagtcagggaagacgtctgtggtagtgcattgcagtgatggttgggatcgcacagctyagctcacttcccttgccatgctcatgttggatggatactatcgaaccatccgaggatttgaagtccttgtggagaaagaatggctaagttttggacatcgatttcaactaagagttggccatggagataagaaccatgcagatgcagacagatcgcctgtttttcttcaatttattgactgtgtctggcagatgacaagacagtttcctaccgcatttgaattcaatsagtattttctcattaccattttggaccacctatacagctgcttattcggaacattcctctgtaatagtgaacaacagagaggaaaagagaatcttcctaaaaggactgtgtcactgtggtcttacataarcagccagctggaagacttcactaatcctctctatgggagctattccaatcatgtcctttatccagtagccagcatgcgccacctagagctctgggtgggatattacataaggtggaatccamrgatgaaaccacaggaacctattcacaacagatacaaagaacttcttgctaaacgagcagagcttcagaaaaaagtagaggaactacagagagagatttctaaccgatcaacctcatcctcagagagagccagctctcctgcacagtgtgtcactcctgtccaaactgttgtataaaggactgtaagatcaggggcatcattgctatacactcttgattacactggcagctctatgagtagaaagtcttcggaatttagamcccatctatgagagaaagttcagtcamtttatttattttaaatctctctaggatgagtttagaactgtagcagtgcaggtggcttaagtgaagtaactccatatgtaattacatgattatgatactaatcttttaagtatccaaagaatattaaaatacttcaatcctggattcasaktggkaacaagtttctattaaaaggcaaatgctgttacaaatttttggcatctggtaatattaaaaccattttagaaatacactctgtgctcactgtgcagaggaacatcagttttcaaaccaacactgaaattctgtggcatcacatatattgggccttgatgtcatgacagatcaaaatcatttgatatccctttctccattctaggtttttctttttttcagtaactgatttaccttgatcacttttcaacttccatattcttcatatagtaaaaggcaaagtrttgaagatactacggtgtggtagtagttgaaaattattgccgtcattatttacatacttaagacatattagcaagttgatccaaaatgggaggccttatagatgtgcttgggggaaaatgaaggggagaaagtagccatacaggagttcaaagaattccatgcccttcagattagcccaattaccagaaacatcatgaaagatattttaaaaactaattatttactacagtgtatttcacttgtcttgtgtgtctgaacacacagaagctaattagcaagtttttaagaagtatttaaaaatcttactaggattgacattttttctgaattctgtataaatagcttatagtgagaagtactgtgctcaaattttacatttttttcctttgcaaattctgtaatttcactcaacgattaagtctaccaaagaacacactgcatgtaaaagatgtattacaatctcaaagccagtaaaagaaatcttgcttcactgttcacctgctacaagtaagagtttggtgctggtagaaacatttgactctgatgtctattttattctacataagagccatatgtaatgtactgtaacaaaggagcttcttgtccccttggtcttttaattaaaagaaattccaactgacttttaaactttgttcttgtccaaagttgccatttcttttttttccccagaaatatttggaaattattggaggaatatgcaccccagatgaaaatgttcagtttgtacccatttttccttaaccaacacccaaatcaaacaattaaaatatacagtgtttttccactcactaattcactatacagagagtctgaaccttagcctccctcttggtcttgcagtgaggaartttctattagtatatccaatttagcaaaattggtaccaaaatgatttctttggtaattgtgtgaaatataagctttttaacagggcatttaagtggctagcaaatcagtaattaaaaattaagctttctactccaagtatttcacaaaygcatctgccattttcctcatttaaaccttggttatcttggcctgataccacataaaagaatgtagaatggctgaagagatcaagaatttaaagcttctagtcttaacatacttgcatccacttcaaattcaaatcaaaagccagggaaatctaagtgcaaccctaccacttctctgctgagaaccttccagtggttcccctcaccttctgcagaagtctccaatatggagtacatgcacttgggcatttaatatataccactggtgtgtgtgggagggagggaggaggaatactagccctttttatatatttacacaagcaaaacttttaaatatttgaattgacagttacatgtttcataacttygtatgtctattggttgtgcaggtgtaattttttccctttttgattagggttacaaaatttagagaccagtatgattaagttgaagctccttagcctccttcgacctagtctctgcatacctcaacttttacgtaccaatgctactctgctgttcacaattgcctcatgtaatctgcagattcctgcctccccactttggttcagtctgtcttgtgcacctggaacaactgttctcccttgtgactaattcctattttctagagtttaggcatcatctcttcctttgggaagttatctgattcacgactgccttctctgacatccccaccttcctctgtgcccccatagcactgtgtataccgctactaccactgcaattcacattatattggaatgaayaattcacatgtctaccacaagtctgtaaacataaccttatttgaaatgaatwgcaataaagctctgttacaacgt

SEQ ID NO: 4297 - DNA, 1947 bp, Homo sapiens
gactggaggagcacaggccttggaaaggaaagcagctgagatccagaggagtggaaggctcccccttgactaaagctaaacaccagtttctcaggaggatgccttgaatctcatgaacgagaatatagacattctggagacagcgatcaagcaggcagctgagcagggtgctcgaatcattgtgactccagaagatgcactttatggatggaaatttaccagggaaactgttttcccttatctggaggatatcccagaccctcaggtgaactggattccgtgtcaagacccccacagatttggtcacacaccagtacaagcaagactcagctgcctggccaaggacaactctatctatgtcttggcaaatttgggggacaaaaagccatgtaattcccgtgactccacrtgtcctcctaatggctactttcaatacaataccaatgtggtgtataatacagaaggaaaactcgtggcacgttaccataagtaccacctgtactctgagcctcagtttaatgtccctgaaaagccrgagttggtgactttcaacaccgcatttggaagktttggcattttcacgtgctttgatatattcttctatkatcctggtgttaccctggtgaaagatttccatgtggacaccatactgtttcccacagcttggatgaacrttttgccccttttgacagctattgaattccattcagcttgggcaatgggaatgggagttaatcttcttgtggccaacacacatcatgtcagcctaaatatgacaggaagtggyatttatgcaccaaatggtcccaaagtgtatcattatgacatgaagacagagttgggaaaacttctcctttcagaggtggattcacatcccctatcctcgcttgcctacccaacagctgttaattggaatgcctacgccaccaccatcaaaccatttccagtacagaaaaacactttcaggggatttatttccagggatgggttcaacttcacagarctttttgaaaatgcaggaaaccttacagtctgtcaaaaggagctttgctgtcatttaagctacagaatgttacaaaaagaagagaatgaagtatacgttctaggagcttttacaggattacatggccraaggagaagagagtactggcaggtctgcacamtgctgaagtgcaaaactactaatttgacaacttgtggacggccagtagaaactgcttctacaagatttgaaatgttctccctcagtggcacatttggaacagagtatgtttttcctgaagtgctacttaccgaaattcatctgtcacctggaaaatttgaggtgctgaaagatgggcgtttggtaaacaagaatggatcatctgggcctatactaacagtgtcactctttgggaggtggtacacaaaggactcactttacagctcatgtgggaccagcaattcagcaataacttacctgctaatattcatattattaatgatcatagctttgcaaaatattgtaatgttatagggcgtctctttatcactcagcttctgcatcataygcttggctgaatgtgtttatcggcttcccaagtttactaagaaactttgaagggctatttcagtagtatagaccagtgagtcctaaatattttttctcatcaataattattttttaagtattatgataatgttgtccatttttttggctactctgaaatgttgcagtgtggaacaatggaaagagcctgggtgtttgggtcagataaatgaagatcaaactccagctccagcctcatttgcttgagactttgtgtgtatgggggacttgtatgtatgggagtgaggagtttcagggccattgcaaacatagctgtgcccttgaagagaatagtaatgatgggaatttagaggtttatgactgaattccctttgacattaaagactatttgaattcac

SEQ ID NO: 4298 - DNA, 2005 bp, Homo sapiens
aaaccttggccatggtcacttcctcttttccaatctctgtggcagtttttgccctaataamcctgcaggttggtactcaggacagttttatagctgcagygtatgaacatgctgtcattttgccaaataaaacagaaacaccagtttctcaggaggatgccttgaatctcatgaacgagaatatagacattctggagacagcgatcaagcaggcagctgagcagggtgctcgaatcattgtgactccagaagatgcactttatggatggaaatttaccagggaaactgttttcccttatctggaggatatcccagaccctcaggtgaactggattccgtgtcaagacccccacagatttggtcacacaccagtacaagcaagactcagctgcctggccaaggacaactctatctatgtcttggcaaatttgggggacaaaaagccatgtaattcccgtgactccacrtgtcctcctaatggctactttcaatacaataccaatgtggtgtataatacagaaggaaaactcgtggcacgttaccataagtaccacctgtactctgagcctcagtttaatgtccctgaaaagccrgagttggtgactttcaacaccgcatttggaagktttggcattttcacgtgctttgatatattcttctatkatcctggtgttaccctggtgaaagatttccatgtggacaccatactgtttcccacagcttggatgaacrttttgccccttttgacagctattgaattccattcagcttgggcaatgggaatgggagttaatcttcttgtggccaacacacatcatgtcagcctaaatatgacaggaagtggyatttatgcaccaaatggtcccaaagtgtatcattatgacatgaagacagagttgggaaaacttctcctttcagaggtggattcacatcccctatcctcgcttgcctacccaacagctgttaattggaatgcctacgccaccaccatcaaaccatttccagtacagaaaaacactttcaggggatttatttccagggatgggttcaacttcacagarctttttgaaaatgcaggaaaccttacagtctgtcaaaaggagctttgctgtcatttaagctacagaatgttacaaaaagaagagaatgaagtatacgttctaggagcttttacaggattacatggccraaggagaagagagtactggcaggtctgcacamtgctgaagtgcaaaactactaatttgacaacttgtggacggccagtagaaactgcttctacaagatttgaaatgttctccctcagtggcacatttggaacagagtatgtttttcctgaagtgctacttaccgaaattcatctgtcacctggaaaatttgaggtgctgaaagatgggcgtttggtaaacaagaatggatcatctgggcctatactaacagtgtcactctttgggaggtggtacacaaaggactcactttacagctcatgtgggaccagcaattcagcaataacttacctgctaatattcatattattaatgatcatagctttgcaaaatattgtaatgttatagggcgtctctttatcactcagcttctgcatcataygcttggctgaatgtgtttatcggcttcccaagtttactaagaaactttgaagggctatttcagtagtatagaccagtgagtcctaaatattttttctcatcaataattattttttaagtattatgataatgttgtccatttttttggctactctgaaatgttgcagtgtggaacaatggaaagagcctgggtgtttgggtcagataaatgaagatcaaactccagctccagcctcatttgcttgagactttgtgtgtatgggggacttgtatgtatgggagtgaggagtttcagggccattgcaaacatagctgtgcccttgaagagaatagtaatgatgggaatttagaggtttatgactgaattccctttgacattaaagactatttgaattcac

SEQ ID NO: 4299 - DNA, 3076 bp, Homo sapiens
ccacgtgaagttgtcgctgccttagagagggggaaagagctgcgggaaaagccggggagtgacgactgcggcggctgggcgcgctctctcattttcttttcttctcctttcccccctgtcgcagtccggagttttggctcctctcctttcctcctccccctcggagccggcttctccctccgccccgcttctcccccgcttgtgtacgctatttgttgtggggtggccgaaggggatgtcctgttttcaccagaggcacagcgcgaaggggaaacttcgacactggaaggaacgagaataaatacttaattacggacgcactgaaccgcggctgggacagacacttcgggaacccgaggcggaccgggcgacgagatagtcatttttacttgaaggaagctgcttctacttgggagtggcaggagaagtgagaaaaccacatggaagactcccaggatttaaatgaacaatcagtaaagaaaacgtgcacagaatcagatgtttcacaatctcagaattccaggtctatggaaatgcaggacytagcaagycctcatactcttgttggaggtggtgatactccaggtagctccaaactggaaaaatctaatctcagcagcacatcagttactacaaatgggacaggaggggaaaacatgactgttttaaacacagcagactggttgctgagttgcaacaccccctcttctgcaacaatgtctcttcttgcagtcaaaacagagcccttgaacagcagtgaaaccacagccacgactggagatggagcgcttgacacttttactgggtcagtaattacaagtagtggctacagccccagatcagcacatcagtattccccacagctgtatccttccaagccctatccacacattctttctacaccagcagctcaaacaatgtctgcctatgcaggccagactcagtattcggggatgcagcagccagccgtctacacagcctactcacagacaggacagccctacagcttgcccacttacgatttgggtgtgatgttgccagccatcaagacagagagtggactttcccaaactcagtccccattacagagtggctgcctcagttacagcccagggttctctaccccacagccaggccagacaccttattcttaccaaatgccaggttctagttttgcaccatcatctactatttatgcaaataattcagtttccaattcaacgaatttcagtggttcacaacaggattatccatcctatacagcctttrgccaaaaccagtatgcacagtattattcagcatcaacgtatggagcgtatatgacatcgaataacacagccgatggcacaccctcttcaacctctacttatcagttgcaggaatctctcccaggactgactaaccaaccaggagagttcgataccatgcagagtccctccacacccatcaaagatcttgatgagagaacctgtaggagttctgggtcaaagtccagaggaagaggccggaaaaataatccctccccgcctcctgatagtgacctggagcgtgtgtttgtctgggatttggatgaaaccatcattgtttttcactcactgctcaccgggtcttatgcacagaagtatggcaaggatccccccatggctgtaacccttggactccgcatggaagaaatgatttttaatcttgctgatactcatttgttttttaatgatttagaggagtgtgatcaagttcatatagatgatgtttcctctgatgataatgggcaggacttaagtacctacagttttgcaactgatggcttccatgcagctgcaagtagtgcaaacctttgtttgccaacaggtgtaagaggaggggttgactggatgaggaagttggcttttcgttacagaagagtaaaagaattatataacacctacaagaacaacgttggaggactccttggccctgccaagagggatgcctggctacagttaagggcagagattgaaggtctgacagattcctggctaacaaatgcacttaagtctttatcaattattagcactaggagtaactgcataaatgtcttggtaacgacaactcaactgatcccrgcacttgcgaaggttctactctatagtttaggaggtgctttccccattgagaatatttacagtgcaactaaaataggaaaagaaagttgctttgaaygaataatgcaaaggtttggcagaaaagtagtgtatgttgtaattggggatggtgtagaagaagaacaggcagcaaaaaagcacaacatgcccttctggaggatatccagtcactcagacctcctggctctccaccaagcactggaattagagtatttgtaactgtgttctttagccggagatcyattttttatatttcaagtacactgaatttttatgtgtgattcaatgcctctggctctacacatataaattgtcttaatggatgaaatcatatttggaataaaaattccagaatgaagaattcagattgctgaatggagttaaactttagtgctacagaaaagaaactctatggtcttatatttacaacactttaatgggttttttaaaaatctgtggaggttgctggtacacaccaaatgagtccaaactggaatgagcagctttagcaaagaactcttacctggcaaagcagcaacacacatgctccgtctgacaaggtggtcaacaacattcctcaaaatgggagatcttctcagccctgaggtttgaatctgactttagcctacctaacccagaaaatctgaattggaatgcactcagactgtataaggacagtcctatttagacatgtaatttgtgtaaattattgatgaaaataatttactgtgactttattagcagctgactttcaaagtggatgcaatttttctttcttttgttggggaggggaatgggaggggaaatgggaatataatattgtctcttttttaagtttggcaaacagaatgttcatactgatgtgttgtgccttaaagacaagacagcatttgtgtgttacaatgtaactttggttaaaatctctgtagataatg

SEQ ID NO: 4300 - DNA, 1092 bp, Homo sapiens
gcgcgaccgaccgagcagctccgaggagtccgcccggaaacaaacattccccagggcaatgtcacgacttggtcttcccgaggagccagtcagaaacagtttgctagatgatgctaaggcccgcttaagaaagtatgatattggaggcaaatattctcacttgccatataacaaatactccgtccttttgccattggtggctaaagaaggaaaactccatttgttgttcaccgtccggtcagagaagctaagaagggcccctggagaagtttgcttccctggaggtaagcgtgaccctacagacatggatgatgcagccacagctctccgggaagcccaggaggaagtgggtctccrtcctcaccaagtggaagttgtctgctgcctggtgccatgtcttattgatacagatacattgataactccatttgtgggtttaatagaccacaacttccaggcccagccgaatcctgctgaagttaaggatgtattcctggtgcctctggcctatttcctgcatccacaggtccatgaccagcattacgtcacacgtcttggtcaccgttttattaatcatatctttgagtacacaaaccctgragacggtgtcacttaccagatcaagggaatgacggcaaaccttgcagtgttggtggcctttatcattttggaaaaaaaacccacctttgaggttcaatttaatcttaatgatgtattagcatcctctgaagagttattcctgaaggttcataaaaaagctacaagcaggttatgatttactagagcaagagacaaagaactattcacgaggattctgtgtgtgcttattcrtagaacaacaacartgccagctgttggaatttgacaggtgtgaatattttttctgcagtatgtagttagaatccttgcctcttttccagttgccttctattgttttaggccaatgggttatgggtgaaagttgactttccaggtcatctccaatctaagacataagccagtgttcttgagtccctttggttctttttttccatgagctgcaacatggacttctctgcaacccagccttgaccatacaaatgaggacattct

SEQ ID NO: 4301 - DNA, 927 bp, Homo sapiens
gcgcgaccgaccgagcagctccgaggagtccgcccggaaacaaacattccccagggcaatgtcacgacttggtcttcccgaggagccagtcagaaacagtttgctagatgatgctaaggcccgcttaagaaagtatgatattggaggcaaatattctcacttgccatataacaaatactccgtccttttgccattggtggctaaagaaggaaaactccatttgttgttcaccgtccggtcagagaagacagatacattgataactccatttgtgggtttaatagaccacaacttccaggcccagccgaatcctgctgaagttaaggatgtattcctggtgcctctggcctatttcctgcatccacaggtccatgaccagcattacgtcacacgtcttggtcaccgttttattaatcatatctttgagtacacaaaccctgragacggtgtcacttaccagatcaagggaatgacggcaaaccttgcagtgttggtggcctttatcattttggaaaaaaaacccacctttgaggttcaatttaatcttaatgatgtattagcatcctctgaagagttattcctgaaggttcataaaaaagctacaagcaggttatgatttactagagcaagagacaaagaactattcacgaggattctgtgtgtgcttattcrtagaacaacaacartgccagctgttggaatttgacaggtgtgaatattttttctgcagtatgtagttagaatccttgcctcttttccagttgccttctattgtctgaaaaagtaaaagccattcaaaaatgaaaactatgttcatagtgttgcatrttttcacccacaatatgttaataatatttttcttacacatataataaagaatatctggcacatactaggcccttaataaagattttttgaatatataac

SEQ ID NO: 4302 - DNA, 2535 bp, Homo sapiens
gcgccagggctggacgcggcgaggtgggaggcaggatggaggggcgggagccaaggccgagggggcggacacgggtggcgtctggcgctccataaagsggttgcgggggccgcgctctcttctgggagggcagcggccaccggcgaggaacacggcgcgatgcaggttcagtgccagcagagcccagtgctggcaggcagcgccactttggtcgcccttggggcactggccttgtacgtcgcgaagccctccggctacrggaagcacacggagagcctgaagccggcggctacccgcctgccarcccgcgccgcctggttccwgcrggagctgccttccttcgcggtgcccgcggggatcctcgcccggcagcccctctccctcttcgggccacctgggacggtacttctgggcctcttctgcstacattacttccacaggacatttgtgtactcactgctcaatcgagggaggccttatccagctatactcawtstcagagrcactgccttctgcactggaaatggagtccttcraggctactatctgatttactgtgctgaataccctgatgggtggtacacagacatacggtttagcttgggtgtcttcttatttattttgggaatgggaataaacattcatagtgwctatatattgcgccagctcaggaagcctggagaaatcagctacaggattccacaargtggcttgtttacgtatgtttctggagccaatttcctcggtgasatcattraatggatcrgctatgccctggmcacttggtccctccsagcacttgyatttgcatttttctcactttgtttccttgggctgyrarcttttcaccrccataggttctacctcaagatgtttgaggactaccccaaatctcggaaagcccttattccattcatcttttaaaggaaccaaattaaaaaggagcagagctcccacaatgctgatgaaaactgtcaagctgctgaaactgtaattttcatgatataatagtcccgtatatatgtaatagtaggtctcctggcgttctgccagctggcctggggattctgagtggtgtctgcttagagtttactcctacccttccagggacccctatcctgatccccaactgaagcttcaaaaagccacttttccaaatggcgacagttgcttcttagctattgctctgagaaagtacaaacttctcctatgtctttcaccgggcaatccaagtacatgtggcttcatacccactccctgtcaatgcaggacaactctgtaatcaagaattttttgacttgaaggcagtacttatagaccttattaaaggtatgcattttatacatgtaacagagtagcagaaatttaaactctgaagccacaaagacccagagcaaacccactcccaaatgaaaaccccagtcatggcttcctttttcttggttaattaggaaagatgagaaattattaggtagaccttgaatacaggagccctctcctcatagtgctgaaaagatactgatgcattgacctcatttcaaatttgtgcagtgtcttagttgatgagtgcctctgttttccagaagatttcacaatccccggaaaactggtatggctattcttgaaggccaggttttaataaccacaaacaaaaaggcatgaacctgggtggcttatgagagagtagagaacaacatgaccctggatggctactaagaggatagagaacagttttacaatagacattgcaaactctcatgtttttggaaactrgtggcaatatccaaataatgagtagtgtaaaacaaagagaattaatgatgaggttacatgctgcttgcctccaccagatgtccacaacaatatgaagtacagcagaagccccaagcaactttcctttcctggagcttcttccttgtagttctcaggacctgttcaagaaggtgtctcctaggggcagcctgaatgcctccctcaaaggacctgcaggcagagactgaaaattgcagacagaggggcacgtctgggcagaaaacctgttttgtttggctcagacatatagttttttttttttttacaaagtttcaaaaacttaaaaatcaggagattccttcataaaactctagcattctagtttcatttaaaaagttggaggatctgaacatacagagcccacatttccacaccagaactggaactacgtagctagtaagcatttgagtttgcaaactcttgtgaaggggtcaccccagcatgagtgctgagatatggactctctaaggaaggggccgaacgcttgtaattggaatacatggaaatatttgtcttctcaggcctatgtttgcggaatgcattgtcaatatttagcaaactgttttgacaaatgagcaccagtggtactaagcacagaaactcactatataagtcacataggaaacttgaaaggtctgaggatgatgtagattactgaaaaatrcaaattgcaatcatataaataagtgtttttgttgttcattaaatacctttaaatcatgg

SEQ ID NO: 4303 - DNA, 1262 bp, Homo sapiens
cagacacactacttttcagaactgtattaagaactgtaacagtcactgcgagggtcygcggcttcattcttgatgtcagcgagaccaagaatccaccagaaggaaccaattccagacacagaattatttgccttcttacttcctgagagttctaggcacagaacatacttgaggtgttatacaaagttgttctcaggtctgaattcaaaatggcctcatctcctgctgtccttcgagcgtcccggctgtaccaatggagcctgaagagttcggcgcagttcctggggtctccacagctgaggcagaacctgggccctttcctgggattgtggacatgttcggaactggaggtggcctgctggagtatcgggctagtctgctggctgggaagggttttgctgtgatggctctggcttattataactatgaagacctccccaagaccatggagacgctccatctggagtactttgaagaagccatgaactacttgctcagtcatcccgaggtaaaaggtccaggagttgggctgcttggaatttccaaagggggtgagctctgcctttccatggcctctttcctgaagggcatcacggctgctgtcgtcatcaacggctctgtggccaatgttgggggaaccttacrctacaagggcgagaccctgccccctgtgggcgtcaacagaaatcgcatcaaggtgaccaaagatggctatgcagacattgtggatgtcctgaacagccctttggaaggacctgaccagaagagcttcattcctgtggaaagggcagagagcaccttcctgttcctggtaggtcaggatgaccacaactggaagagtgagttctatgctaatgaggcctgtaaacgcttgcaggcccatgggaggagaaagccccagatcatctgttacccagagacagggcactatattgagcctccttacttccccctgtgtcgggcttccctgcatgccttggtgggcagtcctattatctggggaggggagcccagggctcatgccatggctcaggtggatgcttggaaacaactccagactttcttccacaaacacttgggtggccrcgaggggacaatcccatcaaaagtgtaaattttatttgatcatgtggcctctctsttgctaatctctcctggaaacatctgccacatttagtgtgtgtatgtgtattcattcttttgtttwtaatamytaaagttttttcccctcattattaaaatgaatttaccagtaagaatga

SEQ ID NO: 4304 - DNA, 2188 bp, Homo sapiens
tcatgcctgtaaatcctagcattttgggaggctgaggcgggcggattacaaagtcaggagtttgagaaattactacctattaccccatttggctatttttacacttgtaaggaatgaagctcagaggtcacacagctagtaagaagccagcacccttcgatgtgggattgatgtggaggataggcatatacagagaacacaaaagcaaaacaccatggtgcagattttgaaagaaaagccctaagattagtaatgagtgtgaattattcaacaaagtgatcaaaactaactccagctctgcattcctcttcgccrtcaggagtttggagcctggagactgctagctgcctggttctttaagaaccagccctggtccagcccattccgcaggccagcaagcttctgaaaagcaaacctaggaagtagctttccaacataaagtggaggtttcaacacaggagactttaagcaagttccagtgtgtctatatttggtctggctgatcggctggactctggccttccccgctcacgttagcagacagctctgccctagtgggcgcttagcctgcgacggcagcccgagaggatgtctaacaagcttctttctccccacccccattcagttgttctcaggtctgaattcaaaatggcctcatctcctgctgtccttcgagcgtcccggctgtaccaatggagcctgaagagttcggcgcagttcctggggtctccacagctgaggcaggttggtcagatcattagggttcctgctcggatggcggcgacgctgatcctggagcctgcgggccgctgctgctgggacgaaccggtgcgaatcgccgtgcgcggcctagccccggagcagccggtcacgctgcgcgcgtccctgcgcgacgagaagggcgcgcttttccaggcccacgcgcgctaccgcgccgacacycttggcgagctggacctggagcgcgcgcccgcgctgggcggcagcttcgcggggcttgagcccatggggctkctctgggccttggagcccgagaaacctttggtgcggctggtgaagcgcgacgtgcgaacgcccttggccgtggagctggaggtgctggatggccacgaccccgaccccgggcggctgctgtgccagacgcggcacgagcgctacttcctcccgcccggggtgcggcgcgagccggtgcgcgtgggccgggtgcgakgcacgctcttcctgccgccagaacctgggccctttcctgggattgtggacatgttcggaactggaggtggcctgctggagtatcgggctagtctgctggctgggaagggttttgctgtgatggctctggcttattataactatgaagacctccccaagaccatggagacgctccatctggagtactttgaagaagccatgaactacttgctcagtcatcccgaggtaaaaggtccaggagttgggctgcttggaatttccaaagggggtgagctctgcctttccatggcctctttcctgaagggcatcacggctgctgtcgtcatcaacggctctgtggccaatgttgggggaaccttacrctacaagggcgagaccctgccccctgtgggcgtcaacagaaatcgcatcaaggtgaccaaagatggctatgcagacattgtggatgtcctgaacagccctttggaaggacctgaccagaagagcttcattcctgtggaaagggcagagagcaccttcctgttcctggtaggtcaggatgaccacaactggaagagtgagttctatgctaatgaggcctgtaaacgcttgcaggcccatgggaggagaaagccccagatcatctgttacccagagacagggcactatattgagcctccttacttccccctgtgtcgggcttccctgcatgccttggtgggcagtcctattatctggggaggggagcccagggctcatgccatggctcaggtggatgcttggaaacaactccagactttcttccacaaacacttgggtggccrcgaggggacaatcccatcaaaagtgtaaattttatttgatcatgtggcctctctsttgctaatctctcctggaaacatctgccacatttagtgtgtgtatgtgtattcattcttttgtttwtaatamytaaagttttttcccctcattattaaaatgaatttaccagtaagaatga

SEQ ID NO: 4305 - DNA, 2201 bp, Homo sapiens
gggaggctgactgagcaggagtcgtctgcttgtagtggaggctgctaggagccggtcagagggattcatgcataaaattttccatcccaacactgacgacgcgtcaggaactgtgtgtctagatgtaattaatcaaacytggacagctctctatgatcttaccaatatatttgagtccttcctgccccagttrttggcctatcctaaccccatagatcctctcaatggtgaagatgcagccatgtacctccaaagaccagaagaatacaagcagaaaattaaagagtacatccagaaatacaccacggagcaggcgctgaaagagcaggaagagggtaccagggacagctcatcggagagctctatatctgacttttccaaagatgaggcccaggatatggagttgtagtagaaaaagcacctgcttttcagaaagactattgtttcctaaccatgagaagcagactataatattcatatttaaacacagcaatttttttatgactaaacaaggtttttatgaataaaagcattgatatatatatattatatatcaccctttagatcttgatttcctggtcgtttctcaacctgaggtgcatagcatattcccacattccatttggtagcaatatgcggtccgaatgcatgcattcatgagtccatgtggccaagtcagcctgtgtgctactgaactgtcaaaggaaatagccgctctgataggtagacgtaagaagaacgggaaaaaaatcgcttcttttattgatggttccaaagaaacaaaccaaaccaaccagctcttggatgtgaagataaaatagtgcttttctgaaatggaaaggaaaaacttggggaggaaggggcctgctgtggggacattagagccagccacataagaatcagagctactacttcctgtgaatcctaggtggccctatgtcttctgtggagttacagtataaaacagggagctaattagagtattaaaacttaaaaccgttttttgactctgattttcagtacgtttttacatgtcggttcctgcccttcacactaccaggccctgcagccacagtgttctgttggagaaacttggagaagtgctttctgaaccggttctttttcttggggtagagcttgtaatccagacctgtttttcaaaggacagcacaagaggagaaaagtgactgggacgatgcttcctctcatccaaaacacgtgcagagtcacatcctcatcctagtgtttggcagtttgagactgctaccctgaacttaagagctttaaatatgagagttgttgtgtggggggggtttttttttggtgtgtgtgtgtgtgtgtattgtgcttagaaaggttgcagatttcatcttcacctaccaagaggcagccgcctccttggacaagccgctcatggacctttagacttgagaagacccgtgtggtgactgcaaagccctgggtacttgccttcatgttttggtttggttttccctttttctgctgctcttggcagcagcctgatcatcatctgcttgtgggagtgggaaatgggtattttagacccaacacaggttctaaatttaaaaaaataataattggagcaaataaaggttcttgtacccagagtgattctacatgggaaaaacaaaccagctttttttcagagagtgaccgaataggaagaagggattcagaaatatgatgtagtagaacatgccctgcaggaagaaaatgtgttctctcctgtgtatgttaagaggaaatcagtttaaaatgcctgctaatcaaatgttgtctcagctaaccgtatgtccaggttgctgcagagtttctttcaaatctgagtgttgcctgctgaactcagatgggagtttgaagaaattttagacagcagctctgtattctttttttgctgcagccaataagataatagcagaatttgccaatcctaagaccttctgaagacgatttttgagcatcccactgggattatttaatttttctttttgacgtgtgtttttagtttggaaatgctgtattccacaaggtttaagtcagtgaggttggaagatgccctatcttttttattgaaaaagcacaatcaatcttttgtttgaaaatctatataaagtacaacttgcttttagcatgattattttcctaaataaaaagacaaagaatttacttactttatgtaa

SEQ ID NO: 4306 - DNA, 1063 bp, Homo sapiens
ccccggcccacaagcccctgcagggagcgggcccgggcggcgcgcgatcgaggtcgggtcgccgtccagcctgcagcatgagcgcccccagcgcgacccccatcttcgcgcccggcgagaactgcagccccgcgtggggggcggcgcccgcggcctacgacgcagcggacacgcacctgcgcatcctgggcaagccggtgatggagcgctgggagaccccctatatgcacgcgctggccgccgccgcctcctccaaagggggccgggtcctggaggtgggctttggcatggccatcgcagcgtcaaaggtgcaggaggcgcccattgatgagcattggatcatcgagtgcaatgacggcgtcttccagcggctccgggactgggccccacggcagacacacaaggtcatccccttgaaaggcctgtgggaggatgtggcacccaccctgcctgacggtcactttgatgggatcctgtacgacacgtacccactctcggaggagacctggcacacacaccagttcaacttcatcaagaaccacgcctttcgcctgctgaagccggggggcgtcctcacctactgcaacctcacctcctggggggagctgatgaagtccaagtactcagacatcaccatcatgtttgaggagacgcaggtgcccgcgctgctggaggccggcttccggagggagaacatccgtayggaggtgatggcgctggtcccaccggccgactgccgctactacgccttcccacagatgatcacgcccctggtgaccaaaggctgagcccccacccyggcccggccacacccatgccctcctccgtgccttcctggccgggagtccagggtgtcgcaccagccctgggctgatcmcagctgtgtgtcaccagaagctttcccggcttctctgtgaggggtcccaccagcccmgggcygatcccagctgtgtgtcaccagcagctttcccagcttctctgtgagggtcactgctgcccactgcagggtccctgaggtgaagtaaacgccggcgctgggcttggccagtcggcagtgagcgtg

SEQ ID NO: 4307 - DNA, 950 bp, Homo sapiens
actcctcctcccagacgtccctgcgcgtcgtcctcctcgccctccaggccgcccgcgccgcgccggagtccgctgtccgccagctacccgcttcctgccgcccgccgctgccatgctgcccgccgcgctgctccgccgcccgggacttggccgcctcgtccgccacgcccgtgcctatgccgaggccgccgccgccccggctgccgcctctggccccaaccagatgtccttcaccttcgcctctcccacgcaggtgttcttcaacggtgccaacgtccggcaggtggacgtgcccacgctgaccggagccttcggcatcctggcggcccacgtgcccacgctgcaggtcctgcggccggggctggtcgtggtscatgcagaggacggcaccacctccaaatactttgtgagcagcggttccatcgcagtgaacgccgactcttcggtgcagttgttgrccgaagaggccgtgacgctggacatgttggacctgggggcagccaaggcaaacttggagaaggcccaggcggagctggtggggacagctgacgaggccacgcgggcagagatccagatccgaatcgaggccaacgaggccctggtgaaggccctggagtaggcggtgcgtacccggtgtcccgaggcccggccaggggctgggcagggatgccaggaggccaccagagggcagtgcaggcttctgcctgggccccaggccctgcctgtgttgaaagctytggggactgggccagggaagctcctcctcagctttgagctgtggctgccacccatggggctctccttccgcctytcaagatccccccagcctgacgggccgcttaccatcccctytgccctgcagagccagccgccaaggttgacctcagcttcggagccacctytggatgaactgcccccagcccccgccccattaaagacccggaagcctg

SEQ ID NO: 4308 - DNA, 713 bp, Homo sapiens
actcctcctcccagacgtccctgcgcgtcgtcctcctcgccctccaggccgcccgcgccgcgccggagtccgctgtccgccagctacccgcttcctgccgcccgccgctgccatgctgcccgccgcgctgctccgccgcccgggacttggccgcctcgtccgccacgcccgtgcctatgccgaggccgccgccgccccggctgccgcctctggccccaaccagatgtccttcaccttcgcctctcccacgcaggtgttcttcaacggtgccaacgtccggcaggtggacgtgcccacgctgaccggagccttcggcatcctggcggcccacgtgcccacgctgcaggtcctgcggccggggctggtcgtggtscatgcagaggacggcaccacctccaaatactttgtgagcagcggttccatcgcagtgaacgccgactcttcggtgcagttgttgrccgaagaggccgtgacgctggacatgttggacctgggggcagccaaggcaaacttggagaaggcccaggcggagctggtggggacagctgacgaggccacgcgggcagagatccagatccgaatcgaggccaacgaggccctggtgaaggccctggagtaggcgagccagccgccaaggttgacctcagcttcggagccacctytggatgaactgcccccagcccccgccccattaaagacccggaagcctgact

SEQ ID NO: 4309 - DNA, 1009 bp, Homo sapiens
actcctcctcccagacgtccctgcgcgtcgtcctcctcgccctccaggccgcccgcgccgcgccggagtccgctgtccgccagctacccgcttcctgccgcccgccgctgccatgctgcccgccgcgctgctccgccgcccgggacttggccgcctcgtccgccacgcccgtgcctatgccgaggccgccgccgccccggctgccgcctctggccccaaccagatgtccttcaccttcgcctctcccacgcaggtgttcttcaacggtgccaacgtccggcaggtggacgtgcccacgctgaccggagccttcggcatcctggcggcccacgtgcccacgctgcaggtcctgcggccggggctggtcgtggtscatgcagaggacggcaccacctccaaatactttgtgagcagcggttccatcgcagtgaacgccgactcttcggtgcagttgttgrccgaagaggccgtgacgctggacatgttggacctgggggcagccaaggcaaacttggagaaggcccaggcggagctggtggggacagctgacgaggccacgcgggcagagatccagatccgaatcgaggccaacgaggccctggtgaaggccctggagtaggcggtgcgtacccggtgtcccgaggcccggccaggggctgggcagggatgccaggtgggcccagccagctcctggggtcccsgccacctggggaagccgcgcctgccaaggaggccaccagagggcagtgcaggcttctgcctgggccccaggccctgcctgtgttgaaagctytggggactgggccagggaagctcctcctcagctttgagctgtggctgccacccatggggctctccttccgcctytcaagatccccccagcctgacgggccgcttaccatcccctytgccctgcagagccagccgccaaggttgacctcagcttcggagccacctytggatgaactgcccccagcccccgccccattaaagacccggaagcctgact

SEQ ID NO: 4310 - DNA, 1474 bp, Homo sapiens
crcgsagaaggggtgcgagcrgcggcggcggcggaggctgccatggacgacgaggaggagacgtaccggctctggaaaatccgcaagaccatcatgcagaggagcccaaggtgggcatcaagaccatcaaggtgtactgccagcgcatgcaggaggagaacatcacacgggctctcatcgtggtgcagcagggcatgacaccctccgccaagcagtccctggtcgacatggccsccaagtacatcctggagcagtttctgcagcaggagctgctcatcaacatcacggagcaygagctagtccctgagcacgtcgtcatgaccaaggaggaggtgacagagctgctggcccgatataagctccgagagaaccagctgcccaggatccaggcgggggaccctgtggcgcgctactttgggataaagcgtgggcaggtggtgaagatcatccggcccagtgagacggctggcaggtacatcacctaccggctggtgcagtagctaccgcctgacagcccctagaggcggacacacagcgacccccatccctgcaggacaaacgcccctgccctgccagaatccggcccccacagctstcacggctgctgctcctctggactccccaaggcaggtggcctccacccacgttctcccgtcctggggtgaggcttcctgtggcccagcccgccccattcacctgtggatttgtgcgagatgcagcctcagaaggaacaaggcccccagagggaggtcacctgggggcagctggtgccgggtcttcacccagaccacgctgggtcccctctgttgggggtttggggtccgggtctcccaccagccactgcttcctcctgggccctcggccttccacccctcgtcttccctccctcgggggccctgatgcgtggcggcccccrcccggcctcggctctttactccattcacagccrtgcacgcgctcaagccaccagggtgcgagatgccagctctggagttctcggttgttgtaggaggttgggtgttttcaaatggtaaagatgttttgagcaaataaatttgcttgatacagaaaccaggccgactaacaaggtttccagcaggtggccttgcctcacsccaagcacacgaggtcagcctggcaggtgtgccctcctcgmgctggcttcaggggtcagtgtctccccaggccctcgccctgccctcccacttcgtgctcctgggtaaggcgtgagcgtgtctgtctcttcccttcccgtgagggtgtggagttgttctctggcttgtgcagctgtggtttgcggccagttcctcttacagacgtttgggatctggctctacttccccgtttgcttactgtctgatttcagaaggcctcgcctgcccaagtttaacctagccacgtggttctctcacagtagctttattaagatgtaattcaccctcgggcggtcggtggtctgtaacgcgcccactgt

SEQ ID NO: 4311 - DNA, 1785 bp, Homo sapiens
agtccgcgcgggttctcgcrcgsagaaggggtgcgagcrgcggcggcggcggaggctgccatggacgacgaggaggagacgtaccggctctggaaaatccgcaagaccatcatgcagctgtgccacgaccgtggctatctggtgacccaggacgagcttgaccagaccctggaggagttcaaagcccaatttggggacaagccgagtgaggggcgkccgcggcgcacggacctcaccgtgctggtggcccacaacgatgaccccaccgaccagatgtttgtgttctttccagaggagcccaaggtgggcatcaagaccatcaaggtgtactgccagcgcatgcaggaggagaacatcacacgggctctcatcgtggtgcagcagggcatgacaccctccgccaagcagtccctggtcgacatggccsccaagtacatcctggagcagtttctgcagcaggagctgctcatcaacatcacggagcaygagctagtccctgagcacgtcgtcatgaccaaggaggaggtgacagagctgctggcccgatacagtaagctccgagagaaccagctgcccaggatccaggcgggggaccctgtggcgcgctactttgggataaagcgtgggcaggtggtgaagatcatccggcccagtgagacggctggcaggtacatcacctaccggctggtgcagtagctaccgcctgacagcccctagaggcggacacacagcgacccccatccctgcaggacaaacgcccctgccctgccagaatccggcccccacagctstcacggctgctgctcctctggactccccaagaaaccaggccgactaacaaggtttccagcaggtggccttgcctcacsccaagcacacgaggtcagcctggcaggtgtgccctcctcgmgctggcttcagggttccacaggcgcatgggccacgtttccagtgcttggtggccatgtggggctgacgtgcgaaaccttagagccgggggatacgtccgtcatcgagaacgttttcctggactgccctgggctgcaggtggacgtgacgaggtcattcgatgcctgaccgtctgcacagcctgtggtgaagaccacccgggctcccacctcgcrgggccccgtggcggggggttcccttcctcacacatccctcccctagggggaggcccagggccacgccacggggctctctctgtcccctccctggccccttcttctaagcttgcagctgccacagaaaatcttctaagcttgcagctgccacagaaaacacccgattaaaaactttttatttcagcaaaataaacgtgcctgtgaaagaaccacacggtggcttccgagagaccccactgtgtacctgagccccaggtggccacacctggtgttctggaaaagggagtccagggccagtattcaggccctgctgtactgcaccctggaaactgcaccaaaccccagctccgcccccatccacggctcccagaatggtttctggagtccctgcaacagacctgtgaggagagggcagggcaggcttcctccatccacacagccctgtgggcaccaacaaggccactgtgacttcacacgacagcagtgttccccagctcagctgagccggggtgcaggggacaghacagggcacagtcctgtgccgcaaggccctcgtgctcctggaagcctctgggaggaggcgcccgctggtgggacgtcgaagtccaggcrctctcggcagcgaccccaggacggcgcacctaagctatgccrtggtgca

SEQ ID NO: 4312 - DNA, 1743 bp, Homo sapiens
agtccgcgcgggttctcgcrcgsagaaggggtgcgagcrgcggcggcggcggaggctgccatggacgacgaggaggagacgtaccggctctggaaaatccgcaagaccatcatgcagctgtgccacgaccgtggctatctggtgacccaggacgagcttgaccagaccctggaggagttcaaagcccaatttggggacaagccgagtgaggggcgkccgcggcgcacggacctcaccgtgctggtggcccacaacgatgaccccaccgaccagatgtttgtgttctttccagaggagcccaaggtgggcatcaagaccatcaaggtgtactgccagcgcatgcaggaggagaacatcacacgggctctcatcgtggtgcagcagggcatgacaccctccgccaagcagtccctggtcgacatggccsccaagtacatcctggagcagtttctgcagcaggagctgctcatcaacatcacggagcaygagctagtccctgagcacgtcgtcatgaccaaggaggaggtgacagagctgctggcccgatataagctccgagagaaccagctgcccaggatccaggcgggggaccctgtggcgcgctactttgggataaagcgtgggcaggtggtgaagatcatccggcccagtgagacggctggcaggtacatcacctaccggctggtgcagtagctaccgcctgacaggacaaacgcccctgccctgccagaatccggcccccacagctstcacggctgctgctcctctggactccccaagaaaccaggccgactaacaaggtttccagcaggtggccttgcctcacsccaagcacacgaggtcagcctggcaggtgtgccctcctcgmgctggcttcagggttccacaggcgcatgggccacgtttccagtgcttggtggccatgtggggctgacgtgcgaaaccttagagccgggggatacgtccgtcatcgagaacgttttcctggactgccctgggctgcaggtggacgtgacgaggtcattcgatgcctgaccgtctgcacagcctgtggtgaagaccacccgggctcccacctcgcrgggccccgtggcggggggttcccttcctcacacatccctcccctagggggaggcccagggccacgccacggggctctctctgtcccctccctggccccttcttctaagcttgcagctgccacagaaaatcttctaagcttgcagctgccacagaaaacacccgattaaaaactttttatttcagcaaaataaacgtgcctgtgaaagaaccacacggtggcttccgagagaccccactgtgtacctgagccccaggtggccacacctggtgttctggaaaagggagtccagggccagtattcaggccctgctgtactgcaccctggaaactgcaccaaaccccagctccgcccccatccacggctcccagaatggtttctggagtccctgcaacagacctgtgaggagagggcagggcaggcttcctccatccacacagccctgtgggcaccaacaaggccactgtgacttcacacgacagcagtgttccccagctcagctgagccggggtgcaggggacaghacagggcacagtcctgtgccgcaaggccctcgtgctcctggaagcctctgggaggaggcgcccgctggtgggacgtcgaagtccaggcrctctcggcagcgaccccaggacggcgcacctaagctatgccrtggtgca

SEQ ID NO: 4313 - DNA, 1667 bp, Homo sapiens
agtccgcgcgggttctcgcrcgsagaaggggtgcgagcrgcggcggcggcggaggctgccatggacgacgaggaggagacgtaccggctctggaaaatccgcaagaccatcatgcagctgtgccacgaccgtggctatctggtgacccaggacgagcttgaccagaccctggaggagttcaaagcccaatttggggacaagccgagtgaggggcgkccgcggcgcacggacctcaccgtgctggtggcccacaacgatgaccccaccgaccagatgtttgtgttctttccagaggagcccaaggtgggcatcaagaccatcaaggtgtactgccagcgcatgcaggaggagaacatcacacgggctctcatcgtggtgcagcagggcatgacaccctccgccaagcagtccctggtcgacatggccsccaagtacatcctggagcagtttctgcagcaggagctgctcatcaacatcacggagcaygagctagtccctgagcacgtcgtcatgaccaaggaggaggtgacagagctgctggcccgatataagctccgagagaaccagctgcccaggatccaggcgggggaccctgtggcgcgctactttgggataaagcgtgggcaggtggtgaagatcatccggcccagtgagacggctggcaggtacatcacctaccggctggtgcagtagctaccgcctgacagcccctagaggcggacacacagcgacccccatccctgcaggacaaacgcccctgccctgccagaatccggcccccacagctstcacggctgctgctcctctggactccccaaggcaggtggcctccacccacgttctcccgtcctggggtgaggcttcctgtggcccagcccgccccattcacctgtggatttgtgcgagatgcagcctcagaaggaacaaggcccccagagggaggtcacctgggggcagctggtgccgggtcttcacccagaccacgctgggtcccctctgttgggggtttggggtccgggtctcccaccagccactgcttcctcctgggccctcggccttccacccctcgtcttccctccctcgggggccctgatgcgtggcggcccccrcccggcctcggctctttactccattcacagccrtgcacgcgctcaagccaccagggtgcgagatgccagctctggagttctcggttgttgtaggaggttgggtgttttcaaatggtaaagatgttttgagcaaataaatttgcttgatacagaaaccaggccgactaacaaggtttccagcaggtggccttgcctcacsccaagcacacgaggtcagcctggcaggtgtgccctcctcgmgctggcttcaggggtcagtgtctccccaggccctcgccctgccctcccacttcgtgctcctgggtaaggcgtgagcgtgtctgtctcttcccttcccgtgagggtgtggagttgttctctggcttgtgcagctgtggtttgcggccagttcctcttacagacgtttgggatctggctctacttccccgtttgcttactgtctgatttcagaaggcctcgcctgcccaagtttaacctagccacgtggttctctcacagtagctttattaagatgtaattcaccctcgggcggtcggtggtctgtaacgcgcccactgt

SEQ ID NO: 4314 - DNA, 983 bp, Homo sapiens
ccaatgagcgctctggagggcgtggccgtgggaaaggaggygcggaaagccgacgcgcgtccattggtcggctggacgaggggaggagccgctggctcccagccccgccgcgatgagcctcggccgcctttgccgcctactgaagccggcgctgctctgtggggctctggccgcgcctggcctggccgggaccatgtgcgcgtcccgggacgactggcgctgtgcgcgctccatgcacgagttttccgccaaggacatcgacgggcacatggttaacctggacaagtaccggggcttcgtgtgcatcgtcaccaacgtggcctcccagtgaggcaagaccgaagtaaactacactcagctcgtcgacctgcacgcccgatacgctgagtgtggtttgcggatcctggccttcccgtgtaaccagttcgggaagcaggagccagggagtaacgaagagatcaaagagttcgccgcgggytacaacgtcaaattcgatatgttcagcaagatctgcgtgaacggggacgacgcccacccgctgtggaagtggatgaagatccaacccaagggcaagggcatcctgggaaagacagcttggggactgtggggggctgctggggacgctcacgtccatgtgcttcttttccagtgccatcaagtggaacttcaccaagttcctcatcgacaagaacggctgcgtggtgaagcgctacggacccatggaggagcccctggtgatagagaaggacctgccccactatttctagctccacaagtgtgtggccccgcccgagcccctgcccacgccctyggagccttccaccggcactyatgacggcctgcctgcaaacctgctggtggggcagacccgaaaatccagcgtgcaccccgccggaggaaggtcccatggcctgctgggcttggctcggcgcccccacccctggctaccttgtgggaataaacagacaaattagmctgctgga

SEQ ID NO: 4315 - DNA, 922 bp, Homo sapiens
ccaatgagcgctctggagggcgtggccgtgggaaaggaggygcggaaagccgacgcgcgtccattggtcggctggacgaggggaggagccgctggctcccagccccgccgcgatgagcctcggccgcctttgccgcctactgaagccggcgctgctctgtggggctctggccgcgcctggcctggccgggaccatgtgcgcgtcccgggacgactggcgctgtgcgcgctccatgcacgagttttccgccaaggacatcgacgggcacatggttaacctggacaagtaccggggcttcgtgtgcatcgtcaccaacgtggcctcccagtgaggcaagaccgaagtaaactacactcagctcgtcgacctgcacgcccgatacgctgagtgtggtttgcggatcctggccttcccgtgtaaccagttcgggaagcaggagccagggagtaacgaagagatcaaagagttcgccgcgggytacaacgtcaaattcgatatgttcagcaagatctgcgtgaacggggacgacgcccacccgctgtggaagtggatgaagatccaacccaagggcaagggcatcctgggaaatgccatcaagtggaacttcaccaagttcctcatcgacaagaacggctgcgtggtgaagcgctacggacccatggaggagcccctggtgatagagaaggacctgccccactatttctagctccacaagtgtgtggccccgcccgagcccctgcccacgccctyggagccttccaccggcactyatgacggcctgcctgcaaacctgctggtggggcagacccgaaaatccagcgtgcaccccgccggaggaaggtcccatggcctgctgggcttggctcggcgcccccacccctggctaccttgtgggaataaacagacaaattagmctgctgga

SEQ ID NO: 4316 - DNA, 866 bp, Homo sapiens
ccaatgagcgctctggagggcgtggccgtgggaaaggaggygcggaaagccgacgcgcgtccattggtcggctggacgaggggaggagccgctggctcccagccccgccgcgatgagcctcggccgcctttgccgcctactgaagccggcgctgctctgtggggctctggccgcgcctggcctggccgggaccatgtgcgcgtcccgggacgactggcgctgtgcgcgctccatgcacgagttttccgccaaggacatcgacgggcacatggttaacctggacaagtaccggggcttcgtgtgcatcgtcaccaacgtggcctcccagtgaggcaagaccgaagtaaactacactcagctcgtcgacctgcacgcccgatacgctgagtgtggtttgcggatcctggccttcccgtgtaaccagttcgggaagcaggagccagggagtaacgaagagatcaaagagttcgccgcgggytacaacgtcaaattcgatatgttcagcaagatctgcgtgaacggggacgacgcccacccgctgtggaagtggatgaagatccaacccaagggcaagggcatcctgggaaatgccatcaagtggaacttcaccaagttcctcatcgacaagaacggctgcgtggtgaagcgctacggacccatggaggagcccctggtgatagagaaggacctgccccactatttctagctccacaagtgtgtggccccgcccgagcccctgcccacgccctyggagccttccaccggcactyatgacggcctgcctgcaaacctgctggtggggcagacccggcttggctcggcgcccccacccctggctaccttgtgggaataaacagacaaattag

SEQ ID NO: 4317 - DNA, 1455 bp, Homo sapiens
ggcgtggggaaccctcaggctccagtgaccttggtggggggcgtctgggggctccccctccccacccccggccgggcacggacgcgggtgaccgtactgcgacgcgctccgcggccctccagaccgttgtaggcgcgcgggctggggtcggggaaggggaaggggttgttccacgcgcgcgggtcgtggtcggggaaggggccgtccaggccgttgcaggcgcgcgtgccggggccggsgtcgggggtccaagcttgcagggggcggggtccgggacggctggggcggagctggaccgttgagggccacggcggggcgtctccgggccgagcggggctgctgcgcccgagcggttgggggcgcggagggctggaaatcccggatcacgcgcccccgggcgccgccccgcccccgcaccttggcctagcgcggtggcgtcacagtcgcgcagtcctgactacggcctccgggccctttgtccccgctagcggcgctcggggtgggggagccaggaggggcgggagacgggcgggtatgggccgcgcgggcgcaggctcccccgggcgccgcaggcagcggtgccagagccggggcaggcggcggccgcgagcccctcggcggcggaaggccccagcgtgcaggcgcaggagggcgcggcgccggcggaagaagccctgtccccgcagcttgcgaccggagatccacgaatgtcccaagtcccaggacccgtgcgcgtcccgggacgactggcgctgtgcgcgctccatgcacgagttttccgccaaggacatcgacgggcacatggttaacctggacaagtaccggggcttcgtgtgcatcgtcaccaacgtggcctcccagtgaggcaagaccgaagtaaactacactcagctcgtcgacctgcacgcccgatacgctgagtgtggtttgcggatcctggccttcccgtgtaaccagttcgggaagcaggagccagggagtaacgaagagatcaaagagttcgccgcgggytacaacgtcaaattcgatatgttcagcaagatctgcgtgaacggggacgacgcccacccgctgtggaagtggatgaagatccaacccaagggcaagggcatcctgggaaatgccatcaagtggaacttcaccaagttcctcatcgacaagaacggctgcgtggtgaagcgctacggacccatggaggagcccctggtgatagagaaggacctgccccactatttctagctccacaagtgtgtggccccgcccgagcccctgcccacgccctyggagccttccaccggcactyatgacggcctgcctgcaaacctgctggtggggcagacccgaaaatccagcgtgcaccccgccggaggaaggtcccatggcctgctgggcttggctcggcgcccccacccctggctaccttgtgggaataaacagacaaattagmctgctgga

SEQ ID NO: 4318 - DNA, 4780 bp, Homo sapiens
cgcagagccgcaggctgaggccgggaagggtcgggggcgaggccgcgtcgccgcctccccgaagccttttcctgttggggggagggcccgccagtgacggccgggcctgtcacgtgggcctgacagctggggagggggtggccggcgacaatgtggtcccgaagcggccagcgccgggagctgcagcgctgagacccccagcccgccccctcgggctcccggccggggccccatcatgttctccaggaagaaacgagagctcatgaaaaccccttccatctcgaaaaagaaccgcgcgggaagccccagcccgcagccctcgggggagctgcccaggaaggatggggctgacgcggtgttccccggaccaagcctggagccgcccrctgggtcctccggcgtcaaggccacagggaccctcaagcggcccaccagcctgagccgccacgccagcgcggctggcttccccctgtcgggtgctgcctcctggacactgggccggagcyaccggagcccactgacagccgccagcccgggcgagctgcccaccgagggtgccggcccggacgtcgtcgaggacatctcccatctgctggcggacgtggcccgcttcgctgagggccttgagaaacttaaggagtgtgtgytgcrtgaygacctccttgaggcccgccgcccgcgggcccacgagtgcctgggtgaggctctgcgtgtcatgcatcagrtcatctccaagtacccgctgctgaacaccgtggagacgctcaccgcagccggcaccctcattgccaaggtcaaagccttccattatgagagcaacaatgatctggagaaacaggagttcgagaaggccctggagacgattgctgtggccttcagtagcacagtgtccgagttcctcatgggtgaagtggacagcagcaccctcctagcagtgcctcctggggactcgagccagtccatggaaagcctgtatggaccgggcagtgagggcacgcctcccagcctggawgactgtgacgccggctgcctgcccgccgaggaggtggacgtgctgctacagcgctgtgaggggggcgtggatgccgcactgctgtatgccaagaacatggccaagtacatgaaggacctcatcagctacctggagaagcggacgacgctggagatggagtttgccaagggcctgcagaagatcgctcacaactgcagacagagcgtcatgcaggagccccacatgccgctcctgtccatctactcgctggccctggagcaggacctggagttcggccacagcatggtgcaggcggtgggcaccttgcagacccagaccttcatgcagcccctgaccctgcggcggcttgaacacgagaagcgcaggaaggagatcaaggaggcctggcaccgtgcccagaggaagctgcaagaggcggagtccaacctgcgcaaggccaagcagggttacgtgcagcgctgcgaggaccacgacaaggctcgcttcctygtggccaaggcggaggaggagcaggctggcagcgcgccgggagcaggcrgcacggccaccaagaccctggacaagcggcggcggctggaggaggaggccaagaacaaggcggaggaagctatggccacctaccgcacctgcgtggccgacgcgaagacgcagaagcaggagctggaggataccaaggtgacggcgctgcggcagatccaggaggtcatccggcagagcgaccaaaccatcaagtcggccacgatctcctactaccagatgatgcatatrcagacggcrccgctgcccgtgcacttccagatgctgtgtgagagcagcaagctgtatgacccaggccagcagtacgcctcccacgtgcgccagctgcagcgggaccaggagcccgatgtgcactacgactttgagccccacgtctccgccaacgcctggtcccccgtcatgcgtgcccggaagagcagcttcaacgtgagtgatgtggcgcggccsgaggctgccgggagccccccagaagaaggcgggtgcactgagggcacacctgccaaggaccacagggccgggcgaggacaccaggttcacaagtcatggccgctctcgatctcagactcggacagtgggctggaccccggccctggcgcaggggactttaagaagttcgagcggacgtcatccagtggtaccatgtcgtccacggaggagctggtggacccagacggtggagccggggcttcagcctttgagcaggctgacctcaacggcatgacccccgagctgccggtrgccgtgcccagtggaccgttccgccacgaggggctgtccaaggcggcccgtactcaccggctccggaagctccgcacgcccgccaagtgccgcgagtgcaacagctacgtctacttccagggtgctgagtgtgaagagtgctgcctggcctgccacaagaaatgtctggagacgctggccatacagtgcgggcacaagaagctgcarggccgcctgcagctgttcggccaggacttcagccacgcggcccgcagcgcccccgacggcgtgcccttcatcgtcaagaagtgcgtctgcgagatcgagcggcgggcgctgcgcaccaagggcatctaccgggtcaatggggtaaagacacgcgtggagaagctgtgccaggccttcgagaacggcaaggagctggtcgagctgtcgcaggcctcgccccacgacatcagcaacgtcctcaagctctacctgcgtcagcttcccgagccgctcatctccttccgcctctaccacgagctcgtagggctggccaaggacagcctgaaggcagaggccgaggccaaggcggcgtcccggggccggcaggacggctcggagagcgaggcagtggcggtgsccctggcaggtcggctgcgggagctcctgcgggacctgccgcctgagaaccgggcctcgctgcagtacctgctgcgtcacctacgcaggatcgtggaggtggagcaggacaacaagatgacccccgggaacctgggcatcgtgttcgggcccacgctgcttcggccacggcccaccgaggccaccgtgtccctctcctccctggtggattatccccatcaggcccgcgtcatcgagactctcatcgtccactacggcctggtcttcgaggaggagccggaggagacccccgggggccaggacgagtcatccaaccagcgagctgaggtagtcgtccaggtgccgtacctggaggcgggcgaggcggtggtctacccsctgcaggaggcggcggcggacggktgcagagaatcccgagttgtgtccaacgattcggactcggacctagaggaggcctccgagctgctgtcctcatcggaggccagtgccctgggccacctcagcttcctggagcagcagcagagcgaggccagcctagaggtggcttctggcagccacagcggcagtgaggagcagctggaggccacagcccgggaggayggggacggggacgrggacggcccggcccagcagctctcaggattcaacaccaaccagtccaacaacgtgctgcaggccccactgccccccatgaggctccgtggcgggcggatgacrctgggctcctgcagggaaaggcagccrgaattcgtgtgagctggggtgrggctgggaccacaggtggcttctctctygcctgctcctgtccctccagcacgtcccctgcaccayggcatagcttaggtgcgccgtcctggggtcgctgccgagagygcctggacttcgacgtcccaccagcgggcgcctcctcccagaggcttccaggagcacgagggccttgcggcacaggactgtgccctgtdctgtcccctgcaccccggctcagctgagctggggaacactgctgtcgtgtgaagtcacagtggccttgttggtgcccacagggctgtgtggatggaggaagctgtccctgcccagtgcatcccccaggtcatcacggggamgcaggaggcaggccctgccctgccctctcctcacaggtctgttgcagggactccagaaaccattctgggagccgtggatgggggcggagctggggtttggtgcagtttccagggtgcagtacagcagggcctgaatactggccctggactcccttttccagaacaccaggtgtggccacctggggctcaggtacacagtggggtctctcggaagccaccgtgtggttctttcacaggcacgtttattttgctgaaataaaaagtttttaatcgggtgttttctgtggcagctgcaagcttagaagattttctgtggcagctgcaagcttagaagaaggggccagggaggggacagagagagccccgtggcgtggccctgggcctccccctaggggagggatgtgtgaggaagggaaccccccgccacggggcccygcgaggtgggagcccgggtggtcttcaccacaggctgtgcagacggtcaggcatcgaatgacctcgtcacgtccacctgcagcccagggcagtccaggaaaacgttctcgatgacggacgtatcccccggctctaaggtttcgcacgtcagccccacatggccaccaagcactggaaacgtggcccatgcgcctgtggaactgcattttttttttttttgagacagggtgtgaccctgtggcccaggctggagtacaggagcacaatcgtagctcactgcagcctcggcctcctgggctcaaatgatcctcccgcctcagcctcccaaagtgttgggattacaggtgtgagc

SEQ ID NO: 4319 - DNA, 2461 bp, Homo sapiens
gccgtgtgggggctgtgagcgscccggggaggtggggtggagccgctgggggctgcgctgagctgggcgccccggggctgggctcactcactctggccgcccccagtgctgcctggcctgccacaagaaatgtctggagacgctggccatacagtgcgggcacaagaagctgcarggccgcctgcagctgttcggccaggacttcagccacgcggcccgcagcgcccccgacggcgtgcccttcatcgtcaagaagtgcgtctgcgagatcgagcggcgggcgctgcgcaccaagggcatctaccgggtcaatggggtaaagacacgcgtggagaagctgtgccaggccttcgagaacggcaaggagctggtcgagctgtcgcaggcctcgccccacgacatcagcaacgtcctcaagctctacctgcgtcagcttcccgagccgctcatctccttccgcctctaccacgagctcgtagggctggccaaggacagcctgaaggcagaggccgaggccaaggcggcgtcccggggccggcaggacggctcggagagcgaggcagtggcggtgsccctggcaggtcggctgcgggagctcctgcgggacctgccgcctgagaaccgggcctcgctgcagtacctgctgcgtcacctacgcaggatcgtggaggtggagcaggacaacaagatgacccccgggaacctgggcatcgtgttcgggcccacgctgcttcggccacggcccaccgaggccaccgtgtccctctcctccctggtggattatccccatcaggcccgcgtcatcgagactctcatcgtccactacggcctggtcttcgaggaggagccggaggagacccccgggggccaggacgagtcatccaaccagcgagctgaggtagtcgtccaggtgccgtacctggaggcgggcgaggcggtggtctacccsctgcaggaggcggcggcggacggktgcagagaatcccgagttgtgtccaacgattcggactcggacctagaggaggcctccgagctgctgtcctcatcggaggccagtgccctgggccacctcagcttcctggagcagcagcagagcgaggccagcctagaggtggcttctggcagccacagcggcagtgaggagcagctggaggccacagcccgggaggayggggacggggacgrggacggcccggcccagcagctctcaggattcaacaccaaccagtccaacaacgtgctgcaggccccactgccccccatgaggctccgtggcgggcggatgacrctgggctcctgcagggaaaggcagccrgaattcgtgtgagctggggtgrggctgggaccacaggtggcttctctctygcctgctcctgtccctccagcacgtcccctgcaccayggcatagcttaggtgcgccgtcctggggtcgctgccgagagygcctggacttcgacgtcccaccagcgggcgcctcctcccagaggcttccaggagcacgagggccttgcggcacaggactgtgccctgtdctgtcccctgcaccccggctcagctgagctggggaacactgctgtcgtgtgaagtcacagtggccttgttggtgcccacagggctgtgtggatggaggaagctgtccctgcccagtgcatcccccaggtcatcacggggamgcaggaggcaggccctgccctgccctctcctcacaggtctgttgcagggactccagaaaccattctgggagccgtggatgggggcggagctggggtttggtgcagtttccagggtgcagtacagcagggcctgaatactggccctggactcccttttccagaacaccaggtgtggccacctggggctcaggtacacagtggggtctctcggaagccaccgtgtggttctttcacaggcacgtttattttgctgaaataaaaagtttttaatcgggtgttttctgtggcagctgcaagcttagaagattttctgtggcagctgcaagcttagaagaaggggccagggaggggacagagagagccccgtggcgtggccctgggcctccccctaggggagggatgtgtgaggaagggaaccccccgccacggggcccygcgaggtgggagcccgggtggtcttcaccacaggctgtgcagacggtcaggcatcgaatgacctcgtcacgtccacctgcagcccagggcagtccaggaaaacgttctcgatgacggacgtatcccccggctctaaggtttcgcacgtcagccccacatggccaccaagcactggaaacgtggcccatgcgcctgtggaactgcattttttttttttttgagacagggtgtgaccctgtggcccaggctggagtacaggagcacaatcgtagctcactgcagcctcggcctcctgggctcaaatgatcctcccgcctcagcctcccaaagtgttgggattacaggtgtgagc

SEQ ID NO: 4320 - DNA, 4735 bp, Homo sapiens
cgcagagccgcaggctgaggccgggaagggtcgggggcgaggccgcgtcgccgcctccccgaagccttttcctgttggggggagggcccgccagtgacggccgggcctgtcacgtgggcctgacagctggggagggggtggccggcgacaatgtggtcccgaagcggccagcgccgggagctgcagcgctgagacccccagcccgccccctcgggctcccggccggggccccatcatgttctccaggaagaaacgagagctcatgaaaaccccttccatctcgaaaaagaaccgcgcgggaagccccagcccgcagccctcgggggagctgcccaggaaggatggggctgacgcggtgttccccggaccaagcctggagccgcccrctgggtcctccggcgtcaaggccacagggaccctcaagcggcccaccagcctgagccgccacgccagcgcggctggcttccccctgtcgggtgctgcctcctggacactgggccggagcyaccggagcccactgacagccgccagcccgggcgagctgcccaccgagggtgccggcccggacgtcgtcgaggacatctcccatctgctggcggacgtggcccgcttcgctgagggccttgagaaacttaaggagtgtgtgytgcrtgaygacctccttgaggcccgccgcccgcgggcccacgagtgcctgggtgaggctctgcgtgtcatgcatcagrtcatctccaagtacccgctgctgaacaccgtggagacgctcaccgcagccggcaccctcattgccaaggtcaaagccttccattatgagagcaacaatgatctggagaaacaggagttcgagaaggccctggagacgattgctgtggccttcagtagcacagtgtccgagttcctcatgggtgaagtggacagcagcaccctcctagcagtgcctcctggggactcgagccagtccatggaaagcctgtatggaccgggcagtgagggcacgcctcccagcctggawgactgtgacgccggctgcctgcccgccgaggaggtggacgtgctgctacagcgctgtgaggggggcgtggatgccgcactgctgtatgccaagaacatggccaagtacatgaaggacctcatcagctacctggagaagcggacgacgctggagatggagtttgccaagggcctgcagaagatcgctcacaactgcagacagagcgtcatgcaggaggacctggagttcggccacagcatggtgcaggcggtgggcaccttgcagacccagaccttcatgcagcccctgaccctgcggcggcttgaacacgagaagcgcaggaaggagatcaaggaggcctggcaccgtgcccagaggaagctgcaagaggcggagtccaacctgcgcaaggccaagcagggttacgtgcagcgctgcgaggaccacgacaaggctcgcttcctygtggccaaggcggaggaggagcaggctggcagcgcgccgggagcaggcrgcacggccaccaagaccctggacaagcggcggcggctggaggaggaggccaagaacaaggcggaggaagctatggccacctaccgcacctgcgtggccgacgcgaagacgcagaagcaggagctggaggataccaaggtgacggcgctgcggcagatccaggaggtcatccggcagagcgaccaaaccatcaagtcggccacgatctcctactaccagatgatgcatatrcagacggcrccgctgcccgtgcacttccagatgctgtgtgagagcagcaagctgtatgacccaggccagcagtacgcctcccacgtgcgccagctgcagcgggaccaggagcccgatgtgcactacgactttgagccccacgtctccgccaacgcctggtcccccgtcatgcgtgcccggaagagcagcttcaacgtgagtgatgtggcgcggccsgaggctgccgggagccccccagaagaaggcgggtgcactgagggcacacctgccaaggaccacagggccgggcgaggacaccaggttcacaagtcatggccgctctcgatctcagactcggacagtgggctggaccccggccctggcgcaggggactttaagaagttcgagcggacgtcatccagtggtaccatgtcgtccacggaggagctggtggacccagacggtggagccggggcttcagcctttgagcaggctgacctcaacggcatgacccccgagctgccggtrgccgtgcccagtggaccgttccgccacgaggggctgtccaaggcggcccgtactcaccggctccggaagctccgcacgcccgccaagtgccgcgagtgcaacagctacgtctacttccagggtgctgagtgtgaagagtgctgcctggcctgccacaagaaatgtctggagacgctggccatacagtgcgggcacaagaagctgcarggccgcctgcagctgttcggccaggacttcagccacgcggcccgcagcgcccccgacggcgtgcccttcatcgtcaagaagtgcgtctgcgagatcgagcggcgggcgctgcgcaccaagggcatctaccgggtcaatggggtaaagacacgcgtggagaagctgtgccaggccttcgagaacggcaaggagctggtcgagctgtcgcaggcctcgccccacgacatcagcaacgtcctcaagctctacctgcgtcagcttcccgagccgctcatctccttccgcctctaccacgagctcgtagggctggccaaggacagcctgaaggcagaggccgaggccaaggcggcgtcccggggccggcaggacggctcggagagcgaggcagtggcggtgsccctggcaggtcggctgcgggagctcctgcgggacctgccgcctgagaaccgggcctcgctgcagtacctgctgcgtcacctacgcaggatcgtggaggtggagcaggacaacaagatgacccccgggaacctgggcatcgtgttcgggcccacgctgcttcggccacggcccaccgaggccaccgtgtccctctcctccctggtggattatccccatcaggcccgcgtcatcgagactctcatcgtccactacggcctggtcttcgaggaggagccggaggagacccccgggggccaggacgagtcatccaaccagcgagctgaggtagtcgtccaggtgccgtacctggaggcgggcgaggcggtggtctacccsctgcaggaggcggcggcggacggktgcagagaatcccgagttgtgtccaacgattcggactcggacctagaggaggcctccgagctgctgtcctcatcggaggccagtgccctgggccacctcagcttcctggagcagcagcagagcgaggccagcctagaggtggcttctggcagccacagcggcagtgaggagcagctggaggccacagcccgggaggayggggacggggacgrggacggcccggcccagcagctctcaggattcaacaccaaccagtccaacaacgtgctgcaggccccactgccccccatgaggctccgtggcgggcggatgacrctgggctcctgcagggaaaggcagccrgaattcgtgtgagctggggtgrggctgggaccacaggtggcttctctctygcctgctcctgtccctccagcacgtcccctgcaccayggcatagcttaggtgcgccgtcctggggtcgctgccgagagygcctggacttcgacgtcccaccagcgggcgcctcctcccagaggcttccaggagcacgagggccttgcggcacaggactgtgccctgtdctgtcccctgcaccccggctcagctgagctggggaacactgctgtcgtgtgaagtcacagtggccttgttggtgcccacagggctgtgtggatggaggaagctgtccctgcccagtgcatcccccaggtcatcacggggamgcaggaggcaggccctgccctgccctctcctcacaggtctgttgcagggactccagaaaccattctgggagccgtggatgggggcggagctggggtttggtgcagtttccagggtgcagtacagcagggcctgaatactggccctggactcccttttccagaacaccaggtgtggccacctggggctcaggtacacagtggggtctctcggaagccaccgtgtggttctttcacaggcacgtttattttgctgaaataaaaagtttttaatcgggtgttttctgtggcagctgcaagcttagaagattttctgtggcagctgcaagcttagaagaaggggccagggaggggacagagagagccccgtggcgtggccctgggcctccccctaggggagggatgtgtgaggaagggaaccccccgccacggggcccygcgaggtgggagcccgggtggtcttcaccacaggctgtgcagacggtcaggcatcgaatgacctcgtcacgtccacctgcagcccagggcagtccaggaaaacgttctcgatgacggacgtatcccccggctctaaggtttcgcacgtcagccccacatggccaccaagcactggaaacgtggcccatgcgcctgtggaactgcattttttttttttttgagacagggtgtgaccctgtggcccaggctggagtacaggagcacaatcgtagctcactgcagcctcggcctcctgggctcaaatgatcctcccgcctcagcctcccaaagtgttgggattacaggtgtgagc

SEQ ID NO: 4321 - DNA, 1932 bp, Homo sapiens
gacatatatwtttttttattccaagcaaattcacagttctgaatcctcaccaggccccttgttaagaatgcctggcccacgcgcggtggctcacgcctgtaatcccagcactttggaaggccaaggtgggcggatcacctgaggtccggagttcgagaccagcctggccaacatggagaaaccccgtctctactaaaaatacaaaatcagctgggtgtggtggcgcatgcctgtaatcgcagctactggggggctggggcaagagaatcgcttgaacccgggaggcggaggttgcagtgagctaagattgcaccattgcactccatcctgggcaacaagagtgaaactccgtctcaaaaacaaaaacaaaaacaaaccagctgggcgtggtggctcaggcctgtaatcccagcactttgggaggccgagagttcagccgtcaccagcaccaagcctgcctttctggattcttccttgtgagccaggattcctggcacctccaggtttcctcccgctgagtgccccgggcgtggcaaggccctgctctggccttagtcttcgcctcgggaaggctctcccaggagacttcgtgcaggcgcgttccctcctctgcgcttcctttgaggctggctcctctaggggtgcttttctgtgtagattgacgtgggcagcgccctccccgcttagcggactgcagattccttggtcatgtgtggagggcctgctgccagtttccttctgtggatgatcctgggaccgtccttgcttggacactgttgacctgccgcgttccatctcccggcagctccagcgtgggccyggctgtgcaggcacgaggtgtccatcagagcgtggccaccgatggcccaagcaggtgaagctggccttctgggggaggtcgtaccccctcgccccacccccatcccttccttattttctgcatcagtgccgcagccactgaggtgcatggytggggcagggagggggtcacacatcccagtccctgacctcatgtgggtccaggcctctggcagcggccgtgggggctcgcatccgcctctgggaagcacctgcgtggctgacgcctcctgtgyccgtgtgtctctgtgccagcacccagcctgccctgccaaaggccagagccgtggctcccaaacccagcagccggggcgagtatgtggtggccaagctggatgacctcgtcaactgggcccgccgggtgagtactatgagctgtaggccctcctcgagcgccagggcctctctgcacactcacaggcacacacatacacacaccaacgtgcagacacgtacacacacaacacaygcatgcacactcacatgckcacatgtgcatgcaagctcacatgtatggacagatgtgtacacggaccacacgcacactcacgcacacaatgcacatatgcacactcgcacacatgcacacttgcacacacatgcacacacaagcacatgtgcacacaygcttgcacacatacacacatgcacacttgcactcatgcacactcatgcgcacatatacacatgcacacgcacactcgcacacaygtgcacatatatgcacagtcatgcacacacatgcacacacacrcatgcacacacgtccttgtgtggacacatgcatgtgtgcctgttggcatgcatgcacacaggcacactcactgatgcacacacacccctgcggccgtggagcagggcggaccctcccggaggcccctgtgctggcctggtggcctgtggttccatctgaggattcggaccctgctggagatgacacctccgtttccgtcattctctttctggcgtccgtgtgttcctcttgtttctcttttaaggtgaaagcagtgttttaagttaaaaggagcgcgtgtgaaggcagtagatccttctcggtacccgtttaaagcctcc

SEQ ID NO: 4322 - DNA, 1068 bp, Homo sapiens
gttaaccgaaaggttggtggttcgagcccacccagggacgcgtggtgrcttttkccctcctggaataacaagaaaatgagtgtcgcctctgtttttgtcggtccgccgcagacccgcggcccccacgtgcgcactccgatgacctttccgcctcgggtgatctgggggtgcacggcgcaacacgaccacggaggccgaaagcgcagcggaacctcccggctccaggttccggtttccgcatgcgctccgagccgctttgggcggcggccccgggaacccggagcgctaaggagaacggacctcagaggttgtctgaaggccgaggccaagatggcggtgctgtcagctcctggcctgcgcggcttccggatccttggtctgcgctccagcgtgggccyggctgtgcaggcacgaggtgtccatcagagcgtggccaccgatggcccaagcagcacccagcctgccctgccaaaggccagagccgtggctcccaaacccagcagccggggcgagtatgtggtggccaagctggatgacctcgtcaactgggcccgccggagttctctgtggcccatgaccttcggcctggcctgctgcgccgtggagatgatgcacatggcagcaccccgctacgacatggaccgctttggcgtggtcttccgcgccagcccgcgccagtccgacgtcatgatcrtggccggcacactcaccaacaagatggccccagcgcttcgcaaggtctacgaccagatgccggagccgcgctacgtggtctccatggggagctgcgccaacggaggaggctactaccactattcctactcggtggtgaggggctgcgaccgcatcgtgcccgtggacatctacatcccaggctgcccacctacggccgaggccctgctctacggcatcctgcagctgcagaggaagatcaagcgggagcggaggctgcagatctggtaccgcaggtagcgccgccgccgcmgccgccggagcctgtcgccgtcctgtccccagcctgcttgtgtcccgtgaggttgtcaataaacctgccctcgggctgccgcc

SEQ ID NO: 4323 - DNA, 722 bp, Homo sapiens
ctcctggcctgcgcggcttccggatccttggtctgcgctccagcgtgggccyggctgtgcaggcacgaggtgtccatcagagcgtggccaccgatggcccaagcagcacccagcctgccctgccaaaggccagagccgtggctcccaaacccagcagccggggcgagtatgtggtggccaagctggatgacctcgtcaactgggcccgccggagttctctgtggcccatgaccttcggcctggcctgctgcgccgtggagatgatgcacatggcagcaccccgctacgacatggaccgctttggcgtggtcttccgcgccagcccgcgccagtccgacgtcatgatcrtggccggcacactcaccaacaagatggccccagcgcttcgcaaggtctacgaccagatgccggagccgcgctacgtggtctccatggggagctgcgccaacggaggaggctactaccactattcctactcggtggtgaggggctgcgaccgcatcgtgcccgtggacatctacatcccaggctgcccacctacggccgaggccctgctctacggcatcctgcagctgcagaggaagatcaagcgggagcggaggctgcagatctggtaccgcaggtagcgccgccgccgcmgccgccggagcctgtcgccgtcctgtccccagcctgcttgtgtcccgtgaggttgtcaataaacctgccctcgggctgccgcc

SEQ ID NO: 4324 - DNA, 1703 bp, Homo sapiens
atgtcggagttttggttaatttctgcccctggcgataaggaaaatttgcaagctctggagaggatgaatactgtaacctccaagtccaacctgtcttataataccaaattcgctattcctgacttcaaggtggggaccttggattccctggttggcctctctgatgagttggggaaactcgacacctttgctgaaagcctcataaggagaatggctcagagcgtggtggaagtcatggaggactcaaaggggaaggtccaggagcacctcctggcaaacggagttgacttaacatcctttgtgacccactttgaatgggacatggccaaatatcctgtcaagcagccgctcgtgagtgtggtggacacaatagccaagcaactggcgcagatcgagatggacctgaagtcccgaacggccgcctacracactctgaagacaaacctggagaacctggaaaagaaatccatggggaacctcttcacccggacactgagtgataytgtgagcaaagaggacttcgtgctggattctgaatatctcgtcacacttctggtcatcgtccccaaaccaaactactcacaatggcaaaaaacctacgaatctctctcagacatggtrgtccctcgatcaaccaaactcattactgaggacaaggaagggggccttttcactgtgactctgtttcgaaaagtgattgaagatttcaaaaccaaggccaaagaaaacaagttcactgttcgtgaattttactatgatgagaaggaaattgaaagggaaagggaggagatggccagattgctgtctgataagaagcaacagtatggccccctgctgcgctggctcaagrtgaacttcagtgaagccttcattgcctggatccacatcaaggccctgagagtgtttgtggagtccgtgctcaggtatggactaccagtgaacttccaggcagtgctcctgcagccgcataagaagtcatccaccaagcgtttaagagaggttctaaactctgtcttccgacatctggatgaagtagccgctacaagtatactggatgcatctgtggagatcccgggactgcaactcaataaccaagactattttccttaygtctacttccatattgaccttagtcttcttgactagaaaggccagctggcacctctgtctcatgttcgtgcagattattacagacacctctttcctttagccagagaatggttcaaatgtcttacagaactaagatctttttcagagaaattgctcacaaaagttagtgacagttgtatttatttttttaagttacaataaaatgctctcaagtcctttgaatgttcyaacaaattcaaaacttcattttctgaatgttttacataaatgcgaactacctgttcgcattggtaacctgctgctgtatttcatrtcttaacggctattttgaggttcattaacwacayaraaagccttgaactgtataaccagctagattccttaataattagtcactagagacagcccaaagacaaatattgggcaggaaatcagttctcactgagcccggtttccatgtaaaatctctgttgtggtgggcataggtggcaccatctaaagaaaagaggtcttgttttttgtttaaaaaagtttgtggggaggaaagacatctgtgtatcacttcaaaatattgatttactgctaaacatcac

SEQ ID NO: 4325 - DNA, 2218 bp, Homo sapiens
ctcttcacccaatacctgagagaatcggaaggaggcagagctacaccgaggaccaaaccccgcccttcgctccctcttagctaatcgttgccagcggggtgtggacttcgccgctgaccccacctccgccgctttgggtaatttagagccgcgcgccgggcgggaatgtaagatggcggagtagcaacgcaaagcgcttggtattgagtctgtggccgacttcggttccggtctctgcagcagccgtgatcgcttagtggagtgcttagggtagttggccaggatgccgaatatcaaaatcttcagcggcagctcccaccaggacttatctcagaaaattgctgaccgcctgggcctggagctaggcaaggtggtgactaagaaattcagcaaccaggagacctgtgtggaaattggtgaaagtgtacgtggagaggatgtctacattgttcagagtggttgtggcgaaatcaatgacaatttaatggagcttttgatcatgattaatgcctgcaagattgcttcagccagccgggttactgcagtcatcccatgcttcccttatgcccggcaggataagaaagataagagccgggcgccaatctcagccaagcttgttgcaaatatgctatctgtagcaggtgcagatcatattatcaccatggacctacatgcttctcaaattcagggcttttttgatatcccagtagacaatttgtatgcagagccggctgtcctraagtggataagggagaatatctctgagtggaggaactgcactattgtctcacctgatgctggtggagctaagagagtgacctccattgcagacaggctgaatgtggactttgccttgattcacaaagaacggaagaaggccaatgaagtggaccgcatggtgcttgtgggagatgtgaaggatcgggtggccatccttgtggatgacatggctgacacttgtggcacaatctgccatgcagctgacaaacttctctcagctggcgccaccagagtttatgccatcttgactcatggaatcttctccggtcctgctatttctcgcatcaacaacgcatgctttgaggcagtagtagtcaccaataccatacctcaggaggacaagatgaagcattgctccaaaatacaggtgattgacatctctatgatccttgcagaagccatcaggagaactcacaatggagaatccgtttcttacctattcagccatgtccctttataatagagtaacttctgaggctttttgagaataaaatccaccccacccttgtttccccttggtatttgatgacaaattcagcagaagacccggcttgctccagtgtagctttctacatcccacatcaggtatattagagsttatccgaactggggaaagacggattgagattaactgctgggacctcctacctgcattatctcattctggcttccttgataattctgtgggccttgcagctttaactatagctcagctgctgcaagatttcagacttttgaggatgttgtgtgagggtgtttgactgtgactggggaagctcagactactttgtatgtgaatgcttcagggttttctttgttgagaacaactagcaacaaaggcaacccatgtgtgaccagttctccccaaggtctatgctaaattatagcaagagccctgggcaaccccaaacctagtcctggtagctgagcaccctgtaaggcaggagcaggcagctcagcttgagcagacattgggtggggggtggggggtggttgaggggggaggcagcacagtgcagcaaatgtttcttgggaggaagaagcctgatccatcacctctgcttgactatgtagcttggattctccttttcgatttggctttaccttcatctatcttgatcctttcctggccaaatatcctcttgggcccaaatgaacattgtaccatagtcttctggaaagcaaacatgcttcctgctatgtaattgctaacattcatattagatgatgtgctgtagcttgatcttccttagcctactgccactgaggcagtaggttttaggtggtatcgtagtgccttttgattaatttaagtatttaattttcatcttccttctttggatctatttggcctctcaaatgaactgrgattcctgttaaaaaagattgatgttattgtctcttgtagaggaaactaataaagtgtgtgtacctgtgt

SEQ ID NO: 4326 - DNA, 2244 bp, Homo sapiens
  misc_feature (1)...(2244): n = A,T,C or G
ctcttcacccaatacctgagagaatcggaaggaggcagagctacaccgaggaccaaaccccgcccttcgctccctcttagctaatcgttgccagcggggtgtggacttcgccgctgaccccacctccgccgctttgggtaatttagagccgcgcgccgggcgggaatgtaagatggcggagtagcaacgcaaagcgcttggtattgagtctgtggccgacttcggttccggtctctgcagcagccgtgatcgcttagtggagtgcttagggtagttggccaggatgccgaatatcaaaatcttcagcggcagctcccaccaggacttatctcagaaaattgctgaccgcctgggcctggagctaggcaaggtggtgactaagaaattcagcaaccaggagacctgtgtggaaattggtgaaagtgtacgtggagaggatgtctacattgttcagagtggttgtggcgaaatcaatgacaatttaatggagcttttgatcatgattaatgcctgcaagattgcttcagccagccgggttactgcagtcatcccatgcttcccttatgcccggcaggataagaaagataagagccgggcgccaatctcagccaagcttgttgcaaatatgctatctgtagcaggtgcagatcatattatcaccatggacctacatgcttctcaaattcagggcttttttgatatcccagtagacaatttgtatgcagagccggctgtcctraagtggataagggagaatatctctgagtggaggaactgcactattgtctcacctgatgctggtggagctaagagagtgacctccattgcagacaggctgaatgtggactttgccttgattcacaaagaacggaagaaggccaatgaagtggaccgcatggtgcttgtgggagatgtgaaggatcgggtggccatccttgtggatgacatggctgacacttgtggcacaatctgccatgcagctgacaaacttctctcagctggcgccaccagagtttatgccatcttgactcatggaatcttctccggtcctgctatttctcgcatcaacaacgcatgctttgaggcagtagtagtcaccaataccatacctcaggaggacaagatgaagcattgctccaaaatacaggtgattgacatctctatgatccttgcagaagccatcaggagaactcacaatggagaatccgtttcttacctattcagccatgtccctttataatagagtaacttctgaggctttttgagaataaaatccaccccacccttgtttccccttggtatttgatgacaaattcagcagaagacccggcttgctccagtgtagctttctacatcccacatcaggtatattagagsttatccgaactggggaaagacggattgagattaactgctgggacctcctacctgcattatctcattctggcttccttgataattctgtgggccttgcagctttaactatagctcagctgctgcaagatttcagacttttgaggatgttgtgtgagggtgtttgactgtgactggggaagctcagactactttgtatgtgaatgcttcagggttttctttgttgagaacaactagcaacaaaggcaacccatgtgtgaccagttctccccaaggtctatgctaaattatagcaagagccctgggcaaccccaaacctagtcctggtagctgagcaccctgtaaggcaggagcaggcagctcagcttgagcagacattgggtggggggtggggggtggttgaggggggaggcagcacagtgcagcaaatgtttcttgggaggaagaagcctgatccatcacctctgcttgactatgtagcttggattctcctttgtannnnnnnnnnnnnnnnnnnntcgatttggctttaccttcatctatcttgatcctttcctggccaaatatcctcttgggcccaaatgaacattgtaccatagtcttctggaaagcaaacatgcttcctgctatgtaattgctaacattcatattagatgatgtgctgtagcttgatcttccttagcctactgccactgaggcagtaggttttaggtggtatcgtagtgccttttgattaatttaagtatttaattttcatcttccttctttggatctatttggcctctcaaatgaactgrgattcctgttaaaaaagattgatgttattgtctcttgtagaggaaactaataaagtgtgtgtacctgtgtgat

SEQ ID NO: 4327 - DNA, 2178 bp, Homo sapiens
  misc_feature (1)...(2178): n = A,T,C or G
ctcttcacccaatacctgagagaatcggaaggaggcagagctacaccgaggaccaaaccccgcccttcgctccctcttagctaatcgttgccagcggggtgtggacttcgccgctgaccccacctccgccgctttgggtaatttagagccgcgcgccgggcgggaatgtaagatggcggagtagcaacgcaaagcgcttggtattgagtctgtggccgacttcggttccggtctctgcagcagccgtgatcgcttagtggagtgcttagggtagttggccaggatgccgaatatcaaaatcttcagcggcagctcccaccaggacttatctcagaaaattgctgaccgcctgggcctggagctaggcaaggtggtgactaagaaattcagcaaccaggagacctgtgtggaaattggtgaaagtgtacgtggagaggatgtctacattgttcagagtggttgtggcgaaatcaatgacaatttaatggagcttttgatcatgattaatgcctgcaagattgcttcagccagccgggttactgcagtcatcccatgcttcccttatgcccggcaggataagaaagataagagccgggcgccaatctcagccaagcttgttgcaaatatgctatctgtagcaggtgcagatcatattatcaccatggacctacatgcttctcaaattcagggcttttttgatatcccagtagacaatttgtatgcagagccggctgtcctraagtggataagggagaatatctctgagtggaggaactgcactattgtctcacctgatgctggtggagctaagagagtgacctccattgcagacaggctgaatgtggactttgccttgattcacaaagaacggaagaaggccaatgaagtggaccgcatggtgcttgtgggagatgtgaaggatcgggtggccatccttgtggatgacatggctgacacttgtggcacaatctgccatgcagctgacaaacttctctcagctggcgccaccagagtttatgccatcttgactcatggaatcttctccggtcctgctatttctcgcatcaacaacgcatgctttgaggcagtagtagtcaccaataccatacctcaggaggacaagatgaagcattgctccaaaatacaggtgattgacatctctatgatccttgcagaagccatcaggagaactcacaatggagaatccgtttcttacctattcagccatgtccctttataatagagtatttgatgacaaattcagcagaagacccggcttgctccagtgtagctttctacatcccacatcaggtatattagagsttatccgaactggggaaagacggattgagattaactgctgggacctcctacctgcattatctcattctggcttccttgataattctgtgggccttgcagctttaactatagctcagctgctgcaagatttcagacttttgaggatgttgtgtgagggtgtttgactgtgactggggaagctcagactactttgtatgtgaatgcttcagggttttctttgttgagaacaactagcaacaaaggcaacccatgtgtgaccagttctccccaaggtctatgctaaattatagcaagagccctgggcaaccccaaacctagtcctggtagctgagcaccctgtaaggcaggagcaggcagctcagcttgagcagacattgggtggggggtggggggtggttgaggggggaggcagcacagtgcagcaaatgtttcttgggaggaagaagcctgatccatcacctctgcttgactatgtagcttggattctcctttgtannnnnnnnnnnnnnnnnnnntcgatttggctttaccttcatctatcttgatcctttcctggccaaatatcctcttgggcccaaatgaacattgtaccatagtcttctggaaagcaaacatgcttcctgctatgtaattgctaacattcatattagatgatgtgctgtagcttgatcttccttagcctactgccactgaggcagtaggttttaggtggtatcgtagtgccttttgattaatttaagtatttaattttcatcttccttctttggatctatttggcctctcaaatgaactgrgattcctgttaaaaaagattgatgttattgtctcttgtagaggaaactaataaagtgtgtg

SEQ ID NO: 4328 - DNA, 1903 bp, Homo sapiens
cggagggaggaaaagggaaaggaagccgacaggccttaaaggggccgcaactatttttttaagccactttttcctctctccaattttgcaacgacgggcgcggaggaggaggttcccggaagccacgcgcagctggagcagcggcgaccgcagctggaggcccggagcgcctgcggggctggcagaggcgagggaggttgcgggtaggaagggcggactgcgcgcgccccctgcgtcccgcgcacctcggggccggtccatgctcccgacggctgcgggcttcagcatctggggccaggttggggcggcggggtccagggcgcaggtggtgcggccgatgcgccgggccggaggctgaggccgcgctgcggggctgggacagcactggcatctccagagcaggcccggggcagcaagggaggcgccgcgatgccagacgaaaatatcttcctgttcgtgcccaacctcatcggttatgcccggattgtcttcgccatcatttctttctacttcatgccctgctgccccctcacggcctcctccttctacctgctcagcggcctgctggacgctttcgatggacacgctgctcgcgctcttaatcaaggaacccggtttggggycatgctggacatgctgacggaccgctgctccaccatgtgcctgttggtcaacctggccctgctgtaccctggagccacgctgttcttccaaatcagcatgagtttggatgtggccagtcactggctgcacctccacagttctgtggtccgaggcagtgagagtcacaagatgatcgacttgtccgggaatccggtgcttcggatctactacacctcgaggcctgctctgttcaccttgtgtgctgggaatgagctcttctactgcctcctctacctgttccatttctctgagggacctttagttggctctgtgggactgttccggatgggcctctgggtcactgcccccatcgccttgctgaagtcgctcatyagcgtcatccacctgatcacggccgccygcaacatggctgccctggacgcagcagaccgcgccaagaagaagtgacgctggagccccgggtcctggctgcccacctgccctgggagtcttgctgtgccacacagctccycaccccctgctaggaggtcccagtctcacgccttcctcatgtgttgttctacctgctgggatgggggtcagcctctctttggtgacgtcacgttctctgggatcctgaggacccgggcctcaaatcagggaggatacgcgggaggccccctccatccaggcggtgctcctggggtgccgggaccgggcagtgtcacaccctgcctgctcagtcctggggtccgagatgctagggacgcttgagtgagggaggtggtgtgagggccaggtttcctgaaaggcgggagtcagacctccgcccccagccagagcaagcttggggcaccatgcccaggagggaagaagccatccacagccttccctgtcaccggctcctctgtcctgcctaccctggtcctggcgggacttcactatttgacttggtttcctttcagatattcttggctcagggcctgggttgagggagcttagggraggacgtccgtctgggtgcttttcctccagtttgctggctggcttctccgtctacccacagtgacctcacagagaggccctcctgccacccatgctcatgtggtgtccccaccgcccacttgtttgatgtcactgactgtctacatgtatttatattcttgatattttctaccctcactagaatgtaractccatgaaggcacakacttttcttgttctcttcystatccctagagtaagaccaacttgaacctggcatatagtagctgcttaataaatactcgtctgtcaatga

SEQ ID NO: 4329 - DNA, 1621 bp, Homo sapiens
gggaggttgcgggtaggaagggcggactgcgcgcggcggggtccagggcgcaggtggtgcggccgatgcgccgggccggaggctgaggccgcgctgcggggctgggacagcactggcatctccagagcaggcccggggcagcaagggaggcgccgcgatgccagacgaaaatatcttcctgttcgtgcccaacctcatcggttatgcccggattgtcttcgccatcatttctttctacttcatgccctgctgccccctcacggcctcctccttctacctgctcagcggcctgctggacgctttcgatggacacgctgctcgcgctcttaatcaaggaacccggtttggggycatgctggacatgctgacggaccgctgctccaccatgtgcctgttggtcaacctggccctgctgtaccctggagccacgctgttcttccaaatcagcatgagtttggatgtggccagtcactggctgcacctccacagttctgtggtccgaggcagtgagagtcacaagatgatcgacttgtccgggaatccggtgcttcggatctactacacctcgaggcctgctctgttcaccttgtgtgctgggaatgagctcttctactgcctcctctacctgttccatttctctgagggacctttagttggctctgtgggactgttccggatgggcctctgggtcactgcccccatcgccttgctgaagtcgctcatyagcgtcatccacctgatcacggccgccygcaacatggctgccctggacgcagcagaccgcgccaagaagaagtgacgctggagccccgggtcctggctgcccacctgccctgggagtcttgctgtgccacacagctccycaccccctgctaggaggtcccagtctcacgccttcctcatgtgttgttctacctgctgggatgggggtcagcctctctttggtgacgtcacgttctctgggatcctgaggacccgggcctcaaatcagggaggatacgcgggaggccccctccatccaggcggtgctcctggggtgccgggaccgggcagtgtcacaccctgcctgctcagtcctggggtccgagatgctagggacgcttgagtgagggaggtggtgtgagggccaggtttcctgaaaggcgggagtcagacctccgcccccagccagagcaagcttggggcaccatgcccaggagggaagaagccatccacagccttccctgtcaccggctcctctgtcctgcctaccctggtcctggcgggacttcactatttgacttggtttcctttcagatattcttggctcagggcctgggttgagggagcttagggraggacgtccgtctgggtgcttttcctccagtttgctggctggcttctccgtctacccacagtgacctcacagagagggagaggttgcagtgatccrtaatggtgccactccagcctgggaggcagagccaggcagtctcaaaaaaaaaaaaaagcaactttggcccgtcttggaggctcacgcctggcctgtaatcccagcactttgggaggctgaggtgggaagatcacttgagtccaggagttcaagaccagcctgggtcacatggcaggaccccgtctctac

SEQ ID NO: 4330 - DNA, 903 bp, Homo sapiens
gactccagaggaggaagtccagagacagagcaccatgacttctgagaaaggtccttcaaccggtgaccccactctgaggagaagaatcgaaccctrggagtttgacgtcttctatgaccccagagaacttcgtaaagaggcctgtctgctctacgaaatcaagtggggcatgagccggaagatctggcgaagctcaggcaaaaacaccaccaatcacgtggaagttaattttataaaaaaatttacgtcagaaagagattttcacccatccatsagctgctccatcacctggttcttgtcctggagtccctgctgggaatgctcccaggctattagagagtttctgagtcggcaccctggtgtgactctagtgatctacgtagctcggcttttttggcacatggatcaacaaaatcggcaaggtctcagggaccttgttaacagtggagtaactattcagattatgagagcatcagagtattatcactgctggaggaattttgtcaactacccacctggggatgaagctcactggccacaatacccacctctgtggatgatgttgtaygcactggagctgcactgcataattctaagtcttccaccctgtttaaagatttcaagaagatggcaaaatcatcttacatttttcagacttcatcttcaaaactgccattaccaaacgattccgccacacatccttttagctacagggctgatacatccttctgtggcttggagatgaataggatgattccgtgtgtgtactgattcaagaacaagcaatgatgacccactaaagagtgaatgccatttagaatctagaaatgttcacaaggtaccccaaaactstgtagcttaaaccaacaataaatatgtattacctctggcagtttctgtggg

SEQ ID NO: 4331 - DNA, 875 bp, Homo sapiens
gactccagaggaggaagtccagagacagagcaccatgacttctgagaaaggagaagaatcgaaccctrggagtttgacgtcttctatgaccccagagaacttcgtaaagaggcctgtctgctctacgaaatcaagtggggcatgagccggaagatctggcgaagctcaggcaaaaacaccaccaatcacgtggaagttaattttataaaaaaatttacgtcagaaagagattttcacccatccatsagctgctccatcacctggttcttgtcctggagtccctgctgggaatgctcccaggctattagagagtttctgagtcggcaccctggtgtgactctagtgatctacgtagctcggcttttttggcacatggatcaacaaaatcggcaaggtctcagggaccttgttaacagtggagtaactattcagattatgagagcatcagagtattatcactgctggaggaattttgtcaactacccacctggggatgaagctcactggccacaatacccacctctgtggatgatgttgtaygcactggagctgcactgcataattctaagtcttccaccctgtttaaagatttcaagaagatggcaaaatcatcttacatttttcagacttcatcttcaaaactgccattaccaaacgattccgccacacatccttttagctacagggctgatacatccttctgtggcttggagatgaataggatgattccgtgtgtgtactgattcaagaacaagcaatgatgacccactaaagagtgaatgccatttagaatctagaaatgttcacaaggtaccccaaaactstgtagcttaaaccaacaataaatatgtattacctctggcagtttctgtggg

SEQ ID NO: 4332 - DNA, 2077 bp, Homo sapiens
gcagacaggttgacctgcaaaaaaagacaggggaggcatggaaacaaaggacccatcgcaaatgttttccatgctgatctccaaagtgtcccacccccagcctggggcctctgggagccttggtcctgagcagccaacacaccagcccagacagctgcaagtcaccatggacgctgaaggcctggcgctgctgctgccgcccgtcaccctggcagccctggtggacagctggctccgagaggactgcccagggctcaactacgcagccttggtcagcggggcaggcccctcgcaggcggcgctgtgggccaaatcccctggggtactggcagggcagcctttcttcgatgccatatttacccaactcaactgccaagtctcctggttcctccccgagggatygaagctggtgccggtggccagagtggccgaggtccggggccctgccmactgcctgctgctgggggaacgggtggccctcaacacgstggcccgctgcagtggcattgccagtgctgccgccgctgcagtggaggccgccaggggggccggctggactgggcacgtggcaggcacgaggaagaccacgccaggcttccggctggtggagaagtatgggctcctggtgggcggggccgyctcgcacsgctacgacctgggagggctggtgatggtgaaggataaccatgtggtggccgccggtggcgtggagaaggcggtgcgggcggccagacaggcggctgacttcgctctgaaggtggaagtggaatgcagcagcctgcaggaggccgtgcaggcagctgaggctggtgccgaccttgtcctgctggacaacttcaagccagaggagctgcaccccacggccaccgtgctgaaggcccagttcccgagtgtggctgtggaagccagtgggggcatcaccctggacaacctcccccagttctgcgggccgcacatagacgtcatctccatggggatgctgacccaggcggccccagcccttgatttctccctcaagctgtttgccaaagaggtggctccagtgcccaaaatccactagtcctaaaccggaagaggatgacaccggccatgggttaacgtggctcctcaggaccctctgggtcacacatctttagggtcagtggccaatggggcacatttggcactagcttgagcccaactctggctctgccacctgctgctcctgtgacctgtcagggctgacttcacctctgctcatctcagtttcctaatctgtaaaatgggtctaataaaggatcaaccacatggggttctgcggtgataatgagcacatagtgaggggtcagcaaatgtcagaagttacctgggacagccgggcacgatggctcacacctgtaatcccagcactttgggaggctgaggcgggaagatcacttgagttcaggagtttgagaccagcctggccaacatggtgaaaccccatctctaccaaaaatagaagaattagctgggtgtggtggcacgcgcctgtaatcccagctacttaggaggctgaggcaggagaatcgcttgaacccaggaagtggaggttgcagtgagctgatggtgccactgcactccagcctgggtgatagagcgagactctgtctccaaagaagaaacaaaggaaagaaagagagaaagagagagggagggagggagggagggaaaggaaggatggaaagaaaggaagaaaggcaggcaaaagccccagacaggccaaaaccttcatccttcatgcacccaacctgtaccaaacaccagcatggcctggctgtgagtgcacagcagatggaggtttgctgggcagagacactgggctggcctagacactgcctttggtgataccctaaaccaaaggggccagtcccacagtaagaaggagaccactactactcctgctgccctcctccccccaccttgcctagtttacaagacaggaggaaagagagaaagcaaaaagttagaaaacaaaacaaaacagaagtaagataaatagccagaagaccttggcgacaccacccggccctggtagttaaaaaaaagtaacaataat

SEQ ID NO: 4333 - DNA, 1989 bp, Homo sapiens
tcccacccccagcctggggcctctgggagccttggtcctgagcagccaacacaccagcccagacagctgcaagtcaccatggacgctgaaggcctggcgctgctgctgccgcccgtcaccctggcagccctggtggacagctggctccgagaggactgcccagggctcaactacgcagccttggtcagcggggcaggcccctcgcaggcggcgctgtgggccaaatcccctggggtactggcagggcagcctttcttcgatgccatatttacccaactcaactgccaagtctcctggttcctccccgagggatygaagctggtgccggtggccagagtggccgaggtccggggccctgccmactgcctgctgctgggggaacgggtggccctcaacacgstggcccgctgcagtggcattgccagtgctgccgccgctgcagtggaggccgccaggggggccggctggactgggcacgtggcaggcacgaggaagaccacgccaggcttccggctggtggagaagtatgggctcctggtgggcggggccgyctcgcacsgctacgacctgggagggctggtgatggtgaaggataaccatgtggtggccgccggtggcgtggagaaggcggtgcgggcggccagacaggcggctgacttcgctctgaaggtggaagtggaatgcagcagcctgcaggaggccgtgcaggcagctgaggctggtgccgaccttgtcctgctggacaacttcaagccagaggagctgcaccccacggccaccgtgctgaaggcccagttcccgagtgtggctgtggaagccagtgggggcatcaccctggacaacctcccccagttctgcgggccgcacatagacgtcatctccatggggatgctgacccaggcggccccagcccttgatttctccctcaagctgtttgccaaagaggtggctccagtgcccaaaatccactagtcctaaaccggaagaggatgacaccggccatgggttaacgtggctcctcaggaccctctgggtcacacatctttagggtcagtggccaatggggcacatttggcactagcttgagcccaactctggctctgccacctgctgctcctgtgacctgtcagggctgacttcacctctgctcatctcagtttcctaatctgtaaaatgggtctaataaaggatcaaccacatggggttctgcggtgataatgagcacatagtgaggggtcagcaaatgtcagaagttacctgggacagccgggcacgatggctcacacctgtaatcccagcactttgggaggctgaggcgggaagatcacttgagttcaggagtttgagaccagcctggccaacatggtgaaaccccatctctaccaaaaatagaagaattagctgggtgtggtggcacgcgcctgtaatcccagctacttaggaggctgaggcaggagaatcgcttgaacccaggaagtggaggttgcagtgagctgatggtgccactgcactccagcctgggtgatagagcgagactctgtctccaaagaagaaacaaaggaaagaaagagagaaagagagagggagggagggagggagggaaaggaaggatggaaagaaaggaagaaaggcaggcaaaagccccagacaggccaaaaccttcatccttcatgcacccaacctgtaccaaacaccagcatggcctggctgtgagtgcacagcagatggaggtttgctgggcagagacactgggctggcctagacactgcctttggtgataccctaaaccaaaggggccagtcccacagtaagaaggagaccactactactcctgctgccctcctccccccaccttgcctagtttacaagacaggaggaaagagagaaagcaaaaagttagaaaacaaaacaaaacagaagtaagataaatagccagaagaccttggcgacaccacccggccctggtagttaaaaaaaagtaacaataat

SEQ ID NO: 4334 - DNA, 1255 bp, Homo sapiens
tgtagagacactgaccttcagcgcctcggctccagcgccatggcgccctccaggaagttcttcgttgkggggaactggaagatgaacgggcgaaagcagagtctgcgggagctcgtccgcactctgaacgcggccaaggtgccggccgacaccgaggtggtttrtactccgcctactgcctatatcgacttcgcccggcagaagctagatcccaagattgctgtggctgcgcagaactgctacaaagtgactaatgsggcttttactggggagatcagccctggcatgatcaaagactgcagasccacgtgggtggtcctggggcactcagagagaaggcatgtctttggggastcagatgagctgattgggcagaaagtggcccatgctctggcagaggsactcrgagtaatcgcctgcactggggagaagctagatgaaagggaagctggcatcactgagaaggttgttttckagcagacaaaggtcatcgcagataacrtgaaggactggagcaaggtcgtcctggcctatgagcctgtgtgggccrttggtactggcaagactgcaacaccccaacaggaccaggaagtacacgacaagctcygaggatggcttaagtccaacgtctctgatgcggtggctcagagcacccgtatcatttatggaggctctrtgactggggcaacctgcaaggagctggccagccagcctggcgtggatggcttccttgtgggtggtgcttccctcaagcccgaattcgtggacatcatcaatgccaaacaatgagccccatccatcttccctacccttcctgccaagccagggactaagcagcccagaagcccagtaactgcccttcccctgcacatgcttctgatggtgtcatctgctccttcctgtggcctcatccaaactgtaccttcctttactgtttatatcttcaccctgtaatggttgggaccaggccaatcccttctccacttactataatggttggaactaaatgtcaccaaggtggcttctccttggctgagagatggaaggggtgggatttgctcctgggttccctaggccctagtgagggcagaagagaaaccatcctctcccttcttacactgtgaggccaagatcccctcagaaggcaggagtgctgccctctcccatggtgcccgtgcctctgtgctgtgtatgtgaaccacccacgtgagggaataaacctggcactaggtcttgtgaaaaaaaaaaaaaaaaa

SEQ ID NO: 4335 - DNA, 3061 bp, Homo sapiens
aaaacatagtatatacagggtttggtatttctgaggtttcaggcatccattaggggtcctggaatgtatcctgcaaggataaggagggactatagtatgctatttaactttcttttagtaatatgagttgcaagtaaaaattcctggtatagtattattattacaacaagacagtctatgcctgttgaaactggcactttttctttcccaaaactaattttattctttaaggggcatgctatcttgaaaaggagggcaaatagagctgcctgtgaaaaggaataatataaaacggagacccggccgccgtgatgctgtcccggtcccactgtgtcccgggcgttcagccactcgctctctgccttccagaaggggaactgccctctagggagacrttccctgcctggggtctccttatgccagggaccaggttaccctaacagcaggaaggttgtcattaacaacagtgtcttcagtgttcgcttyttcagaactacarctgtatgcaagkatgacttggttacagtcaaaaccccagcgtttgcagaayctgtcacagagggagatgtcaggtgggagaaagctgttggagacacagttgcagaagatgaagtggtttgtgagattgaaactgacaagacattggtgcaggttccatcaccagcaaatggcrtgattgaagctcttttcgtacctgatgggggaaaagtcgaaggaggcactccgcttttcacactcaggaaaactggtgctgctcctgctaaggccaagccggctgaagctcctgctgctgcagccccaaaagcagaacctatagcagcggcagttcctccccrtgcagcacccatacccactcgatgccaccagtgccctcgccctcacarcctccttctagcaaacstgtgtctgcagtaaaacccactgctgtcccaccactagctgagccaggagctggcaaaggtctgcattcagaacatcrggagaaaatgaacaggatgcggcartgcattgctcagcgtctgaaggaggcccagaatacatgtgccaatgctgacaatttttaatgagattgatgtgagtaacatccagaaratgagggctcggcacaaagaggcttttttgaagaaacataacctcaaactaggcttcatgtcggcatctgtgaaggcctcagcctttgccttgcaggaacagcctgttgtaaacgcagtgattgatgatataaccaaagaggtggtatatagggattatattgacatcagtgttgcagtggccmccccacagggtctggtggttccagtcatcaggaatgtggaagctatgaattatgcagatattgaacagaccatcactgaactgggagagaaggcccgaaagaatgaatttgccattgaagatatggatggyggtaccttcaccattagcaatggaggtgtttttggctcactctttgaacacccattatcaacccccctgtctgccatcctggggatgcatggcatctttgacaagccagtggctataggaggcaaggtagaggtgcagcccatgatgtacgtggcactgacctatgatcaccggctgattgatggcagagaggctgtgactttcctccgcaaaatcaaggcagcggtagaggatcccagagtcctcctctttgatctttaggaggaacccacacaccctacaaattgatcatgcaggaactgaaaaccagtcttctccctgtcccctcatgggtcccaggttagcctggtgacaggcacatgctgttggcctcamgcaaggaagcagagcactatgtaaccagcagtcacagcttttttcttggtgttcctgcctggctctctccctctctgcacctgtctcataccctcgaatatcttaattccttaggcttgagagagagccttaatggatgctcattcatattcctgcctttcttccatcagctctctgcaaagatgattttgcttctccctagtgctggtatactatagagaaacccccgaggaccatgtgattaagttcctatcttttgaaagtttgttctgcagagacatctaggaggatgctgtgcctcccaagctcagagcagcctctgtcctggctgtgcacattctcgattccacttgtatggagggattgaacacaggcaaagaggtgctgctttccttcttcaatggcaccttcattctccattgtcattgacttcaagatgcctcttctacctctaccaggaagcacaggccaggggatctgggtgtgtgaatgggaggaragagcagaggttccctgaggtcacgtgttgtaatcatcatagaaggagagcccaggtctgccctcacgctctccatcataggctcacaccaagaagactcatcttggcacaatctcacacagctggggctgtagcaaccctttcctggttgctgggcctcattctagcaccttgttcttacttagagcagattctagcacatcatggcagtggaaccaagcgtagtcccgaagaagggccagagcctggtagagattagggaagggaggtctcctctagactcagattgccttgagcttttcaagtaagttgctgtaagcccgtgggctgaggaggcagttcttgttccttcctgcgttatagtggggccttgtctcttcctctgcaggacacagatttggaggacgtggactggggtaggaaaccaccctgagggtgttagtagatagtggtgtaatggatgaggtcatttctaagatgtgttgccggtggatctgggcacaatcattggaattccttggagctactgggattcatggctttgtatccaactgcatccaggccwgaggctgctgacatttgacactagggccagtagagagtgcctttttgtatcttgagccaagaagtgaggcctgggggtggggaggggggaaggggtgggagccaatactgagtgcctgcagcatctactactctgtcttcactattcagaacttgtaactaaagtatttaaagaaactgattttaaatgcaaattaaagggcagatgttctcaaa

SEQ ID NO: 4336 - DNA, 3351 bp, Homo sapiens
accttagcaagctacaaagtctttagattcccttagtattcatataataaaatcaaattttctaaactttgccacacaagatagttcccaggtcagcagtttcaacatcatttgggcacttgttagaaatgcacagtatcaggccctaccctacacttaaagaatcgggatctgtattttaaaagatsctcagctgattaatagccaygttaaacttttagaagcactgatctaatcccctaaatttcacatataaagaaacagagaccaccyctcagaggagcaaacacagacatgctggatccggtcgtcactggatgggaacagggctcctraagtttcgcactagaaggcaggcgatggacaggcgcaaaggggcctcacccggtcaaggagtaggatgcggccagcgcaggagctggtggtgaaaaactgatctcgcatgttcagaaactgcacaagctctaccacatcctcgtcaacactgcccttccggctgaggtccgctttgctcaaacattgcgccttccatttcctgaactccgcgctgcgatccatgggtgacggactcagggtctgcgctcggctccttcatggtagcctcgtctctccctgggggcagccatattgaagcgagcggtggccgaaaaggtccaaacttcctcttcgttcttaatttgggaaattctagtgccttcgcctaggggtggagmgaggcgcacakcctgggtggagcgaggcgcacakcctgggtggagcctgcaaaagttggagaaggtgtggcagtcctcatttctgtggaatctgaagaagcccacgcagattttaattcccactctagattctgtatctagatcaccatggcgactggacagaagttgatgagagctgttagagtttttgaatttggtggrccagaagtcctgaaattgcgatcagatattgcagtaccgattccaaaagaccatcaggttctaatcaaggtccatgcatgtggtgtcaaccccgtggagacatacattcgctctggtacttatagtagaaaaccactcttaccctatactcctggctcagatgtggctggggtgatagaagctgttggagataatgcatctgctttcaagaaaggtgacagagttttcactagcagcacgatctctgggggttatgcagagtatgctcttgcagcagaccacactgtttacaaactacctgaaaaactggactttaaacaaggagctgccatcggcattccatattttactgcttatcgagctctgatccacagtgcctgtgtgaaagctggagagagtgttctggttcatggggcaagtggaggagttggattagcagcatgccaaattgctagagcttatggcttaaagrttttgggcactgctggtactraggaaggacaaaagattgttttgcaaaatggagcccatgaagtgttcaatcacagagaagtgaattacattgataaaattaagaagtatgttggtgagaaaggaattgatataattattgaaatgttagctaatgtaaatcttagtaaagacttgagtcttctgtcacatggaggacgagtgatagttgttggcagcagaggtactattgaaataaacccacgagacaccatggcaaaggagtcgagtataattggagttactctcttttcctcaaccaaggaggaatttcagcaatatgcagcagcccttcaagctggaatggaaattggctggttgaaacctgtgataggttctcaatatccattggagaaggtggccgaggctcatgaaaatatcattcatggtagtggggctactggwaaaatgattcttctcttatgatgattaattctttcatggatttcctatgtaattagaggtacygtctttcccccagttgtacttaccctatcttttctttaattaacattcgattccatgagcttcttatgtgaaaaaataagatttttctttagagagcagaagcagaagagtaaaatttattgtatagctagcaatatttttttatgccatctgwctcaaatcaaagagtcatcatagtaggaaatarcatgttagttgtcatttggcatgagtgtgcattccagtaattcttaattgatatttgattaattccatacctttgattaaaacatgctagttcaaaataagactgctcagtttccaagggttttcaagcctacttacctttataaaggttctctagtctctgattagccatgactgtattggactttgaacattttctgawctaaaaacctctattctaaactaatctcatttggatgtgtaagtcttttgtaaaggcaagaataaataatatccaggacaatttattagttttctcagtattttcccaaatattagaatatttacttcattattggttggctgccaatgaccccatatgttctgtgagaatagtagctttatctttgatataatacatagtctccaaataggtaatacttcgcaattgattagattttcagagtagatttagagttatctgtttttctggtgagggtcaaatatttttgttaattaagctcacaaatttgataaattaagaattatctgcatttgtctbgtaacataataatgtgtaataaagtctatagaaaattaaaacctgcttttctagtttttatattatttgcctctcatcacttctgcatagctcctgacagtwacttcttaacagtgttctatgctggaagcctttatctaaactaaatacagggatgacctcttagcaatcttgccatcaatattatattcaagaaaataaaagttcggttatttgttgtttttgtttttcttcacataagcacatacttttgtcttgctacattatgtgattgattgttttgacctgattttttctgttgaatgacaatttctggcttgaatatggaatcctgcttcaggaataaacagaaaacaccgctaatttctatagttgaaggatatcattggcttctggttgtatgtgccatggctgaagtgttttttgctattagcattttcaagtttatccactgtttcttttacaggttaactaccctgtaaaattacttaaaaaaaaagtgttaaggcaatgtcatcaacataggctggcattttatgtgcatcctaaaatggaggattcctttccatgtaaacaaggtaaaagaataattattctgtaaaagtcagtttaatctgtttgtatatttgcctcatctatagaaggagctaaagcatacagatgacttaacacttcaaaatacattgatacagtttaattaattttgaagccaaaactagccaaactgtgtgc

SEQ ID NO: 4337 - DNA, 3296 bp, Homo sapiens
accttagcaagctacaaagtctttagattcccttagtattcatataataaaatcaaattttctaaactttgccacacaagatagttcccaggtcagcagtttcaacatcatttgggcacttgttagaaatgcacagtatcaggccctaccctacacttaaagaatcgggatctgtattttaaaagatsctcagctgattaatagccaygttaaacttttagaagcactgatctaatcccctaaatttcacatataaagaaacagagaccaccyctcagaggagcaaacacagacatgctggatccggtcgtcactggatgggaacagggctcctraagtttcgcactagaaggcaggcgatggacaggcgcaaaggggcctcacccggtcaaggagtaggatgcggccagcgcaggagctggtggtgaaaaactgatctcgcatgttcagaaactgcacaagctctaccacatcctcgtcaacactgcccttccggctgaggtccgctttgctcaaacattgcgccttccatttcctgaactccgcgctgcgatccatgggtgacggactcagggtctgcgctcggctccttcatggtagcctcgtctctccctgggggcagccatattgaagcgagcggtggccgaaaaggtccaaacttcctcttcgttcttaatttgggaaattctagtgccttcgcctaggggtggagmgaggcgcacakcctgggtggagcgaggcgcacakcctgggtggagcctgcaaaagttggagaaggtgtggcagtcctcatttctgtggaatctgaagaagcccacgcagattttaattcccactctagattctgtatctagatcaccatggcgactggacagaagttgatgagagctgttagagtttttgaatttggtggrccagaagtcctgaaattgcgatcagatattgcagtaccgattccaaaagaccatcaggttctaatcaaggtccatgcatgtggtgtcaaccccgtggagacatacattcgctctggtacttatagtagaaaaccactcttaccctatactcctggctcagatgtggctggggtgatagaagctgttggagataatgcatctgctttcaagaaaggtgacagagttttcactagcagcacgatctctgggggttatgcagagtatgctcttgcagcagaccacactgtttacaaactacctgaaaaactggactttaaacaaggagctgccatcggcattccatattttactgcttatcgagctctgatccacagtgcctgtgtgaaagctggagagagtgttctggttcatggggcaagtggaggagttggattagcagcatgccaaattgctagagcttatggcttaaagrttttgggcactgctggtactraggaaggacaaaagattgttttgcaaaatggagcccatgaagtgttcaatcacagagaagtgaattacattgataaaattaagaagtatgttggtgagaaaggaattgatataattattgaaatgttagctaatgtaaatcttagtaaagacttgagtcttctgtcacatggaggacgagtgatagttgttggcagcagaggtactattgaaataaacccacgagacaccatggcaaaggagtcgagtataattggagttactctcttttcctcaaccaaggaggaatttcagcaatatgcagcagcccttcaagctggaatggaaattggctggttgaaacctgtgataggttctcaatatccattggagaaggtggccgaggctcatgaaaatatcattcatggtagtggggctactggwaaaatgattcttctcttatgatgattaattctttcatggatttcctatgtaattagaggtacygtctttcccccagttgtacttaccctatcttttctttaattaacattcgattccatgagcttcttatgtgaaaaaataagatttttctttagagagcagaagcagaagagtaaaatttattgtatagctagcaatatttttttatgccatctgwctcaaatcaaagagtcatcatagtaggaaatarcatgttagttgtcatttggcatgagtgtgcattccagtaattcttaattgatatttgattaattccatacctttgattaaaacatgctagttcaaaataagactgctcagtttccaagggttttcaagcctacttacctttataaaggttctctagtctctgattagccatgactgtattggactttgaacattttctgawctaaaaacctctattctaaactaatctcatttggatgtgtaagtcttttgtaaaggcaagaataaataatatccaggacaatttattagttttctcagtattttcccaaatattagaatatttacttcattgatataatacatagtctccaaataggtaatacttcgcaattgattagattttcagagtagatttagagttatctgtttttctggtgagggtcaaatatttttgttaattaagctcacaaatttgataaattaagaattatctgcatttgtctbgtaacataataatgtgtaataaagtctatagaaaattaaaacctgcttttctagtttttatattatttgcctctcatcacttctgcatagctcctgacagtwacttcttaacagtgttctatgctggaagcctttatctaaactaaatacagggatgacctcttagcaatcttgccatcaatattatattcaagaaaataaaagttcggttatttgttgtttttgtttttcttcacataagcacatacttttgtcttgctacattatgtgattgattgttttgacctgattttttctgttgaatgacaatttctggcttgaatatggaatcctgcttcaggaataaacagaaaacaccgctaatttctatagttgaaggatatcattggcttctggttgtatgtgccatggctgaagtgttttttgctattagcattttcaagtttatccactgtttcttttacaggttaactaccctgtaaaattacttaaaaaaaaagtgttaaggcaatgtcatcaacataggctggcattttatgtgcatcctaaaatggaggattcctttccatgtaaacaaggtaaaagaataattattctgtaaaagtcagtttaatctgtttgtatatttgcctcatctatagaaggagctaaagcatacagatgacttaacacttcaaaatacattgatacagtttaattaattttgaagccaaaactagccaaactgtgtgc

SEQ ID NO: 4338 - DNA, 3390 bp, Homo sapiens
accttagcaagctacaaagtctttagattcccttagtattcatataataaaatcaaattttctaaactttgccacacaagatagttcccaggtcagcagtttcaacatcatttgggcacttgttagaaatgcacagtatcaggccctaccctacacttaaagaatcgggatctgtattttaaaagatsctcagctgattaatagccaygttaaacttttagaagcactgatctaatcccctaaatttcacatataaagaaacagagaccaccyctcagaggagcaaacacagacatgctggatccggtcgtcactggatgggaacagggctcctraagtttcgcactagaaggcaggcgatggacaggcgcaaaggggcctcacccggtcaaggagtaggatgcggccagcgcaggagctggtggtgaaaaactgatctcgcatgttcagaaactgcacaagctctaccacatcctcgtcaacactgcccttccggctgaggtccgctttgctcaaacattgcgccttccatttcctgaactccgcgctgcgatccatgggtgacggactcagggtctgcgctcggctccttcatggtagcctcgtctctccctgggggcagccatattgaagcgagcggtggccgaaaaggtccaaacttcctcttcgttcttaatttgggaaattctagtgccttcgcctaggggtggagmgaggcgcacakcctgggtggagcgaggcgcacakcctgggtggagcctgcaaaagttggagaaggtgtggcagtcctcatttctgtggaatctgaagaagcccacgcagattttaattcccactctagattctggcttcatcgttatgaagcatatgatgatcccgtggatagtatctagatcaccatggcgactggacagaagttgatgagagctgttagagtttttgaatttggtggrccagaagtcctgaaattgcgatcagatattgcagtaccgattccaaaagaccatcaggttctaatcaaggtccatgcatgtggtgtcaaccccgtggagacatacattcgctctggtacttatagtagaaaaccactcttaccctatactcctggctcagatgtggctggggtgatagaagctgttggagataatgcatctgctttcaagaaaggtgacagagttttcactagcagcacgatctctgggggttatgcagagtatgctcttgcagcagaccacactgtttacaaactacctgaaaaactggactttaaacaaggagctgccatcggcattccatattttactgcttatcgagctctgatccacagtgcctgtgtgaaagctggagagagtgttctggttcatggggcaagtggaggagttggattagcagcatgccaaattgctagagcttatggcttaaagrttttgggcactgctggtactraggaaggacaaaagattgttttgcaaaatggagcccatgaagtgttcaatcacagagaagtgaattacattgataaaattaagaagtatgttggtgagaaaggaattgatataattattgaaatgttagctaatgtaaatcttagtaaagacttgagtcttctgtcacatggaggacgagtgatagttgttggcagcagaggtactattgaaataaacccacgagacaccatggcaaaggagtcgagtataattggagttactctcttttcctcaaccaaggaggaatttcagcaatatgcagcagcccttcaagctggaatggaaattggctggttgaaacctgtgataggttctcaatatccattggagaaggtggccgaggctcatgaaaatatcattcatggtagtggggctactggwaaaatgattcttctcttatgatgattaattctttcatggatttcctatgtaattagaggtacygtctttcccccagttgtacttaccctatcttttctttaattaacattcgattccatgagcttcttatgtgaaaaaataagatttttctttagagagcagaagcagaagagtaaaatttattgtatagctagcaatatttttttatgccatctgwctcaaatcaaagagtcatcatagtaggaaatarcatgttagttgtcatttggcatgagtgtgcattccagtaattcttaattgatatttgattaattccatacctttgattaaaacatgctagttcaaaataagactgctcagtttccaagggttttcaagcctacttacctttataaaggttctctagtctctgattagccatgactgtattggactttgaacattttctgawctaaaaacctctattctaaactaatctcatttggatgtgtaagtcttttgtaaaggcaagaataaataatatccaggacaatttattagttttctcagtattttcccaaatattagaatatttacttcattattggttggctgccaatgaccccatatgttctgtgagaatagtagctttatctttgatataatacatagtctccaaataggtaatacttcgcaattgattagattttcagagtagatttagagttatctgtttttctggtgagggtcaaatatttttgttaattaagctcacaaatttgataaattaagaattatctgcatttgtctbgtaacataataatgtgtaataaagtctatagaaaattaaaacctgcttttctagtttttatattatttgcctctcatcacttctgcatagctcctgacagtwacttcttaacagtgttctatgctggaagcctttatctaaactaaatacagggatgacctcttagcaatcttgccatcaatattatattcaagaaaataaaagttcggttatttgttgtttttgtttttcttcacataagcacatacttttgtcttgctacattatgtgattgattgttttgacctgattttttctgttgaatgacaatttctggcttgaatatggaatcctgcttcaggaataaacagaaaacaccgctaatttctatagttgaaggatatcattggcttctggttgtatgtgccatggctgaagtgttttttgctattagcattttcaagtttatccactgtttcttttacaggttaactaccctgtaaaattacttaaaaaaaaagtgttaaggcaatgtcatcaacataggctggcattttatgtgcatcctaaaatggaggattcctttccatgtaaacaaggtaaaagaataattattctgtaaaagtcagtttaatctgtttgtatatttgcctcatctatagaaggagctaaagcatacagatgacttaacacttcaaaatacattgatacagtttaattaattttgaagccaaaactagccaaactgtgtgc

SEQ ID NO: 4339 - DNA, 1963 bp, Homo sapiens
agcctcctcaggacsggtactcaggaatttcgcccgcagggactaacaccacttggacccaggractccagcttcactccgctttgtgcactgggtggggcggtcgcggtgacgtttcaggcaacgcctctgctgtcagccaataaggagcgggagacgcgtcgggcctgcgctcaatgggccgcgctggtcccgccccactgtgatcgtgagactgcagacccgctaataaaatccaccccaacaatcgctgtgtgccgctttagtgcgctcgccgtcggctctacctgcgtgctttagctccttctcgcctgatccttctgtctctcccaaccccggacacccggcttcgactggttatatcttcggtgttcttttcctctcttcttctttcgcggttcagcatgcaggaaaaagacgcctcctcacaaggtttcctgccacacttccaacatttcgccacgcaggcgatccatgtgggccaggatccagagcaatggacctccagggctgtagtgccccccatctcactrtccaccacgttcaagcaaggggcgcctggccagcactcgggttttgaatatagccgttctggaaatcccactaggaattgccttgaaaaagcagtggcagcactggatggggctaagtactgtttggcctttgcttcaggtttagcagccactgtaactattacccatcttttaaaagcaggagaccaaattatttgtatggatgatgtgtatggaggtacaaacaggtacttcaggcaagtggcatctgaatttggattaaagatttcttttgttgattgttccaaaatcaaattactagaggcagcaattacaccagaaaccaagcgccctttggctctgggagctgatatttctatgtattctgcaacaaaatacatgaatggccacagtgatgttgtaatgggcctggtgtctgttaattgtgaaagccttcataatagacttcgtttcttgcaaaactctcttggagcagttccatctcctattgattgttacctctgcaatcgaggtctgaagactctacatgtccgaatggaaaagcatttcaaaaacggaatggcagttgcccagttcctggaatctaatccttgggtagaaaaggttatttatcctgggctgccctctcatccacagcatgagttggtgaagcgtcagtgtacaggttgtacagggatggtcaccttttatattaagggcactcttcagcatgctgagattttcctcaagaacctaaagctatttactctggccgagagcttgggaggattcgaaagccttgctgagcttccggcaatcatgactcatgcatcagttcttaagaatgacagagatgtccttggaattagtgacacactgattcgactttctgtgggcttagaggatgaggaagacctactggaagatctagatcaagctttgaaggcagcacaccctccaagtggaaktcacagctagtattccagagctgctattagaagctgcttcctgtgaagatcaaatcttcctgagtaattaaatggaccaacaatgagcctttgcaaaattttcaagcggaaattttaaggcacctcattatctttcataactgtaattttcttagggatcatctctgttaaaaagttttctgtatgtcatgttataattacaggtcaattctgttaatatctttttgttaattttgctctatgtttgcctctgaaggaggtgagatttgtgctactttgggagattatgttcttttttcatgtctaagatttattttgatcatgtttataatataatggtaattcatttttgatgttttgtgaagaatttaaatttaaacgaatgttcttaaatcaagtgtgatttttttgcatatcattgaaaagaacattaaaagcaatggtttacacttagttaccataagccgaaaatcaaatacttga

SEQ ID NO: 4340 - DNA, 2095 bp, Homo sapiens
agcctcctcaggacsggtactcaggaatttcgcccgcagggactaacaccacttggacccaggractccagcttcactccgctttgtgcactgggtggggcggtcgcggtgacgtttcaggcaacgcctctgctgtcagccaataaggagcgggagacgcgtcgggcctgcgctcaatgggccgcgctggtcccgccccactgtgatcgtgagactgcagacccgctaataaaatccaccccaacaatcgctgtgtgccgctttagtgcgctcgccgtcggctctacctgcgtgctttagctccttctcgcctgatccttctgtctctcccaaccccggacacccggcttcgactggttatatcttcggtgttcttttcctctcttcttctttcgcggttcagcatgcaggaaaaagacgcctcctcacaaggtttcctgccacacttccaacatttcgccacgcaggcgatccatgtgggccaggatccagagcaatggacctccagggctgtagtgccccccatctcactrtccaccacgttcaagcaaggggcgcctggccagcactcgggttttgaatatagccgttctggaaatcccactaggaattgccttgaaaaagcagtggcagcactggatggggctaagtactgtttggcctttgcttcaggtttagcagccactgtaactattacccatcttttaaaagcaggagaccaaattatttgtatggatgatgtgtatggaggtacaaacaggtacttcaggcaagtggcatctgaatttggattaaagatttcttttgttgattgttccaaaatcaaattactagaggcagcaattacaccagaaaccaagcttgtttggatcgaaacccccacaaaccccacccagaaggtgattgacattgaaggctgtgcacatattgtccataagcatggagacattattttggtcgtggataacacttttatgtcaccatatttccagcgccctttggctctgggagctgatatttctatgtattctgcaacaaaatacatgaatggccacagtgatgttgtaatgggcctggtgtctgttaattgtgaaagccttcataatagacttcgtttcttgcaaaactctcttggagcagttccatctcctattgattgttacctctgcaatcgaggtctgaagactctacatgtccgaatggaaaagcatttcaaaaacggaatggcagttgcccagttcctggaatctaatccttgggtagaaaaggttatttatcctgggctgccctctcatccacagcatgagttggtgaagcgtcagtgtacaggttgtacagggatggtcaccttttatattaagggcactcttcagcatgctgagattttcctcaagaacctaaagctatttactctggccgagagcttgggaggattcgaaagccttgctgagcttccggcaatcatgactcatgcatcagttcttaagaatgacagagatgtccttggaattagtgacacactgattcgactttctgtgggcttagaggatgaggaagacctactggaagatctagatcaagctttgaaggcagcacaccctccaagtggaaktcacagctagtattccagagctgctattagaagctgcttcctgtgaagatcaaatcttcctgagtaattaaatggaccaacaatgagcctttgcaaaattttcaagcggaaattttaaggcacctcattatctttcataactgtaattttcttagggatcatctctgttaaaaagttttctgtatgtcatgttataattacaggtcaattctgttaatatctttttgttaattttgctctatgtttgcctctgaaggaggtgagatttgtgctactttgggagattatgttcttttttcatgtctaagatttattttgatcatgtttataatataatggtaattcatttttgatgttttgtgaagaatttaaatttaaacgaatgttcttaaatcaagtgtgatttttttgcatatcattgaaaagaacattaaaagcaatggtttacacttagttaccataagccgaaaatcaaatacttga

SEQ ID NO: 4341 - DNA, 2670 bp, Homo sapiens
tccttcttcattctgcagttggtgccagaactctggatcctgaactggaagaaaatgtctatccaggttgagcatcctgctggtggttacaagaaactgtttgaaactgtggaggaactgtcctcgccgctcacagctcatgtaacaggcaggatccccctctggctcaccggcagtctccttcgatgtgggccaggactctttgaagttggatctgagccattttaccacctgtttgatgggyaagccctcctgyacaagtttgactttaaagaaggacatgtcacataccacagaaggttcatccgcactgatgcttacgtacgggcaatgactgagaaaaggatcgtcataacadaatttggcacctgtgctttcccagatccctgcaagaatatattttccaggtttttttcttactttygaggagtagaggttactgacaatrcccttgttaatgtctacccagtgggggaagattackacgcttgcacagagaccaactttattacaaagattaatccagagaccttggagacaattaagcaggttgatctttgcaactatgtctctgtcaatggggccactgctcaccccyacattgaaaatgatggaaccgtttacaatattggtaattgctttggaaaaaatttttcaattgcctacaacattgtaaagatcccaccactgcaagcagacaaggaagatccaataagcaagtcagagatcgttgtacaattcccctgcagtgaccgattcaagccatcttacgttcatagttttggtctgactcccaactatatcgtttttgtggagacaccagtcaaaattaacctgttcaagttcctttcttcatggagtctttggggagccaactacatggattgttttgagtccaatgaaaccatggggktttggcttcatattgctgacaaaaaaaggaaaaagtacctcaataataaatacagaacttctcctttcaacctcttccatcacatcaacacctatgaagacaatgggtttctgattgtggatctctgctrctggaaaggatttgagtttgtttataattacttatatttagccaatttacgtgagaactgggaagargtgaaaaaaaatgccagaaaggctccccaamctgaagttaggagatatgtacttcctttgaatattgacaaggctgacacaggcaagaatttagtcacrctccccaatacaactgccactgsaattctgtgcagtgacgagactatctggctggagcctgaagttctcttttcagggcctcgtcaagcatttsagtttcctcaaatcaattaccagaagtattgtgggaaaccttacacatatgygtatggacttggcttgaatcactttgttccagataggctctgtaagctgaatgkcaaaactaaagaaacttgggtttggcaakagcctgattcatacccatcagaacccatctttgtttctcacccagatgccttggaagaagatgatggtgtagttctgagtgtggtggtgagcccaggagcaggacaaaagcctgcttatctcctgattctgaatgccaaggacttaagtgaagttgcccgggctgaagtggagattaacatccctgtcacctttcatggactgttcaaaaaatcttgagcatactccagcaagatatgtttttggtagcaaaactgagaaaatcagcttcaggtctgcaatcaaattctgttcaattttagcctgctatatgtcatggttttaacttgcagatgcgcacaattttgcaatgttttacagaaagcactgagttgagcaagcaattcctttatttaaaaaaaaaagtacgtatttagataatcatacttcctctgtgagacaggccataactgaaaaactcttaaatatttagcaatcaaataggaaatgaatgtggacttactaaatggcttttaattcctattataagagcatattttaggtacctatctgctccaattatatttttaacatttaaaaaccaaagtcctctacacttgatttatattatatgtggctttgctgagtcaaggaagtatcatgcaataaggcttaattactaaatgtcaaaccaaactttttctcaaaccagggactatcatctaagattaattacagtaattattttgcgtatacgtaactgctcaaagrttatgaatcttatgaatgttaacctttccgtttattacaagcaagtactattatttctgattttataataagaaaatctrtgtttaatcaactgaggcctctcaaccaaataacatctcagagattaagttatatattaaaagcttatgtaacataaaagcaagtacatatagtagtgactatatttaaaaaaacagcataaaatgcttaaaaatgtaatatttactaaaatcagattatgggataatgttgcaggattatactttattgcatcttttttgtttaattgtatttaagcattgtgcaatcacttgggaaaaatattaaattattaacattgaggtattaatacattttaagccttttgtttttaaatttcttttsttccagagattgtttaaaaataaatattgacaaaaataatgttttatatcttaattctagtatctgttttatgcttgaaagcattacagatcatgatac

SEQ ID NO: 4342 - DNA, 3850 bp, Homo sapiens
tattagattggctggagggagggcggtgtcggcctwcgcccccagagtcgtccggctgacgctggcggtggcgcggtttgtgtgggcttggtgagggcggggaggcctggctgtgtggatgtctgacaggtgaggcgggggacgcagaagtgcagccgccctctcccacagcggagtccaaaacaggcctaccagtcagttcttatttctattgggtgtttccatgctccaccatgttaagagctaagaatcagctttttttactttcacctcattacctgaggyaggtaaaagaatcatcaggctccaggctcatacagcaacgacttctacaccagcaacagccccttcacccagaatgggctgccctggctaaaaagcagctgaaaggcwaaaacccagaagacctaatatggcacaccccggaagggatctctataaaacccttgtattccaagagagatactatggacttacctgaakaacttccaggagtgaagccattcacacrtgkaccatatcctaccatgtatacctttaggcccyggaccatccrccagtatgctggttttagtactgtggaagaaagcaataagttctataaggacaacattaaggctggtcagcagggattatcagttgcctttgatctggcgacacatcgtggctatgattcagacaaccctcgagttcgtggtratgttgkaatggctggagttgctattgacactgtggaagataccaaaattctttytgatggaattcctttagaaaaaatgtcagtttccatgactatgaatggagmagttattccagttcttrcaaattttatagtaactrgagaagaacaaggtgtacctaaagagaarcttactggtaccatccamwatgatatactaaaggaatttatggttcraaatacawacatttttcctccagaaccatccatgaaaattattgctgacatatttgaatatacagcaaagcacatgccaaaatttaattcaatttcaattagtggataccatatgcaggaagcaggggctgatgccattctggagctggcctatactttagcagatggattggagtactctagaactggactccaggctggcctgacaattgatgaatttgcaccaaggttgtctttcttctggggaattggaatgaatttctatatggaaatagcaaagatgagagctggtagaagactctgggctcacttaatagagaaaatgtttcagcctaaaaactcaaaatctcttcttctaagagcacactgtcagacatctggatggtcacttactgagcaggatccctacaataatattgwccgtactgcaatagaagcaatggcagmagtatttggagggactcagtctttgcacacaaattcttttgatgaagctttgggtttgccaactgtgaaaagtgctygaattgccaggaacacacaaatcatcattcaakaagaatctgggattcccaaagtggctgatccttggggaggttcttacatgatggaatgtctcacaaatgatgtttatgatgctgctttaaagctcattaatgaaattgaagaaatgggtggaatggccaaagctgtagctgagggaatacctaaacttygaattgaagaatgtgctgcccgaagacaagctagaatagattctggttctgaagtaattgttggagtaaataagtaccagttggaaaaagaagacrctgtagaagttctggcaattgataatacttcagtgcgaaacaggcagattgaaaaacttaagaagatcaaatccagcagggatcaagctttggctgaacrttgtcttsctgcactaaccgaatgtgctgctagcggagatggaaatatcctggctcttgcagtggatgcatctcgggcaagatgtacagtgggagaaatcacagatgccctgaaaaaggtatttggtgaacataaagcgaatgatcgaatggtgagtggagcatatcgccaggaatttggagaaagtaaagagataacatctgctatcaagagggttcataaattcatggaacgtgaaggtcgcagacctcgtcttcttgtagcaaawatgrgacaagatkgcmrtgacagagragcaaaagktattgctacaggatttgctgatcttggttttgatgtggacatagrccctcttttccagactcctcgtgaagtggcccagcaggctgtggatgcggatgtgcatgctgwgggcrtaagcaccctcgctgctggtcrtaaaaccctagttcctgaackcatcaaagaacttaactcccttggayggccagatattcttgtcatgtgtggasgggtgataccacctcaggattatgaatttctgtttgaagttggtgtttccaatgtatttggtcctgggactcgaattccaaaggctgccgttcaggtgcttgatgatattgagaagtgtttggaaaagaagcagcaatctgtataatatcctctttttgttttagcttttgtctaraatattattttagttatgatcaaagaagagagtaaagctatgtcttcaatttaatttcaatacctgatttgtactttmcttgaaagctttactttaaaataccttacttataggcctggtgtcatgctataagtatgtacatacagtttcacttcaaaaataaaaaaaaaatccctaaaaactctctatactctctataacaatactttatcaagaactctggacaatggtattatttttaaaaatcatggtgatgtatttattagaatgtttcttataaatctstttactttttatattaagaattaaactgtacctaaaaaaactctgactattcccatttstcagtttagcattacattgtcttgagcaccagaaaataaaatccatatattaatwaaaacctatcttgaaaaactagtggagtgtatttacgtggcaaaagagattttgggaggagtcctcagccaaattctaccagaatcaccttaataaaagaagtattaaaatcaagcacagcaggttggaatatggggaatttgacagtatrtttcttcaagtctgagtttactttcttcctgatcatgaccatctgaccttgttatttctgggcttggctcaagaccaaggagagtggatgttgatgaacattcctttaaataaaagtgcttaggttgtagttatggctttgtctagaatggtgatgtcaactgtgagtgtaggtctgtgatatagaaagaattcaactttccagatctagaaagatgctaccttgcatagatttgctccttaaacataaattgcaaaaataaaaatatcacagagaacacctgtactttgcttactgaaagatttgctcactaaagaaggaaagttgccatttacctgtttaacaaatctgcacatcctgcacatgttccccagaatgtaaaataaaaaaagtttaaataaaaaaggaaagttgtcctttattgttaacatgatccattacatgaatataacataaataattatcttttttaataaatttctattgtattagatcagagagcagtcttttggaaagtattatagatacattactgtagaatttacaaactcattgtaatacaatgtatttaattttcagaatatgattatctgaatggtattgtcatgattattgttcccattttcagatgaacactgacttcaagtccaatgatatattcactatgccattttattgacttttccttgtaaagcaatgcacactaatttagtaagtatttggtttctgtgatgtgttcagttgcrtgctgggtgacatgtgaaataaactcatccttgaggaa

SEQ ID NO: 4343 - DNA, 3702 bp, Homo sapiens
gggcttggtgagggcggggaggcctggctgtgtggatgtctgacaggtcagttcttatttctattgggtgtttccatgctccaccatgttaagagctaagaatcagctttttttactttcacctcattacctgaggyaggtaaaagaatcatcaggctccaggctcatacagcaacgacttctacaccagcaacagccccttcacccagaatgggctgccctggctaaaaagcagctgaaaggcwaaaacccagaagacctaatatggcacaccccggaagggatctctataaaacccttgtattccaagagagatactatggacttacctgaakaacttccaggagtgaagccattcacacrtgkaccatatcctaccatgtatacctttaggcccyggaccatccrccagtatgctggttttagtactgtggaagaaagcaataagttctataaggacaacattaaggctggtcagcagggattatcagttgcctttgatctggcgacacatcgtggctatgattcagacaaccctcgagttcgtggtratgttgkaatggctggagttgctattgacactgtggaagataccaaaattctttytgatggaattcctttagaaaaaatgtcagtttccatgactatgaatggagmagttattccagttcttrcaaattttatagtaactrgagaagaacaaggtgtacctaaagagaarcttactggtaccatccamwatgatatactaaaggaatttatggttcraaatacawacatttttcctccagaaccatccatgaaaattattgctgacatatttgaatatacagcaaagcacatgccaaaatttaattcaatttcaattagtggataccatatgcaggaagcaggggctgatgccattctggagctggcctatactttagcagatggattggagtactctagaactggactccaggctggcctgacaattgatgaatttgcaccaaggttgtctttcttctggggaattggaatgaatttctatatggaaatagcaaagatgagagctggtagaagactctgggctcacttaatagagaaaatgtttcagcctaaaaactcaaaatctcttcttctaagagcacactgtcagacatctggatggtcacttactgagcaggatccctacaataatattgwccgtactgcaatagaagcaatggcagmagtatttggagggactcagtctttgcacacaaattcttttgatgaagctttgggtttgccaactgtgaaaagtgctygaattgccaggaacacacaaatcatcattcaakaagaatctgggattcccaaagtggctgatccttggggaggttcttacatgatggaatgtctcacaaatgatgtttatgatgctgctttaaagctcattaatgaaattgaagaaatgggtggaatggccaaagctgtagctgagggaatacctaaacttygaattgaagaatgtgctgcccgaagacaagctagaatagattctggttctgaagtaattgttggagtaaataagtaccagttggaaaaagaagacrctgtagaagttctggcaattgataatacttcagtgcgaaacaggcagattgaaaaacttaagaagatcaaatccagcagggatcaagctttggctgaacrttgtcttsctgcactaaccgaatgtgctgctagcggagatggaaatatcctggctcttgcagtggatgcatctcgggcaagatgtacagtgggagaaatcacagatgccctgaaaaaggtatttggtgaacataaagcgaatgatcgaatggtgagtggagcatatcgccaggaatttggagaaagtaaagagataacatctgctatcaagagggttcataaattcatggaacgtgaaggtcgcagacctcgtcttcttgtagcaaawatgrgacaagatkgcmrtgacagagragcaaaagktattgctacaggatttgctgatcttggttttgatgtggacatagrccctcttttccagactcctcgtgaagtggcccagcaggctgtggatgcggatgtgcatgctgwgggcrtaagcaccctcgctgctggtcrtaaaaccctagttcctgaackcatcaaagaacttaactcccttggayggccagatattcttgtcatgtgtggasgggtgataccacctcaggattatgaatttctgtttgaagttggtgtttccaatgtatttggtcctgggactcgaattccaaaggctgccgttcaggtgcttgatgatattgagaagtgtttggaaaagaagcagcaatctgtataatatcctctttttgttttagcttttgtctaraatattattttagttatgatcaaagaagagagtaaagctatgtcttcaatttaatttcaatacctgatttgtactttmcttgaaagctttactttaaaataccttacttataggcctggtgtcatgctataagtatgtacatacagtttcacttcaaaaataaaaaaaaaatccctaaaaactctctatactctctataacaatactttatcaagaactctggacaatggtattatttttaaaaatcatggtgatgtatttattagaatgtttcttataaatctstttactttttatattaagaattaaactgtacctaaaaaaactctgactattcccatttstcagtttagcattacattgtcttgagcaccagaaaataaaatccatatattaatwaaaacctatcttgaaaaactagtggagtgtatttacgtggcaaaagagattttgggaggagtcctcagccaaattctaccagaatcaccttaataaaagaagtattaaaatcaagcacagcaggttggaatatggggaatttgacagtatrtttcttcaagtctgagtttactttcttcctgatcatgaccatctgaccttgttatttctgggcttggctcaagaccaaggagagtggatgttgatgaacattcctttaaataaaagtgcttaggttgtagttatggctttgtctagaatggtgatgtcaactgtgagtgtaggtctgtgatatagaaagaattcaactttccagatctagaaagatgctaccttgcatagatttgctccttaaacataaattgcaaaaataaaaatatcacagagaacacctgtactttgcttactgaaagatttgctcactaaagaaggaaagttgccatttacctgtttaacaaatctgcacatcctgcacatgttccccagaatgtaaaataaaaaaagtttaaataaaaaaggaaagttgtcctttattgttaacatgatccattacatgaatataacataaataattatcttttttaataaatttctattgtattagatcagagagcagtcttttggaaagtattatagatacattactgtagaatttacaaactcattgtaatacaatgtatttaattttcagaatatgattatctgaatggtattgtcatgattattgttcccattttcagatgaacactgacttcaagtccaatgatatattcactatgccattttattgacttttccttgtaaagcaatgcacactaatttagtaagtatttggtttctgtgatgtgttcagttgcrtgctgggtgacatgtgaaataaactcatccttgaggaa

SEQ ID NO: 4344 - DNA, 3139 bp, Homo sapiens
cgccgagggcggcgggctgccgcgcaagggtggcgcgcgcgcgttttccttgttcctggtcaacaaagaaatgtggagtgtcttggctgaatcctcatacagacaagatcattatggtgctgttaggtaggacttgtatccagatgtaaggttgaaaaagtgatataataaaggaaccaaggagaaaattcagaaggaaagaaaaaattggtctcactctgtcaccgaggctggagtacagtggtgcaatcacagctcacggcagcttcaaactcctgggctcaagcgatcctcctgcctcaccctcccgagtagctgagactacagcctctgcaggtgtgcgagcaggattgcttctgcaacaaaagcctccacccagccacwtcttgkgaaaagaatggccacttcttggggcacagtctttttcatgctggtggtatcctgtgtttgcagcgctgtctcccacaggaaccagcagacttggtttgagggtatcttcctgtcttccatgtgccccatcaatgtcagcgccagcaccttgtatggaattatgtttgatgcagggagcactggaactcgaattcatgtttacacctttgtgcagaaaatgccaggacagcttccaattctagaaggggaagtttttgattctgtgaagccaggactttctgcttttgtagatcaacctaagcagggtgctgagaccgttcaagggctcttagaggtggccaaagactcaatcccccgaagtcactggaaaaagaccccagtggtcctaaaggcaacagcaggactacgcttactgccagaacacaaagccaaggctctgctctttgaggtaaaggagatcttcaggaagtcacctttcctggtaccaaagggcagtgttagcatcatggatggatccgacgaaggcatattagcttgggttactgtgaattttctgacaggtcagctgcatggccacagacaggagactgtggggaccttggacctagggggagcctccacccaaatcacgttcctgccccagtttgagaaaactctggaacaaactcctaggggctacctcacttcctttgagatgtttaacagcacttataagctctatacacatagttacytgggatttggattgaaagctgcaagactagcaaccctgggagccctggagacagaagggactgatgggcacactttccggagtgcctgtttaccgagatggttggaagcagagtggatctttgggggtgtgaaataccagtatggtggcaaccaagaaggggaggtgggctttgagccctgctatgccgaagtgctgagggtggtacgaggaaaacttcaccagccagaggaggtccagagaggttccttctatgctttctcttactattatgaccgagctgttgacacagacatgattgattatgaaaaggggggtattttaaaagttgaagattttgaaagaaaagccagggaagtgtgtgataacttggaaaacttcacctcaggcagtcctttcctgtgcatggatctcagctacatcacagccctgttaaaggatggctttggctttgcagacagcacagtcttacagcacatcatcagctgggtaaattgatactcacaaaggcagagttaacggcatccacaaatttttcctcatccatgctaactagctctgctgcatgttcatkkgacgtggaccaaaccaaggaactcaaggtgtctgagagctgtgtcaaaagaacaccaataccaacggctaagactctgctgcacttggaaactctcaagcataaaaagacaaaaagggaacttacaaacagcctgggcagattcccttgaaaccagaaaaaggctgagagaaagtgaagaggaaaggcttgcatgcatgtgggcggactggtcagaaggacctcttaccgggagcagagcaataggcccagagggaagaaatctctgccaggctacgttgttttctgtggcctgcaacagagaggagaaaagtttctctgtgaagtacctagtgcctatgaataaagtccccagatggcagctcaggatcttacctctgataaatgcagagtagccacaacagcagactggtcatagttccagctcacattctggattccaacagcctgccgtactccggagttgtgaccatctgcacctatctgcatggacacatgagcctgctaagtcttccagcctcttcataaactgcttcagaagtttttctctgctccctaaagtttcctccagctctgattgttgtgtggcaggataattccatcaggcctgcttcactcacagcccctagaggtggagcccctgcactgtcacatcagcctcagccaacagagccaaagctggacatgactgaacaggtgccagccatgagttaaactcagccaggccctcctgatatttgaactagagagcaataaggaaagtttcagtatggggcacacactggagctgaatagttctgatgtagggttaggaatggctaccatgcaaaaagggaagcttgtgagcagaaaggagaaaaatgagaggcaagagatcaatgaccacagactcctcagagggaaagaacagcctccattcccaacactctggtgcctgtcctgtgaggcccagctatctgttatttcacaacctaagacggcccatgagattgctccctgtacaggatttacgatgagaccatctccacttgagctggcctgaataggtactggtcctcataaccaaaagttttgcctaaaattaaactatagcttaaatckaaaaccagagtccctagaatctaggataagatgtagatatacaagacccctagcaaaataagaatcttcaactaccaacaatttggtctggaaggtgctgccatcacctagggtaatrtgaacccaagggctggagtcggccataggaaatggacaaggccaggtatagcgaatggctttgctcctgtagagaaccgtcactcggtctggggaggtcaaaagagaggaaaaaaaattagaaaggtgggccacataggctgaggaaaaagccataactaaacctaaagcaaggtcccaggacagcagtgtcttgtcatttaagattaaaaaaatcagtaatt

SEQ ID NO: 4345 - DNA, 2462 bp, Homo sapiens
acctgcagcgaaagcaaggactcagggaaccggcagacacaagcagcctctgcaggtgtgcgagcaggattgcttctgcaacaaaagcctccacccagccacwtcttgkgaaaagaatggccacttcttggggcacagtctttttcatgctggtggtatcctgtgtttgcagcgctgtctcccacaggaaccagcagacttggtttgagggtatcttcctgtcttccatgtgccccatcaatgtcagcgccagcaccttgtatggaattatgtttgatgcagggagcactggaactcgaattcatgtttacacctttgtgcagaaaatgccaggacagcttccaattctagaaggggaagtttttgattctgtgaagccaggactttctgcttttgtagatcaacctaagcagggtgctgagaccgttcaagggctcttagaggtggccaaagactcaatcccccgaagtcactggaaaaagaccccagtggtcctaaaggcaacagcaggactacgcttactgccagaacacaaagccaaggctctgctctttgaggtaaaggagatcttcaggaagtcacctttcctggtaccaaagggcagtgttagcatcatggatggatccgacgaaggcatattagcttgggttactgtgaattttctgacaggtcagctgcatggccacagacaggagactgtggggaccttggacctagggggagcctccacccaaatcacgttcctgccccagtttgagaaaactctggaacaaactcctaggggctacctcacttcctttgagatgtttaacagcacttataagctctatacacatagttacytgggatttggattgaaagctgcaagactagcaaccctgggagccctggagacagaagggactgatgggcacactttccggagtgcctgtttaccgagatggttggaagcagagtggatctttgggggtgtgaaataccagtatggtggcaaccaagaaggggaggtgggctttgagccctgctatgccgaagtgctgagggtggtacgaggaaaacttcaccagccagaggaggtccagagaggttccttctatgctttctcttactattatgaccgagctgttgacacagacatgattgattatgaaaaggggggtattttaaaagttgaagattttgaaagaaaagccagggaagtgtgtgataacttggaaaacttcacctcaggcagtcctttcctgtgcatggatctcagctacatcacagccctgttaaaggatggctttggctttgcagacagcacagtcttacagctcacaaagaaagtgaacaacatagagacgggctgggccttgggggccacctttcacctgttgcagtctctgggcatctcccattgaggccacgtacttccttggagacctgcatttgccaacacctttttaaggggaggagagagcacttagtttctgaactagwctggggacatcctggacttgagcctagagatttaggtttaattaattttacacayctaatgtgaactgctgcctaaccactcaagagtacacagctggcaccagagcatcacagagagccctgtgagccaaaaagtatagttttggaacttaaccttggagtgagagcccagggacaggtccctggaaaccaaagaaaaatcgcatttcaaccctttgagtgcctcattccactgaatatttaaattttcctcttaaatggtaaactgacttattgcaatcccaagacccatcaatatcagtatttttttcctccctatacagtgccctgcccacccttatctgcacccacctcccctgaaaaagagagaaaaaaaaaaacctggttttgctttccatgtataattcaacaacrcaaaatgggaccatgtcagaatctgtatgatcctattctgtgttagctccaatcagccagctgagagccatcctaaatattaataggatgagagagtaactcctaactgtgcataaattacagccttaagaaagaaggccacccggtctctggggacatgttttgggagggtgtggctgcctcatatagcctacctttgctttaatcagcattttatcagtcaactctgggattaatgaacatatccgactttatgggtatgtgtatattcagtgccagtaccacctcccaggctaatgtgttaacagtgttttctatgattctaaacttgttttctttgtatttctaagaaatacaactaggccctaacttttggtctgtggtcagaggtcagtgtctgtgctattccaggatctattatttcagtttgcccttttattctctccgtttgtaacagtaccttcctgtcctggtccctgatcactttagctaatatcctttgaattatttatctagttcagagtttccaataccgttcctgacaaaaccccacttggatttggttg

SEQ ID NO: 4346 - DNA, 1673 bp, Homo sapiens
cggcgcgcggggtggggcggaggtcgcgccgagggcggcgggctgccgcgcaagggtggcgcgcgcgcgttttccttgttcctggtcaacaaagaaatgtggagtgtcttggctgaatcctcatacagacaagatcattatggtgctgttaggttgaaaaagtgatataataaaggaaccaaggagaaaattcagaaggaaagaaaaaattgcctctgcaggtgtgcgagcaggattgcttctgcaacaaaagcctccacccagccacwtcttgkgaaaagaatggccacttcttggggcacagtctttttcatgctggtggtatcctgtgtttgcagcgctgtctcccacaggaaccagcagacttggtttgagggtatcttcctgtcttccatgtgccccatcaatgtcagcgccagcaccttgtatggaattatgtttgatgcagggagcactggaactcgaattcatgtttacacctttgtgcagaaaatgccaggacagcttccaattctagaaggggaagtttttgattctgtgaagccaggactttctgcttttgtagatcaacctaagcagggtgctgagaccgttcaagggctcttagaggtggccaaagactcaatcccccgaagtcactggaaaaagaccccagtggtcctaaaggcaacagcaggactacgcttactgccagaacacaaagccaaggctctgctctttgaggtaaaggagatcttcaggaagtcacctttcctggtaccaaagggcagtgttagcatcatggatggatccgacgaaggcatattagcttgggttactgtgaattttctgacaggtcagctgcatggccacagacaggagactgtggggaccttggacctagggggagcctccacccaaatcacgttcctgccccagtttgagaaaactctggaacaaactcctaggggctacctcacttcctttgagatgtttaacagcacttataagctctatacacatagttacytgggatttggattgaaagctgcaagactagcaaccctgggagccctggagacagaagggactgatgggcacactttccggagtgcctgtttaccgagatggttggaagcagagtggatctttgggggtgtgaaataccagtatggtggcaaccaagaaggggaggtgggctttgagccctgctatgccgaagtgctgagggtggtacgaggaaaacttcaccagccagaggaggtccagagaggttccttctatgctttctcttactattatgaccgagctgttgacacagacatgattgattatgaaaaggggggtattttaaaagttgaagattttgaaagaaaagccagggaagtgtgtgataacttggaaaacttcacctcaggcagtcctttcctgtgcatggatctcagctacatcacagccctgttaaaggatggctttggctttgcagacagcacagtcttacaggctgccrtactgaggtgatgggccaagctggagatatccccaaagcccatgttgacaccctgtcctgcaagcggatggactctgtgggctgcatycctaagaataaagcagagttcaggtgtgacctctggcagcaaagtgagaagggagtggccctgctctgttatcgtcttacccaatgagcgccaccc

SEQ ID NO: 4347 - DNA, 2683 bp, Homo sapiens
cgggctgccgcgcaagggtggcgcgcgcgcgttttccttgttcctggtcaacaaagaaatgtggagtgtcttggctgaatcctcatacagacaagatcattatggtgctgttaggtaggacttgtatccagatgtaaggttgaaaaagtgatataataaaggaaccaaggagaaaattcagaaggaaagaaaaaattgccagccactgggttataaagacattcaagcagccctrtggaggatctacacggggagctactgagacttcctgcccacagctggcatcaacttgccaaccattgagtgagccatcttggagcctctgcaggtgtgcgagcaggattgcttctgcaacaaaagcctccacccagccacwtcttgkgaaaagaatggccacttcttggggcacagtctttttcatgctggtggtatcctgtgtttgcagcgctgtctcccacaggaaccagcagacttggtttgagggtatcttcctgtcttccatgtgccccatcaatgtcagcgccagcaccttgtatggaattatgtttgatgcagggagcactggaactcgaattcatgtttacacctttgtgcagaaaatgccaggacagcttccaattctagaaggggaagtttttgattctgtgaagccaggactttctgcttttgtagatcaacctaagcagggtgctgagaccgttcaagggctcttagaggtggccaaagactcaatcccccgaagtcactggaaaaagaccccagtggtcctaaaggcaacagcaggactacgcttactgccagaacacaaagccaaggctctgctctttgaggtaaaggagatcttcaggaagtcacctttcctggtaccaaagggcagtgttagcatcatggatggatccgacgaaggcatattagcttgggttactgtgaattttctgacaggtcagctgcatggccacagacaggagactgtggggaccttggacctagggggagcctccacccaaatcacgttcctgccccagtttgagaaaactctggaacaaactcctaggggctacctcacttcctttgagatgtttaacagcacttataagctctatacacatagttacytgggatttggattgaaagctgcaagactagcaaccctgggagccctggagacagaagggactgatgggcacactttccggagtgcctgtttaccgagatggttggaagcagagtggatctttgggggtgtgaaataccagtatggtggcaaccaagaaggggaggtgggctttgagccctgctatgccgaagtgctgagggtggtacgaggaaaacttcaccagccagaggaggtccagagaggttccttctatgctttctcttactattatgaccgagctgttgacacagacatgattgattatgaaaaggggggtattttaaaagttgaagattttgaaagaaaagccagggaagtgtgtgataacttggaaaacttcacctcaggcagtcctttcctgtgcatggatctcagctacatcacagccctgttaaaggatggctttggctttgcagacagcacagtcttacagctcacaaagaaagtgaacaacatagagacgggctgggccttgggggccacctttcacctgttgcagtctctgggcatctcccattgaggccacgtacttccttggagacctgcatttgccaacacctttttaaggggaggagagagcacttagtttctgaactagwctggggacatcctggacttgagcctagagatttaggtttaattaattttacacayctaatgtgaactgctgcctaaccactcaagagtacacagctggcaccagagcatcacagagagccctgtgagccaaaaagtatagttttggaacttaaccttggagtgagagcccagggacaggtccctggaaaccaaagaaaaatcgcatttcaaccctttgagtgcctcattccactgaatatttaaattttcctcttaaatggtaaactgacttattgcaatcccaagacccatcaatatcagtatttttttcctccctatacagtgccctgcccacccttatctgcacccacctcccctgaaaaagagagaaaaaaaaaaacctggttttgctttccatgtataattcaacaacrcaaaatgggaccatgtcagaatctgtatgatcctattctgtgttagctccaatcagccagctgagagccatcctaaatattaataggatgagagagtaactcctaactgtgcataaattacagccttaagaaagaaggccacccggtctctggggacatgttttgggagggtgtggctgcctcatatagcctacctttgctttaatcagcattttatcagtcaactctgggattaatgaacatatccgactttatgggtatgtgtatattcagtgccagtaccacctcccaggctaatgtgttaacagtgttttctatgattctaaacttgttttctttgtatttctaagaaatacaactaggccctaacttttggtctgtggtcagaggtcagtgtctgtgctattccaggatctattatttcagtttgcccttttattctctccgtttgtaacagtaccttcctgtcctggtccctgatcactttagctaatatcctttgaattatttatct

SEQ ID NO: 4348 - DNA, 2652 bp, Homo sapiens
cggcgcgcggggtggggcggaggtcgcgccgagggcggcgggctgccgcgcaagggtggcgcgcgcgcgttttccttgttcctggtcaacaaagaaatgtggagtgtcttggctgaatcctcatacagacaagatcattatggtgctgttaggtaggacttgtatccagatgtaaggttgaaaaagtgatataataaaggaaccaaggagaaaattcagaaggaaagaaaaaattgcctctgcaggtgtgcgagcaggattgcttctgcaacaaaagcctccacccagccacwtcttgkgaaaagaatggccacttcttggggcacagtctttttcatgctggtggtatcctgtgtttgcagcgctgtctcccacaggaaccagcagacttggtttgagggtatcttcctgtcttccatgtgccccatcaatgtcagcgccagcaccttgtatggaattatgtttgatgcagggagcactggaactcgaattcatgtttacacctttgtgcagaaaatgccaggacagcttccaattctagaaggggaagtttttgattctgtgaagccaggactttctgcttttgtagatcaacctaagcagggtgctgagaccgttcaagggctcttagaggtggccaaagactcaatcccccgaagtcactggaaaaagaccccagtggtcctaaaggcaacagcaggactacgcttactgccagaacacaaagccaaggctctgctctttgaggtaaaggagatcttcaggaagtcacctttcctggtaccaaagggcagtgttagcatcatggatggatccgacgaaggcatattagcttgggttactgtgaattttctgacaggtcagctgcatggccacagacaggagactgtggggaccttggacctagggggagcctccacccaaatcacgttcctgccccagtttgagaaaactctggaacaaactcctaggggctacctcacttcctttgagatgtttaacagcacttataagctctatacacatagttacytgggatttggattgaaagctgcaagactagcaaccctgggagccctggagacagaagggactgatgggcacactttccggagtgcctgtttaccgagatggttggaagcagagtggatctttgggggtgtgaaataccagtatggtggcaaccaagaaggggaggtgggctttgagccctgctatgccgaagtgctgagggtggtacgaggaaaacttcaccagccagaggaggtccagagaggttccttctatgctttctcttactattatgaccgagctgttgacacagacatgattgattatgaaaaggggggtattttaaaagttgaagattttgaaagaaaagccagggaagtgtgtgataacttggaaaacttcacctcaggcagtcctttcctgtgcatggatctcagctacatcacagccctgttaaaggatggctttggctttgcagacagcacagtcttacagctcacaaagaaagtgaacaacatagagacgggctgggccttgggggccacctttcacctgttgcagtctctgggcatctcccattgaggccacgtacttccttggagacctgcatttgccaacacctttttaaggggaggagagagcacttagtttctgaactagwctggggacatcctggacttgagcctagagatttaggtttaattaattttacacayctaatgtgaactgctgcctaaccactcaagagtacacagctggcaccagagcatcacagagagccctgtgagccaaaaagtatagttttggaacttaaccttggagtgagagcccagggacaggtccctggaaaccaaagaaaaatcgcatttcaaccctttgagtgcctcattccactgaatatttaaattttcctcttaaatggtaaactgacttattgcaatcccaagacccatcaatatcagtatttttttcctccctatacagtgccctgcccacccttatctgcacccacctcccctgaaaaagagagaaaaaaaaaaacctggttttgctttccatgtataattcaacaacrcaaaatgggaccatgtcagaatctgtatgatcctattctgtgttagctccaatcagccagctgagagccatcctaaatattaataggatgagagagtaactcctaactgtgcataaattacagccttaagaaagaaggccacccggtctctggggacatgttttgggagggtgtggctgcctcatatagcctacctttgctttaatcagcattttatcagtcaactctgggattaatgaacatatccgactttatgggtatgtgtatattcagtgccagtaccacctcccaggctaatgtgttaacagtgttttctatgattctaaacttgttttctttgtatttctaagaaatacaactaggccctaacttttggtctgtggtcagaggtcagtgtctgtgctattccaggatctattatttcagtttgcccttttattctctccgtttgtaacagtaccttcctgtcctggtccctgatcactttagctaatatcctttgaattatttatctagttcagagtttccaataccgttcctgacaaaaccccacttggatttggttg

SEQ ID NO: 4349 - DNA, 2548 bp, Homo sapiens
cggcgcgcggggtggggcggaggtcgcgccgagggcggcgggctgccgcgcaagggtggcgcgcgcgcgttttccttgttcctggtcaacaaagaaatgtggagtgtcttggctgaatcctcatacagacaagatcattatggtgctgttaggttgaaaaagtgatataataaaggaaccaaggagaaaattcagaaggaaagaaaaaattgcctctgcaggtgtgcgagcaggattgcttctgcaacaaaagcctccacccagccacwtcttgkgaaaagaatggccacttcttggggcacagtctttttcatgctggtggtatcctgtgtttgcagcgctgtctcccacaggaaccagcagacttggtttgagggtatcttcctgtcttccatgtgccccatcaatgtcagcgccagcaccttgtatggaattatgtttgatgcagggagcactggaactcgaattcatgtttacacctttgtgcagaaaatgccaggacagcttccaattctagaaggggaagtttttgattctgtgaagccaggactttctgcttttgtagatcaacctaagcagggtgctgagaccgttcaagggctcttagaggtggccaaagactcaatcccccgaagtcactggaaaaagaccccagtggtcctaaaggcaacagcaggactacgcttactgccagaacacaaagccaaggctctgctctttgaggtaaaggagatcttcaggaagtcacctttcctggtaccaaagggcagtgttagcatcatggatggatccgacgaaggcatattagcttgggttactgtgaattttctgacaggtcagctgcatggccacagacaggagactgtggggaccttggacctagggggagcctccacccaaatcacgttcctgccccagtttgagttacytgggatttggattgaaagctgcaagactagcaaccctgggagccctggagacagaagggactgatgggcacactttccggagtgcctgtttaccgagatggttggaagcagagtggatctttgggggtgtgaaataccagtatggtggcaaccaagaaggggaggtgggctttgagccctgctatgccgaagtgctgagggtggtacgaggaaaacttcaccagccagaggaggtccagagaggttccttctatgctttctcttactattatgaccgagctgttgacacagacatgattgattatgaaaaggggggtattttaaaagttgaagattttgaaagaaaagccagggaagtgtgtgataacttggaaaacttcacctcaggcagtcctttcctgtgcatggatctcagctacatcacagccctgttaaaggatggctttggctttgcagacagcacagtcttacagctcacaaagaaagtgaacaacatagagacgggctgggccttgggggccacctttcacctgttgcagtctctgggcatctcccattgaggccacgtacttccttggagacctgcatttgccaacacctttttaaggggaggagagagcacttagtttctgaactagwctggggacatcctggacttgagcctagagatttaggtttaattaattttacacayctaatgtgaactgctgcctaaccactcaagagtacacagctggcaccagagcatcacagagagccctgtgagccaaaaagtatagttttggaacttaaccttggagtgagagcccagggacaggtccctggaaaccaaagaaaaatcgcatttcaaccctttgagtgcctcattccactgaatatttaaattttcctcttaaatggtaaactgacttattgcaatcccaagacccatcaatatcagtatttttttcctccctatacagtgccctgcccacccttatctgcacccacctcccctgaaaaagagagaaaaaaaaaaacctggttttgctttccatgtataattcaacaacrcaaaatgggaccatgtcagaatctgtatgatcctattctgtgttagctccaatcagccagctgagagccatcctaaatattaataggatgagagagtaactcctaactgtgcataaattacagccttaagaaagaaggccacccggtctctggggacatgttttgggagggtgtggctgcctcatatagcctacctttgctttaatcagcattttatcagtcaactctgggattaatgaacatatccgactttatgggtatgtgtatattcagtgccagtaccacctcccaggctaatgtgttaacagtgttttctatgattctaaacttgttttctttgtatttctaagaaatacaactaggccctaacttttggtctgtggtcagaggtcagtgtctgtgctattccaggatctattatttcagtttgcccttttattctctccgtttgtaacagtaccttcctgtcctggtccctgatcactttagctaatatcctttgaattatttatctagttcagagtttccaataccgttcctgacaaaaccccacttggatttggttg

SEQ ID NO: 4350 - DNA, 2384 bp, Homo sapiens
cgccgagggcggcgggctgccgcgcaagggtggcgcgcgcgcgttttccttgttcctggtcaacaaagaaatgtggagtgtcttggctgaatcctcatacagacaagatcattatggtgctgttaggtaggacttgtatccagatgtaaggttgaaaaagtgatataataaaggaaccaaggagaaaattcagaaggaaagaaaaaattggtaacctctgcaggtgtgcgagcaggattgcttctgcaacaaaagcctccacccagccacwtcttgkgaaaagaatggccacttcttggggcacagtctttttcatgctggtggtatcctgtgtttgcagcgctgtctcccacaggaaccagcagacttggtttgagggtatcttcctgtcttccatgtgccccatcaatgtcagcgccagcaccttgtatggaattatgtttgatgcagggagcactggaactcgaattcatgtttacacctttgtgcagaaaatgccaggacagcttccaattctagaaggggaagtttttgattctgtgaagccaggactttctgcttttgtagatcaacctaagcagggtgctgagaccgttcaagggctcttagaggtggccaaagactcaatcccccgaagtcactggaaaaagaccccagtggtcctaaaggcaacagcaggactacgcttactgccagaacacaaagccaaggctctgctctttgaggtaaaggagatcttcaggaagtcacctttcctggtaccaaagggcagtgttagcatcatggatggatccgacgaaggcatattagcttgggttactgtgaattttctgacaggtcagctgcatggccacagacaggagactgtggggaccttggacctagggggagcctccacccaaatcacgttcctgccccagtttgagaaaactctggaacaaactcctaggggctacctcacttcctttgagatgtttaacagcacttataagctctatacacatagttacytgggatttggattgaaagctgcaagactagcaaccctgggagccctggagacagaagggactgatgggcacactttccggagtgcctgtttaccgagatggttggaagcagagtggatctttgggggtgtgaaataccagtatggtggcaaccaagaaggggaggtgggctttgagccctgctatgccgaagtgctgagggtggtacgaggaaaacttcaccagccagaggaggtccagagaggttccttctatgctttctcttactattatgaccgagctgttgacacagacatgattgattatgaaaaggggggtattttaaaagttgaagattttgaaagaaaagccagggaagtgtgtgataacttggaaaacttcacctcaggcagtcctttcctgtgcatggatctcagctacatcacagccctgttaaaggatggctttggctttgcagacagcacagtcttacagctcacaaagaaagtgaacaacatagagacgggctgggccttgggggccacctttcacctgttgcagtctctgggcatctcccattgaggccacgtacttccttggagacctgcatttgccaacacctttttaaggggaggagagagcacttagtttctgaactagwctggggacatcctggacttgagcctagagatttaggtttaattaattttacacayctaatgtgaactgctgcctaaccactcaagagtacacagctggcaccagagcatcacagagagccctgtgagccaaaaagtatagttttggaacttaaccttggagtgagagcccagggacaggtccctggaaaccaaagaaaaatcgcatttcaaccctttgagtgcctcattccactgaatatttaaattttcctcttaaatggtaaactgacttattgcaatcccaagacccatcaatatcagtatttttttcctccctatacagtgccctgcccacccttatctgcacccacctcccctgaaaaagagagaaaaaaaaaaacctggttttgctttccatgtataattcaacaacrcaaaatgggaccatgtcagaatctgtatgatcctattctgtgttagctccaatcagccagctgagagccatcctaaatattaataggatgagagagtaactcctaactgtgcataaattacagccttaagaaagaaggccacccggtctctggggacatgttttgggagggtgtggctgcctcatatagcctacctttgctttaatcagcattttatcagtcaactctgggattaatgaacatatccgactttatgggtatgtgtatattcagtgccagtaccacctcccaggctaatgtgttaacagtgttttctatga

SEQ ID NO: 4351 - DNA, 2613 bp, Homo sapiens
cgggacgggattggagtgctctgctccggacgcactacgtaggtggkcctgcgggagttctgagtgcgacggcgcaggtctgcaccatggcggcccggcttgtcagccgatgcggggctgtgcgtgcagctccccacagcggcccgctggtgtcctggcgcaggtggtccggcgcctcaacagacaccgtgtatgacgtggtggtgtcgggtggaggcctggtgggcgctkccatggcctgtgccttgggatatgatattcactttcatgacaagaaaatcctgttgctcgaagcaggtccaaagaaagtactggagaaattgtcagaaacttacagcaacagggtcagctccatttcccctgrctctgcaacgcttctcagtagttttggtgcctgggaccatatctgcaacatgagatacagagcctttcggcgaatgcaggtgtgggacgcctgctcagaggccctgataatgtttgataaggataatttagatgacatgggctatatcgtggagaatgatgtcatcatgcatgctctcactaagcagttggaggctgtgtctgaccgagtgacggttctctacaggagcaaagccattcgctatacctggccttgtccatttcctatggccgactccagcccttgggttcayattaccctaggtgatggcagcaccttccagaccaaattgttgataggtgcagatggtcacaactccggagtacggcaggctgttggaatccagaatgtgagctggaactatgaccagtctgctgttgtggctactctgcatttatcagaggccacagaaaacaacgtagcctggcagagatttcttccctctgggcctattgctctgctcccgctctcagacaccttgagttccttggtttggtccacgtcmmatgaacatgcagcagagctagttagcatggatgaggaaaaatttgtggatgccgttaactctgccttttgragtkatgctgaccacacggacttcatcgacacagctggtgccatgctgcagtatsctgtcagccttctgaagcccactaaggtctcggctcgccagctgcccccaagcgtagccagggtggwtgccaaaagccgagttctgtttcctcttgggttgggacatgctgctgagtacgtcaggcctcgggtggcgctcattgggratgcagcccacagagtccatccgcttgcaggacagggtgtcaacatgggctttggggatatctccagcttggcccatcacctcagtayggcagccttcaatgggaaggacttaggttccrtgagccacctcacaggttatgaaacagaaagacagcgtcacaacactgctcttctggctgctacagacttactaaaaaggctctattctaccagtgcctccccgcttgtgttgctcaggacgtggggcttgcaggccacaaatgcagtgtctccactcaaagaacagattatggcctttgcaagcaaatgagtactcctctcctaaagaaagattacgytgatgaaaaagaacatcctgcccaggacccatcatacatattttcaagatcttatttaatttaataaacttactttacattaaaattctctttttcttctttgcttaatgggcctgtggcacccaaataatgaatgataatttgctgtgaggagcgtatattagccagaccaaaggaaaaaacttcgaaggaagacttacaatttggttgaaaagagctttttattactaaaaaacccacaaggtgctgtctcactcatttccagttaatcatttctaaagagaaaatttacattttgtttttgttttaatgttggtcataaatttatacagttgttttttgatagaggtaagaattagactcgatgcatttttgttagaattgctgtttaaatgttaacatcagaatgcaaattaaatataaattgctttaacctttgttacaggtatactggactttctgaaaggaaaaccaggtctcattaatgctagttattactttatcacagcaccagatttccattttatttatggttcctctctgggacaccactgtcggtttaataaaacaataaataattcattgcacagatccgaagacctcaggaaccrgatcacaagggaaaccgattagcagcagaatttgttcatgtttggtggcagactggtggvcaactggagggaggggagttttactgtgggtttttgaagaggtctygtcacaagaccagagatgcctcttgaagagatttttaggttgtaggtttgcttactctaaagaacatcttgcccagaagtctgatttgagatgaaatgaagagaaacagtctgcttttgaaccaagtaaggtattcttgggaataatttttagagccatgagaaatctattcttacaggggtgcttttcaggcaaatgcagaaaatttaaaagagtctagaacaaaaaagtgacaatgtcacaaccttgctggaatctcaggaaaaagaattaaagatggcagctgctgtgaaaagctgtgtgactcctggcggagactgcagggacaaggtcatctttcacaaaaaatggaaaggtggcctagatgaggaggac

SEQ ID NO: 4352 - DNA, 2580 bp, Homo sapiens
tgcggtcagagggccgaggcctgggggcgagctggggtcgtgcagtacagcctctttccggcaaatcacgcgagatttcgttcacccgggctccacasggagtattttatacagaaatcttgtgaaaccactgcccaaccagagcaatgattgttcaaagagtggtattgaattctcgacctggaaaaaatggtaatccagtggcagagaatttccgaatggaagaagtctatttaccagataatattaatgaaggacaagtacaagttagaactctttatctttctgtggatccttacatgcgttgtagaatgaatgaagacactggcactgattatataacaccttggcagctatctcaagtcgttgatggaggaggtattggaattatagaagaaagcaaacacacaaatttgactaaaggcgattttgtgacttctttctattggccctggcaaaccaaggttattctggatggaaatagccttgaaaaggtagacccacaacttgtggatggacacctttcatattttcttggagctataggtatgcctggtttgacttccttgattgggatacaggaaaaaggtcatataactgctggatctaataagacaatggttgtcagtggggccgcaggtgcctgtggatctgtggctgggcagattggccatttcttaggttgttccagagtggtgggaatttgtggaacacatgagaaatgcatcctcttgacctcagaactgggctttgatgctgcaattaattataaaaaagacaatgtggcagaacagctccgtgaatcatgcccagctggagtggatgtttattttgacaatgttggtggtaacatcagtgatacagtgataagtcagatgaatgagaacagccacatcatcctgtgtggtcaaatttctcagtacaacaaagatgtgccttatcctcccccgctatcccctgctatagaggcaatccagaaagaaagaaacatcacaagggaaagatttctggtattaaattataaagacaaatttgagcctggcattctacagctgagtcagtggtttaaagaaggaaagctaaagattaaagagacggtaataaatgggttggaaaacatgggagctgcattccagtccatgatgacaggaggtaacattggaaagcagatagtttgcatttcagaagaaatctctttgtaattgctgtaaatgtcatcaaggcaatcatagatttcttttccattttgcatattttcaaagatatgttaaaaaatccttagactatacatagctcttgatttaaatgtgatcataggtgttatttttagttgcatagggtatttgatacaatcattaatggatcatacacaataggtttttaaaaattaataacttttagtaattacttttattaatttaaaatagaacrcttgagaggcactttgtaaagatttgttaaactggaaacgttttacatgatctgatacaaccattaatgaatcatacacaataggttttttaaaattaatattaataacttttattaatttaaaatagaatgcttaaaataaaatagaatgcttgagaggcactgagtaaagatttgttgaactggaaatgttttacatgattyttaaactgaaacttggtgtaaaaatagaattgagatggcctttttttcacattgtagactgaaaagagacttaatggtatgatgtgtacatagggactgggggcaggattgggggtttcggagcttgtgtaacagtttttgggataggagaccagcggttttgggttgggattagtatgggaagataaataacttaggttggttaagttgacaagatttactccagaggatcatctctttgtatttgccaaataatttactgtatagcctaaaaactccatatatattgagaaaagcatatgtttattttaggttagcaggcacatactgtcaagttgtaaagattgagagggcaaacagatgtaaacatcacttgtaggtgattaaaaagattgacagccgggcctgatgtctcaagcctgtaatcctagcactttgggaggcagaggcgggcagatcacttgaggtcaggagttcaagaccagcctggccaacacggtgaaaccccatctctctaaaaatacaaaaattagctgggcgtggtggcacacgcctgtaatcccagctactcaggaggctgaggctggagaatcatttgaacctgggagggggaggttgccgtgagctgagcttgcaccattgcactccagcctgggcgacaagagtgaaattccatctcaaaaaacaaaaacagattgacaacaaagacagtttcagaaaatgacaggactgggcaaattaacaaatgtttgtaaacatgaatgttcaggaactactgatgtacctcaaaagtttgttttattaattgtactcaaccctcgcagaacagtaaaactgaagattattgtttctgaatgttttggcttatgattgtctacacactgccaatatacttttgtatgcaacatttgtaataagtagattcaaactgtgttggtaatcagc

SEQ ID NO: 4353 - DNA, 1153 bp, Homo sapiens
atggcagcgacgctgatcctggagcccgcgggccgctgctgctgggacgagccgctgcgcatcgcagtgcgcggcctggccccggagcagccagtcacgctgcgcacgtccctgcgcgacgaagagggcgcgctcttccgggcccacgcgcgctaccgtgccgacgcccgcgacgagctggacctggagcgcgcgcccgcgctgggaggcagcttcgcggggctccagcccatggggctgctgtgggcgttggagcccgagaaagccttggtgcggctggtgaagcgcgacgtgcggacgcccttcgccgtggagctggaagtgctggacggccacgacaccgagcccgggcggctgctggccagcctcctggccggacatggttttgctgtgcttgccctggcttatttcagatttgaagacctccycgaagatctgaatgatgtayatctggagtactttgaagaagycgtggactttatgctgcagcatccaaaggtgaaaggtcctagtattgcgcttcttggattttccaaaggaggtgacctgtgtctctcaatggcttctttcttgaagggcatcacagccactgtacttatcaatgcctgtgtagccaacacagtagctcctctacrttacaaggatatgattattcctaaacttgtcgatgatctaggaaaagtaaaaatcactaagtcaggatttctcacttttatggacacttggagcaatccactggaggaacacaatcaccaaagtcttgttccattggaaaaggcgcaggtgcccttcttgtttattgttggcatggatgatcaaagctggaagagtgaattctatgctcagatagcctctgaaaggctacaagctcatgggaaagaaagaccccagataatctgttacccagaaactggtcactgtattgacccaccttattttcctccttctagagcttctgtgcacgctgttttgggtraggcaatattctatggaggtgagccaaaggctcactcaaaggcacaggtagatgcctggcagcaaattcaaactttcttccataaacatctcaatggtaaaaaatctgtcaagcacagcaaaatataacattgtagccacagaccagataccattaataaaaatcctattcatacaa

SEQ ID NO: 4354 - DNA, 4778 bp, Homo sapiens
agtgcttctgggcagtagaggcgcggggtgcggagctagggcggccgagagccatggcggcgctattggcggcggcggcagtgcgagcccggatcctgcaggtttcttccaaggtgaaatccagtcccacctggtattcagcatcttccttctcttcttcagtgccaactgtaaagctcttcattggtgggaaattcgttgaayccaaaagtgacaaatggatcgatatccacaacccagccaccaatgaggtcattggtcgggtccctcaggccaccaaggcagaaatggatgcagccattgcttcctgcaaacgtgcttttcctgcatgggcagacacttcagtattaagccgccagcaggtcttgctccgctatcaacaacttattaaagaaaacttgaaagaaattgccaagttaatcacattggaacaagggaagaccctagctgatgctgaaggagatgtrtttcgaggccttcaggtggttgagcatgcctgtagtgtgacatccctcatgatgggagagaccatgccatccatcaccaaagacatggacctttattcctaccgtctgcctctgggagtgtgtgcaggcattgctccattcaattttcctgccatgatccccctttggatgtttcccatggccatggtgtgtggaaataccttcctaatgaaaccatctgarcgagtccctggagcaactatgcttcttgctaagttgctccaggattctggtgcccctgatggaacattaaacatcatccatggacagcatgaagctgtaaattttatttgcgatcatccggacatcaaagcaatcagctttgtgggatccaacaaggcaggagagtatatcttcgagagaggatcaagacatggcaagagggttcaagccaatatgggagccaagaaccatggggtagtcatgccagatgccaataaggaaaataccctgaaccagctggttggggcagcatttggagctgctggtcagcgctgcatggctctttcaacagcagtccttgtgggagaagccaagaagtggctgccagagctggtggagcatgccaaaaacctgagagtcaatgcaggagatcagcctggagctgatcttggccctctgatcactccccaggccaaagagcgagtctgtaatctgattgatagtggaacaaaggagggagcttccatccttcttgatggacgaaaaattaaagtgaaaggctatgaaaatggcaactttgttggaccaaccatcatctcgaatgtcaagccaaatatgacctgttacaaagaggagatttttggtccagttcttgtggttctggagacagaaacattggatgaagccatccagattgtaaataacaacccatatggaaatrgaactgccatcttcaccaccaatggagccactgctcggaaatatgcccacttggtggatgttggacaggtgggagtgaatgtccccattccagtgcctttgccaatgttctcattcaccggctctcgatcctccttcaggggagacaccaatttctatggcaaacagggcatccaattctacactcagttaaagaccattacttctcagtggaaagragaagatgctactctttcctcacctgctgttgtcatgcctaccatgggccgttagaaacaagtttgtttaagactgactccatcctgagtaatctccctttatttttgaccagcttcatttgtcagctttgctcagatcagatcgatgggattggaatacattgtaactaaaatcttcctcaggactattaacccctgcaaagtttctayagggaactgcctagtgtaacaatgaaaccagatttctcacttgctcttcatacttctattttgaggtaactgttgtaactatgaaatgcttatctgaaagtagtgcttaaacctgatttctaaaaattatcccattttctgatgatttgaaggggagaaaagccagtgtatgtaaagaaaatgttccagccaggcgcggtggctcacgcctgtrrttccatcattttgggaggccacagtgggcrgaytgcttgagcccaggagttgaagaacgtggygaaaccccgtatctattatttaaaaaaattgaaaaagtaaaaaaagaaaagggaaaaaaaattttttaaagaagatgttccaataattgcaagaagaactcttagatggggaaacaggacagaaataactcaccgcttttggttgatcctcaaacatagcgctacctaaatgccactgggagagacctcctgcaaagttttctttagcccctcttttatcccacaatacacaagatataatccatttttatatatcccaaagttgtggcaacagcttctttcttttctgctcaatgccactttgtttcctagtaattcatgaccactattaattctatcattgtcactgctcctgcttaagatcacttctcaaggatacctcagtaagcaatggataaatcaactttttgttatatgtgccaagtactaagtttcagggttctcttcagcaatcattaattaatacttcagccattaattcagatgcaaataattttcttttttcttttttttgagatggagtttcactcttgttgcccaggctggagtgcaatggcgtgatctcagctcaccgcaacctccgcctcccaggttcaagcgattctcctgcctcagcccccctagtagctgggattacaggcatgcgccaccacacccagctaattttgtatttttagtagagacggggtttctccgtgttggtcaggctggtctcgaactcctgacctcaggtgatccgcctgcctcggcctcccaaagtgctgggattacaggcatgagccaccacacccagccagatgcaaataattttcttagaaaattatttcaaaagttattttaggcccagaaatcaaggattgttccaaccatgaaaatgggtaagacacctgccttaagcaaatctaacctgctattacttgccaaattttatatattcttttctcttgcctgtatttctaattagtgatttgtttaatgaagaactcttcatgtagagcaattaactgggcctaagaaatttcgaagctttccatgacataaagtggttaaaaaaaaatgctttgacagtcttcttctgccattagttcaactgcctttacgctttttttttttttttttttttgagatggagtttcactcttgttgcccaggctagagtgcaatggcgtgatcttggctcactgcaacctctgcctcccgggttcaagcaattctcctgcctcagcctcctgagtagctgggatttcaggcatacgccaccatgcctggctaattttgtatttttagtagagacagggtttctccatgttggtcaggctggtctcgaactcccgacctcaggtgatctgcctgccttggcctcccaaagtgctgggattacaggtgtgagccaccacccccagccgcctctatgctttttgtttctttgatatatctaaacttaaggtcagaacagaaattcatgtgctgaacagaatggattctttttgcagtaccaayccaattgaatcctctttttattttcctgcgtccttaccagtcactttgatagtgctaactaacctacactatgggggttattcatgaattaagtatgataaaaaaaaaaaagaccttgaaaatgttgtgtaccctgtggatttgaggcttattactaccacctggctggataaaatgtcaaaaccttcaatcacttaaggtgactggaacttttgtaaatatgaggcaatagaaatttataatttgagactacagtaccccttgttttagctcttatcacagctggcaactggtagtgattttttttgttgttgttttgttttgttttgagatggagtctcgctctgttgcccagggtggagtgcagtggcacgatctcggctcactgcaacctccacctcctgggttcaagtaattctcctgcctcagtctcccgagtagctgggattacaggtgcatgcccccacacccggataattttttgtacttttagtagagacagggtttcaccatgttagccaggatggtctcaatctcctgacctaatgatccgcccacctcggcctcccaaagtgctgggattacaggcgtgaaccaccgcacctggccctggtagtgatatttaatccaatccaacaactataggctgggttaaataaaaggtcattattgtctatattccaagtggaattaaatgtagtcacagagattcctaacattttccttatatttaagggaaatcacttctaaaaaaacacactaatcagaactgtgatgctctaattagaaacaactcatctggccaactatttgctgctcagagtttctyatttcttagatgaaaaaaactcatcagttatattcatgtgatcgcggctaaaaagtcagtattttctttttgttctaatgtggcttcatttgaaatttctcagattctacattgtactaattatgaataacaaattataaattaaaaactcttaaagagaaaaacttggcttaaaaaaatcatttcatatctccttataagcctttgtcctctaggttgtaatgactctgacttcccacctgtgatggaaagctaagagtcacaaggtcactatgtttactcttacgtaaaagatagtacacattttggctaggctgtttacttcaaaaggcaacstataggtttctacacaaaa

SEQ ID NO: 4355 - DNA, 4372 bp, Homo sapiens
caatgaggaagcctggcaggatggagggcgaggcctggcagctgtagtgcttctgggcagtagaggcgcggggtgcggagctagggcggccgagagccatggcggcgctattggcggcggcggcagtgcgagcccggatcctgcaggcgagtttcttccaaggtgaaatccagtcccacctggtattcagcatcttccttctcttcttcagtgccaactgtaaagctcttcattggtgggaaattcgttgaayccaaaagtgacaaatggatcgatatccacaacccagccaccaatgaggtcattggtcgggtccctcaggccaccaaggcagaaatggatgcagccattgcttcctgcaaacgtgcttttcctgcatgggcagacacttcagtattaagccgccagcaggtcttgctccgctatcaacaacttattaaagaaaacttgaaagaaattgccaagttaatcacattggaacaagggaagaccctagctgatgctgaaggagatgtrtttcgaggccttcaggtggttgagcatgcctgtagtgtgacatccctcatgatgggagagaccatgccatccatcaccaaagacatggacctttattcctaccgtctgcctctgggagtgtgtgcaggcattgctccattcaattttcctgccatgatccccctttggatgtttcccatggccatggtgtgtggaaataccttcctaatgaaaccatctgarcgagtccctggagcaactatgcttcttgctaagttgctccaggattctggtgcccctgatggaacattaaacatcatccatggacagcatgaagctgtaaattttatttgcgatcatccggacatcaaagcaatcagctttgtgggatccaacaaggcaggagagtatatcttcgagagaggatcaagacatggcaagagggttcaagccaatatgggagccaagaaccatggggtagtcatgccagatgccaataaggaaaataccctgaaccagctggttggggcagcatttggagctgctggtcagcgctgcatggctctttcaacagcagtccttgtgggagaagccaagaagtggctgccagagctggtggagcatgccaaaaacctgagagtcaatgcaggagatcagcctggagctgatcttggccctctgatcactccccaggccaaagagcgagtctgtaatctgattgatagtggaacaaaggagggagcttccatccttcttgatggacgaaaaattaaagtgaaaggctatgaaaatggcaactttgttggaccaaccatcatctcgaatgtcaagccaaatatgacctgttacaaagaggagatttttggtccagttcttgtggttctggagacagaaacattggatgaagccatccagattgtaaataacaacccatatggaaatrgaactgccatcttcaccaccaatggagccactgctcggaaatatgcccacttggtggatgttggacaggtgggagtgaatgtccccattccagtgcctttgccaatgttctcattcaccggctctcgatcctccttcaggggagacaccaatttctatggcaaacagggcatccaattctacactcagttaaagaccattacttctcagtggaaagragaagatgctactctttcctcacctgctgttgtcatgcctaccatgggccgttagaaacaagtttgtttaagactgactccatcctgagtaatctccctttatttttgaccagcttcatttgtcagctttgctcagatcagatcgatgggattggaatacattgtaactaaaatcttcctcaggactattaacccctgcaaagtttctayagggaactgcctagtgtaacaatgaaaccagatttctcacttgctcttcatacttctattttgaggtaactgttgtaactatgaaatgcttatctgaaagtagtgcttaaacctgatttctaaaaattatcccattttctgatgatttgaaggggagaaaagccagtgtatgtaaagaaaatgttccagccaggcgcggtggctcacgcctgtrrttccatcattttgggaggccacagtgggcrgaytgcttgagcccaggagttgaagaacgtggygaaaccccgtatctattatttaaaaaaattgaaaaagtaaaaaaagaaaagggaaaaaaaattttttaaagaagatgttccaataattgcaagaagaactcttagatggggaaacaggacagaaataactcaccgcttttggttgatcctcaaacatagcgctacctaaatgccactgggagagacctcctgcaaagttttctttagcccctcttttatcccacaatacacaagatataatccatttttatatatcccaaagttgtggcaacagcttctttcttttctgctcaatgccactttgtttcctagtaattcgcatgagccaccacacccagccagatgcaaataattttcttagaaaattatttcaaaagttattttaggcccagaaatcaaggattgttccaaccatgaaaatgggtaagacacctgccttaagcaaatctaacctgctattacttgccaaattttatatattcttttctcttgcctgtatttctaattagtgatttgtttaatgaagaactcttcatgtagagcaattaactgggcctaagaaatttcgaagctttccatgacataaagtggttaaaaaaaaatgctttgacagtcttcttctgccattagttcaactgcctttacgctttttttttttttttttttttgagatggagtttcactcttgttgcccaggctagagtgcaatggcgtgatcttggctcactgcaacctctgcctcccgggttcaagcaattctcctgcctcagcctcctgagtagctgggatttcaggcatacgccaccatgcctggctaattttgtatttttagtagagacagggtttctccatgttggtcaggctggtctcgaactcccgacctcaggtgatctgcctgccttggcctcccaaagtgctgggattacaggtgtgagccaccacccccagccgcctctatgctttttgtttctttgatatatctaaacttaaggtcagaacagaaattcatgtgctgaacagaatggattctttttgcagtaccaayccaattgaatcctctttttattttcctgcgtccttaccagtcactttgatagtgctaactaacctacactatgggggttattcatgaattaagtatgataaaaaaaaaaaagaccttgaaaatgttgtgtaccctgtggatttgaggcttattactaccacctggctggataaaatgtcaaaaccttcaatcacttaaggtgactggaacttttgtaaatatgaggcaatagaaatttataatttgagactacagtaccccttgttttagctcttatcacagctggcaactggtagtgattttttttgttgttgttttgttttgttttgagatggagtctcgctctgttgcccagggtggagtgcagtggcacgatctcggctcactgcaacctccacctcctgggttcaagtaattctcctgcctcagtctcccgagtagctgggattacaggtgcatgcccccacacccggataattttttgtacttttagtagagacagggtttcaccatgttagccaggatggtctcaatctcctgacctaatgatccgcccacctcggcctcccaaagtgctgggattacaggcgtgaaccaccgcacctggccctggtagtgatatttaatccaatccaacaactataggctgggttaaataaaaggtcattattgtctatattccaagtggaattaaatgtagtcacagagattcctaacattttccttatatttaagggaaatcacttctaaaaaaacacactaatcagaactgtgatgctctaattagaaacaactcatctggccaactatttgctgctcagagtttctyatttcttagatgaaaaaaactcatcagttatattcatgtgatcgcggctaaaaagtcagtattttctttttgttctaatgtggcttcatttgaaatttctcagattctacattgtactaattatgaataacaaattataaattaaaaactcttaaagagaaaaacttggcttaaaaaaatcatttcatatctccttataagcctttgtcctctaggttgtaatgactctgacttcccacctgtgatggaaagctaagagtcacaaggtcactatgtttactcttacgtaaaagatagtacacattttggctaggctgtttacttcaaaaggcaacstataggtttctacacaaaa

SEQ ID NO: 4356 - DNA, 3856 bp, Homo sapiens
agtgcttctgggcagtagaggcgcggggtgcggagctagggcggccgagagccatggcggcgctattggcggcggcggcagtgcgagcccggatcctgcaggtttcttccaaggtgaaatccagtcccacctggtattcagcatcttccttctcttcttcagtgccaactgtaaagctcttcattggtgggaaattcgttgaayccaaaagtgacaaatggatcgatatccacaacccagccaccaatgaggtcattggtcgggtccctcaggccaccaaggcagaaatggatgcagccattgcttcctgcaaacgtgcttttcctgcatgggcagacacttcagtattaagccgccagcaggtcttgctccgctatcaacaacttattaaagaaaacttgaaagaaattgccaagttaatcacattggaacaagggaagaccctagctgatgctgaaggagatgtrtttcgaggccttcaggtggttgagcatgcctgtagtgtgacatccctcatgatgggagagaccatgccatccatcaccaaagacatggacctttattcctaccgtctgcctctgggagtgtgtgcaggcattgctccattcaattttcctgccatgatccccctttggatgtttcccatggccatggtgtgtggaaataccttcctaatgaaaccatctgarcgagtccctggagcaactatgcttcttgctaagttgctccaggattctggtgcccctgatggaacattaaacatcatccatggacagcatgaagctgtaaattttatttgcgatcatccggacatcaaagcaatcagctttgtgggatccaacaaggcaggagagtatatcttcgagagaggatcaagacatggcaagagggttcaagccaatatgggagccaagaaccatggggtagtcatgccagatgccaataaggaaaataccctgaaccagctggttggggcagcatttggagctgctggtcagcgctgcatggctctttcaacagcagtccttgtgggagaagccaagaagtggctgccagagctggtggagcatgccaaaaacctgagagtcaatgcaggagatcagcctggagctgatcttggccctctgatcactccccaggccaaagagcgagtctgtaatctgattgatagtggaacaaaggagggagcttccatccttcttgatggacgaaaaattaaagtgaaaggctatgaaaatggcaactttgttggaccaaccatcatctcgaatgtcaagccaaatatgacctgttacaaagaggagatttttggtccagttcttgtggttctggagacagaaacattggatgaagccatccagattgtaaataacaacccatatggaaatrgaactgccatcttcaccaccaatggagccactgctcggaaatatgcccacttggtggatgttggacaggtgggagtgaatgtccccattccagtgcctttgccaatgttctcattcaccggctctcgatcctccttcaggggagacaccaatttctatggcaaacagggcatccaattctacactcagttaaagaccattacttctcagtggaaagragaagatgctactctttcctcacctgctgttgtcatgcctaccatgggccgttagaaacaagtttgtttaagactgactccatcctgagtaatctccctttatttttgaccagcttcatttgtcagctttgctcagatcagatcgatgggattggaatacattgtaactaaaatcttcctcaggactattaacccctgcaaagtttctayagggaactgcctagtgtaacaatgaaaccagatttctcacttgctcttcatacttctattttgaggtaactgttgtaactatgaaatgcttatctgaaagtagtgcttaaacctgatttctaaaaattatcccattttctgatgatttgaaggggagaaaagccagtgtatgtaaagaaaatgttccagccaggcgcggtggctcacgcctgtrrttccatcattttgggaggccacagtgggcrgaytgcttgagcccaggagttgaagaacgtggygaaaccccgtatctattatttaaaaaaattgaaaaagtaaaaaaagaaaagggaaaaaaaattttttaaagaagatgttccaataattgcaagaagaactcttagatggggaaacaggacagaaataactcaccgcttttggttgatcctcaaacatagcgctacctaaatgccactgggagagacctcctgcaaagttttctttagcccctcttttatcccacaatacacaagatataatccatttttatatatcccaaagttgtggcaacagcttctttcttttctgctcaatgccactttgtttcctagtaattcatgaccactattaattctatcattgtcactgctcctgcttaagatcacttctcaaggatacctcagtaagcaatggataaatcaactttttgttatatgtgccaagtactaagtttcagggttctcttcagcaatcattaattaatacttcagccattaattcagatgcaaataattttcttttttcttttttttgagatggagtttcactcttgttgcccaggctggagtgcaatggcgtgatctcagctcaccgcaacctccgcctcccaggttcaagcgattctcctgcctcagcccccctagtagctgggattacaggcatgcgccaccacacccagctaattttgtatttttagtagagacggggtttctccgtgttggtcaggctggtctcgaactcctgacctcaggtgatccgcctgcctcggcctcccaaagtgctgggattacaggcatgagccaccacacccagccagatgcaaataattttcttagaaaattatttcaaaagttattttaggcccagaaatcaaggattgttccaaccatgaaaatgggtaagacacctgccttaagcaaatctaacctgctattacttgccaaattttatatattcttttctcttgcctgtatttctaattagtgatttgtttaatgaagaactcttcatgtagagcaattaactgggcctaagaaatttcgaagctttccatgacataaagtggttaaaaaaaaatgctttgacagtcttcttctgccattagttcaactgcctttacgctttttttttttttttttttttgagatggagtttcactcttgttgcccaggctagagtgcaatggcgtgatcttggctcactgcaacctctgcctcccgggttcaagcaattctcctgcctcagcctcctgagtagctgggatttcaggcatacgccaccatgcctggctaattttgtatttttagtagagacagggtttctccatgttggtcaggctggtctcgaactcccgacctcaggtgatctgcctgccttggcctcccaaagtgctgggattacaggtgtgagccaccacccccagccgcctctatgctttttgtttctttgatatatctaaacttaaggtcagaacagaaattcatgtgctgaacagaatggattctttttgcagtaccaayccaattgaatcctctttttattttcctgcgtccttaccagtcactttgatagtgctaactaacctacactatgggggttattcatgaattaagtatgataaaaaaaaaaaagaccttgaaaatgttgtgtaccctgtggatttgaggcttattactaccacctggctggataaaatgtcaaaaccttcaatcacttaaggtgactggaacttttgtaaaatacacttatgatcctactgggccttttttttttttttttctg

SEQ ID NO: 4357 - DNA, 2697 bp, Homo sapiens
ggatcctaggatgcttacatgcaatgatgaacccgaaaacacttgcaaagtgctacgcaaatattgatcacgaagaaggaagtcctcttcccgcctggagactgtgtggggtatggcgsgrtggtggggagaatgtggtgtcttgctccaccctcctggcgaggggagggcctggcctggaccgcagaggaatcgagtgactgcccctaaaatctcctagaaccgatcccgcggccccgcccctcccgcggccccgcccctcccgcggcccgtcagcctctgccgcggagctgcgtccgccactcatgtttctccgagcmggcctggccgcgctctccccgcttcttcgcagtcttcggccctctcctgtcgccgccatgagcactggcaccttcgtcgtgtcgcagccgctcaattaccgcggcggggcccgcgtggagccggcggacgcctccggtaccgagaaagctttcgagccagcaaccggccgagtgatagctactttcacatgttcaggagaaaaggaagtaaatttggctgttcaaaatgcaaaggctgcttttaaaatatggagtcaaaaatctggcatggagcgttgccgaatccttttggaggctgccaggataataagggaacgggaggatgaaattgctactatggagtgcatcaacaatggcaagtccatctttgaggcccgcttggacatygacatttcctggcagtgcctggagtattatgcgggcttggctgcatccatggctggtgaacacatccagctcccaggtggatcgtttggttataccagaagagaaccacttggggtatgtgtgggaataggagcatggaactacccctttcagattgcctcttggaagtcggctccagcattagcctgtggtaatgccatggtctttaaaccttctccctttacacctgtttctgcattgctactggctgaaatctacastgaggctggkgtacctcctgggctcttcaatgtggtgcagggaggggctgccacaggccagtttctgtgtcagcatcccgatgtggccaaagtctccttcactggaagtgtgcccactggcatgaagatcatggagatgtcagctaaaggaatcaaacctgttaccttggaacttggaggcaaatctccactcatcatcttctcagactgtgatatgaacaatgctgtaaagggggcrctgatggccaacttcctcacacaaggccaggtttgctgtaatggcacaagagtatttgtgcagaaagaaattcttgataaatttacagaggaagtggtgaaacagacccaaaggattaaaattggagatccccttctggaagatacaaggatgggtccactcatcaaccgaccacacctggagcgagtccttgggtttgtcaaagtggcaaaggagcagggtgctaaagtgttatgtggtggagatatatatgtacctgaagatcccaaattaaaggatggatattacatgagaccttgtgtattaactaattgcagagacgacatgacctgtgtgaaggaagagatctttgggcctgttatgtccattttatcatttgacactgaagctgaggttctagaaagagccaatgataccacttttggactagcagctggcgtctttaccagggacatccaacgggctcatagagtggtagctgagcttcaggctgggacgtgcttcattaacaactataacgtcagcccagtggagttgccctttggtggatataagaagtcaggatttggcagagagaacggccgtgtgacaatcgaatattattcacagctgaagactgtgtgtgtggagatgggtgatgtggaatctgctttttgaaaacctgcagtgaaacctattgacatggccacgctgtggaatgatgtgaattggccctgtttacagaggcagtacaactgaatgttattttacatccagaattttggcgttcagtataagagaatggttcatgttactctttctctctccatcagcttcctcactgaaaatgtgcattaagtgccttgtagatactaatcaagaaagctgtgattctcctcaaagcgtatttttgtgaaatcttttaagagccagtaacatacttctagagaacaggaaaagagactaggataatacatcttccacacatttggcccactgataatgttaattctctggcgtatttcaaagaacttgttcctggctgatccaagtgcagtggtatttacaactaattgatcacaaccagtttgtagatttctttgttccttctccattcccactgcttcacttgcctagtcttgaagaaaaaaaacaaaaaacaaaaaaaaaccttgttcctttataggttcctggtagaatcagtagagatgatttcagctcattgacatttttttaagctrtatccccttgtcattccattgagaaagctgacaactgggatagggaggggattmgataatagatggggtcaaattctgtgtgaatgtgaacttgcctagtaagcactttgtctctgttcactactgcgatagaggaaatctatctccctatcttgggtccttgaactacagcctgctgtcttacaccagtggagctaccctttaaatgtacaaattayttgtatgctaatgtaatatggtgaaattaaaataaatcacactgttaattgttt

SEQ ID NO: 4358 - DNA, 702 bp, Homo sapiens
tcccgacttctgcttccgggtcggagccatggcggtggcaaattcaagtcctgttaaccccgtggtgttctttgatgtcagtattggcggtcaggaagttggccgcatgaagatcgagctctttgcagacgttgtgcctaagacggccgagaactttagtctctttcttttyggttataggaaagatggggttccaataggatacaaaggaagcaccttccacagggtcataaaggatttcatgattcagggtggagattttgttaatggagatggtactggagtcgccagtatttaccgggggccatttgcagatgaaaattttaaacttagacactcagctccaggcctgctttccatggcraacagtggtccaagtacaaatggctgtcagttctttatcacctgctctaagtgcgattggctggatgggaagcatgtggtgtttggccccaacaataagcccaagctacctgtggtgatctcgcagtgtggggagatgtagtccagacaaagactgaatcaggccttcccttcttcttggtggtgttmttgagtaagataatctggactggcccccgtctttgcttccctgcctgctgctgccccatttgatcaagagaccatggaagtgtcagagattcagaatccaagattgtctttaagttttcaactgtaaataaagtttttttgtatgcgtat

SEQ ID NO: 4359 - DNA, 921 bp, Homo sapiens
tcccgacttctgcttccgggtcggagccatggcggtggcaaattcaagtcctgttaaccccgtggtgttctttgatgtcagtattggcggtcaggaagttggccgcatgaagatcgagctctttgcagacgttgtgcctaagacggccgagaactttaggcagttctgcaccggagaattcaggtcagtttcagatgtgtttgacttctttgcctgctccagaggggtgttctggggctgcagtgagggtatcggtgaaccacctgctggccttgaatgattgctggygacagtgatagaaggaaagatggggttccaataggatacaaaggaagcaccttccacagggtcataaaggatttcatgattcagggtggagattttgttaatggagatggtactggagtcgccagtatttaccgggggccatttgcagatgaaaattttaaacttagacactcagctccaggcctgctttccatggcraacagtggtccaagtacaaatggctgtcagttctttatcacctgctctaagtgcgattggctggatgggaagcatgtggtgtttggaaaaatcatcgatggacttctagtgatgagaaagattgagaatgttcccacaggccccaacaataagcccaagctacctgtggtgatctcgcagtgtggggagatgtagtccagacaaagactgaatcagcacttcccaggagcctgcccacagctgtggctaacatcaggccttcccttcttcttggtggtgttmttgagtaagataatctggactggcccccgtctttgcttccctgcctgctgctgccccatttgatcaagagaccatggaagtgtcagagattcagaatccaagattgtctttaagttttcaactgtaaataaagtttttttgtatgcgtatgtt

SEQ ID NO: 4360 - DNA, 1294 bp, Homo sapiens
actagggaggcggaggtgggagataccgagcggcagggtggtgggtcagcccatcatgccccctgctccgtgaagccctcatgrtcttggactgggccttctgacactctcccgctgattgcaggaagttggccgcatgaagatcgagctctttgcagacgttgtgcctaagacggccgagaactttaggcagttctgcaccggagaattcaggaaagatggggttccaataggatacaaaggaagcaccttccacagggtcataaaggatttcatgattcagggtggagattttgttaatggagatggtactggagtcgccagtatttaccgggggccatttgcagatgaaaattttaaacttagacactcagctccaggcctgctttccatggcraacagtggtccaagtacaaatggctgtcagttctttatcacctgctctaagtgcgattggctggatgggaagcatgtggtgtttggaaaaatcatcgatggacttctagtgatgagaaagattgagaatgttcccacaggccccaacaataagcccaagctacctgtggtgatctcgcagtgtggggagatgtagtccagacaaagactgaatcagtatagcttgctcgacttcaaggccataaacccagagtgtggacttccctttctctttacctctgggaccgaaacctgcaaggaagaaggattgctttttgttctggacctccacagagagccatcagagtctgacaaaaaggacaaaggctttggagccaagtagaccaggaagtctcatcactgtctaattctgtgacttcagtcaagccatgaaaccccttgggaccctactcctttgcataattagataatatataatgcatggagttgtgaagggcaaataaatgagatagtatgcttgaccataaatgttagttgctttcttcctggttcttttgtaatttactgcccaactttgctctggggacctaaaggtctgacctatggtgagaatctgacctgttctacccttttgggaaaagaggattaggagtgtagagaatagctgggagtggccgggcacggtggctcatccctgtaatcccagcactttgggaggctgaggcagggagatcacaaggtcgggagttcaagaccagcctggtcaatatggtgagaccccatctctactaaaaatacaaaaattggctgggtgtggtggcaggcgcctgtattcccagctactcaggaggttgaagcaggagaattgcttgaacccgggaggcggaggtggcagtga

SEQ ID NO: 4361 - DNA, 918 bp, Homo sapiens
tcccgacttctgcttccgggtcggagccatggcggtggcaaattcaagtcctgttaaccccgtggtgttctttgatgtcagtattggcggtcaggaagttggccgcatgaagatcgagctctttgcagacgttgtgcctaagacggccgagaactttaggcagttctgcaccggagaattcaggaaagatggggttccaataggatacaaaggaagcaccttccacagggtcataaaggatttcatgattcagggtggagattttgttaatggagatggtactggagtcgccagtatttaccgggggccatttgcagatgaaaattttaaacttagacactcagctccaggcctgctttccatggcraacagtggtccaagtacaaatggctgtcagttctttatcacctgctctaagtgcgattggctggatgggaagcatgtggtgtttggaaaaatcatcgatggacttctagtgatgagaaagattgagaatgttcccacaggccccaacaataagcccaagctacctgtggtgatctcgcagtgtggggagatgtagtccagacaaagactgaatcagcacttcccaggagcctgcccacagctgtggctaacatcaggtgtgaatccattgctgatccctccacctcctcttccaggtctaagcccagacagtgggtgctcccmcagcacttggttcatctctccactgtggcatttaatatactgtatcacaaatatgccttcccttcttcttggtggtgttmttgagtaagataatctggactggcccccgtctttgcttccctgcctgctgctgccccatttgatcaagagaccatggaagtgtcagagattcagaatccaagattgtctttaagttttcaactgtaaataaagtttttttgtatgcgt

SEQ ID NO: 4362 - DNA, 759 bp, Homo sapiens
tcccgacttctgcttccgggtcggagccatggcggtggcaaattcaagtcctgttaaccccgtggtgttctttgatgtcagtattggcggtcaggaagttggccgcatgaagatcgagctctttgcagacgttgtgcctaagacggccgagaactttaggcagttctgcaccggagaattcaggaaagatggggttccaataggatacaaaggaagcaccttccacagggtcataaaggatttcatgattcagggtggagattttgttaatggagatggtactggagtcgccagtatttaccgggggccatttgcagatgaaaattttaaacttagacactcagctccaggcctgctttccatggcraacagtggtccaagtacaaatggctgtcagttctttatcacctgctctaagtgcgattggctggatgggaagcatgtggtgtttggaaaaatcatcgatggacttctagtgatgagaaagattgagaatgttcccacaggccccaacaataagcccaagctacctgtggtgatctcgcagtgtggggagatgtagtccagacaaagactgaatcaggccttcccttcttcttggtggtgttmttgagtaagataatctggactggcccccgtctttgcttccctgcctgctgctgccccatttgatcaagagaccatggaagtgtcagagattcagaatccaagattgtctttaagttttcaactgtaaataaagtttttttgtatgcgtat

SEQ ID NO: 4363 - DNA, 744 bp, Homo sapiens
tcccgacttctgcttccgggtcggagccatggcggtggcaaattcaagtcctgttaaccccgtggtgttctttgatgtcagtattggcggtcaggaagttggccgcatgaagatcgagctctttgcagacgttgtgcctaagacggccgagaactttaggcagttctgcaccggagaattcaggaaagatggggttccaataggatacaaaggaagcaccttccacagggtcataaaggatttcatgattcagggtggagattttgttaatggagatggtactggagtcgccagtatttaccgggggccatttgcagatgaaaattttaaacttagacactcagctccaggcctgctttccatggcraacagtggtccaagtacaaatggctgtcagttctttatcacctgctctaagtgcgattggctggatgggaagcatgtggtgtttggaaaaatcatcgatggacttctagtgatgagaaagattgagaatgttcccacaggccccaacaataagcccaagctacctgtggtgatctcgcagtgtggggagatgtagtccagacaaagactgaatcagcacttcccaggagcctgcccacagctgtggctaacatcaggtgtgaatccattgctgatccctccacctcctcttccaggtctaagcccagacagtgggtgctcccmcagcacttggttcatctctccactgtggcatttaatatactgtatcacaaatat

SEQ ID NO: 4364 - DNA, 705 bp, Homo sapiens
tcccgacttctgcttccgggtcggagccatggcggtggcaaattcaagtcctgttaaccccgtggtgttctttgatgtcagtattggcggtcaggaagttggccgcatgaagatcgagctctttgcagacgttgtgcctaagacggccgagaactttaggcagttctgcaccggagaattcaggaaagatggggttccaataggatacaaaggaagcaccttccacagggtcataaaggatttcatgattcagggtggagattttgttaatggagatggtactggagtcgccagtatttaccgggggccatttgcagatgaaaattttaaacttagacactcagctccaggcctgctttccatggcraacagtggtccaagtacaaatggctgtcagttctttatcacctgctctaagtgcgattggctggatgggaagcatgtggtgtttggccccaacaataagcccaagctacctgtggtgatctcgcagtgtggggagatgtagtccagacaaagactgaatcaggccttcccttcttcttggtggtgttmttgagtaagataatctggactggcccccgtctttgcttccctgcctgctgctgccccatttgatcaagagaccatggaagtgtcagagattcagaatccaagattgtctttaagttttcaactgtaaataaagtttttttgtatgcgtat

SEQ ID NO: 4365 - DNA, 2179 bp, Homo sapiens
agcgctgctaccgaagatgccaagatggacgccaggcagccaggagaaagatcccaaccccacccgcgcagatatccgcgaggccccgcgctcagcctcctcacccccgctatccgcggcctccgggtcctcctccgccttccgcttgagcttctgggaggaggggctcaccggcgcgtcccccagcagtgagctgaagagrcgcctgaaagctgagaagaaagtagcagagaaggaggccaaacagaaagagctcagtgagaaacagctaagccaagccactgctgctgccaccaaccacaccactgataatggtgtgggtcctgaggaagagagcgtggacccaaatcaatactacaaaatccgcagtcaagcaattcatcagctgaaggtcaatggggaagacccatacccacacaagttccatgtagacatctcactcactgacttcatccaaaaatatagtcacctgcagcctggggatcacctgactgacatcaccttaaaggtggcaggtaggatccatgccaaaagagcttctgggggaaagctcatcttctatgatcttcgaggagagggggtgaagttgcaagtcatggccaattccagaaattataaatcagaagaagaatttattcatattaataacaaactgcgtcggggagacataattggagttcaggggaatcctggtaaaaccaagaagggtgagctgagcatcattccgtatgagatcacactgctgtctccctgtttgcatatgttacctcatcttcactttggcctcaaagacaaggaaacaaggtatcgccagagatacttggacttgatcctgaatgactttgtgaggcagaaatttatcatccgctctaagatcatcacatatataagaagtttcttagatgagctgggattcctagagattgaaactcccatgatgaacatcatcccagggggagccgtggccaagcctttcatcacttatcacaacgagctggacatgaacttatatatgagaattgctccagaactctatcataagatgcttgtggttggtggcatcgaccgggtttatgaaattggacgccagttccggaatgaggggattgatttgacgcacaatcctgagttcaccacctgtgagttctacatggcctatgcagactatcacgatctcatggaaatcacggagaagatggtttcagggatggtgaagcatattacaggcagttacaaggtcacctaccacccagatggcccagagggccargcctacgatgttgacttcaccccacccttccggcgaatcaacatggtagaagagcttgagaaagccctggggatgaagctgccagaaacgaacctctttgaaactgaagaaactcgcaaaattcttgatgatatctgtgtggcaaaagctgttgaatgccctccacctcggaccacagccaggctccttgacaagcttgttggggagttcctggaagtgacttgcatcaatcctacattcatctgtgatcacccacagataatgagccctttggctaaatggcaccgctctaaagagggtctgactgagcgctttgagctgtttgtcatgaagaaagagatatgcaatgcgtatactgagctgaatgatcccatgcggcagcggcagctttttgaagaacaggccaaggccaaggctgcaggtgatgatgaggccatgttcatagatgaaaacttctgtactgccctggaatatgggctgccccccacagctggctggggcatgggcattgatcgagtcgccatgtttctcacggactccaacaacatcaaggaagtacttctgtttcctgccatgaaacccgaagacaagaaggagaatgtagcaaccactgatacactggaaagcacaacagttggcasttctgtctagaaaataataattgcaagttgtataastcaggcrtcttygcatttctgcgaaagatcaargtctgcaagggaattcttgtgtgctgctttccatttgacaccgcagttctgttcagccatcagaagagagacaaggaattaaaaatttctttttaatcctgttaccaaataagccatttgtctcttctctttacttttagaatatcaacttttttccccagacttctggcctaatgaatgtttaggattttaccatctt

SEQ ID NO: 4366 - DNA, 2116 bp, Homo sapiens
tcgcaccttgacctggaaattaacgtactatcctccttacttttgggycgggccctccgggaagatggcggccgtgcaggcggccgaggtgaaagtggatggcagcgagccgaaactgagcaagaatgagctgaagagrcgcctgaaagctgagaagaaagtagcagagaaggaggccaaacagaaagagctcagtgagaaacagctaagccaagccactgctgctgccaccaaccacaccactgataatggtgtgggtcctgaggaagagagcgtggacccaaatcaatactacaaaatccgcagtcaagcaattcatcagctgaaggtcaatggggaagacccatacccacacaagttccatgtagacatctcactcactgacttcatccaaaaatatagtcacctgcagcctggggatcacctgactgacatcaccttaaaggtggcaggtaggatccatgccaaaagagcttctgggggaaagctcatcttctatgatcttcgaggagagggggtgaagttgcaagtcatggccaattccagaaattataaatcagaagaagaatttattcatattaataacaaactgcgtcggggagacataattggagttcaggggaatcctggtaaaaccaagaagggtgagctgagcatcattccgtatgagatcacactgctgtctccctgtttgcatatgttacctcatcttcactttggcctcaaagacaaggaaacaaggtatcgccagagatacttggacttgatcctgaatgactttgtgaggcagaaatttatcatccgctctaagatcatcacatatataagaagtttcttagatgagctgggattcctagagattgaaactcccatgatgaacatcatcccagggggagccgtggccaagcctttcatcacttatcacaacgagctggacatgaacttatatatgagaattgctccagaactctatcataagatgcttgtggttggtggcatcgaccgggtttatgaaattggacgccagttccggaatgaggggattgatttgacgcacaatcctgagttcaccacctgtgagttctacatggcctatgcagactatcacgatctcatggaaatcacggagaagatggtttcagggatggtgaagcatattacaggcagttacaaggtcacctaccacccagatggcccagagggccargcctacgatgttgacttcaccccacccttccggcgaatcaacatggtagaagagcttgagaaagccctggggatgaagctgccagaaacgaacctctttgaaactgaagaaactcgcaaaattcttgatgatatctgtgtggcaaaagctgttgaatgccctccacctcggaccacagccaggctccttgacaagcttgttggggagttcctggaagtgacttgcatcaatcctacattcatctgtgatcacccacagataatgagccctttggctaaatggcaccgctctaaagagggtctgactgagcgctttgagctgtttgtcatgaagaaagagatatgcaatgcgtatactgagctgaatgatcccatgcggcagcggcagctttttgaagaacaggccaaggccaaggctgcaggtgatgatgaggccatgttcatagatgaaaacttctgtactgccctggaatatgggctgccccccacagctggctggggcatgggcattgatcgagtcgccatgtttctcacggactccaacaacatcaaggaagtacttctgtttcctgccatgaaacccgaagacaagaaggagaatgtagcaaccactgatacactggaaagcacaacagttggcasttctgtctagaaaataataattgcaagttgtataastcaggcrtcttygcatttctgcgaaagatcaargtctgcaagggaattcttgtgtgctgctttccatttgacaccgcagttctgttcagccatcagaagagagacaaggaattaaaaatttctttttaatcctgttaccaaataagccatttgtctcttctctttacttttagaatatcaacttttttccccagacttctggcctaatgaatgtttaggattttaccatctt

SEQ ID NO: 4367 - DNA, 2232 bp, Homo sapiens
ctccttacttttgggycgggccctccgggaagatggcggccgtgcaggcggccgaggtgaaagtggatggcagcgagccgaaactgagcaagaaccatgttgacgcaagctgctgtaaggcttgttagggggtccctgcgcaaaacctcctgggcagagtggggtcacagggaactgcgactgggtcaacttgctcctttcacagcgcctcacaaggacaagtcattttctgatcaaagaagtgagctgaagagrcgcctgaaagctgagaagaaagtagcagagaaggaggccaaacagaaagagctcagtgagaaacagctaagccaagccactgctgctgccaccaaccacaccactgataatggtgtgggtcctgaggaagagagcgtggacccaaatcaatactacaaaatccgcagtcaagcaattcatcagctgaaggtcaatggggaagacccatacccacacaagttccatgtagacatctcactcactgacttcatccaaaaatatagtcacctgcagcctggggatcacctgactgacatcaccttaaaggtggcaggtaggatccatgccaaaagagcttctgggggaaagctcatcttctatgatcttcgaggagagggggtgaagttgcaagtcatggccaattccagaaattataaatcagaagaagaatttattcatattaataacaaactgcgtcggggagacataattggagttcaggggaatcctggtaaaaccaagaagggtgagctgagcatcattccgtatgagatcacactgctgtctccctgtttgcatatgttacctcatcttcactttggcctcaaagacaaggaaacaaggtatcgccagagatacttggacttgatcctgaatgactttgtgaggcagaaatttatcatccgctctaagatcatcacatatataagaagtttcttagatgagctgggattcctagagattgaaactcccatgatgaacatcatcccagggggagccgtggccaagcctttcatcacttatcacaacgagctggacatgaacttatatatgagaattgctccagaactctatcataagatgcttgtggttggtggcatcgaccgggtttatgaaattggacgccagttccggaatgaggggattgatttgacgcacaatcctgagttcaccacctgtgagttctacatggcctatgcagactatcacgatctcatggaaatcacggagaagatggtttcagggatggtgaagcatattacaggcagttacaaggtcacctaccacccagatggcccagagggccargcctacgatgttgacttcaccccacccttccggcgaatcaacatggtagaagagcttgagaaagccctggggatgaagctgccagaaacgaacctctttgaaactgaagaaactcgcaaaattcttgatgatatctgtgtggcaaaagctgttgaatgccctccacctcggaccacagccaggctccttgacaagcttgttggggagttcctggaagtgacttgcatcaatcctacattcatctgtgatcacccacagataatgagccctttggctaaatggcaccgctctaaagagggtctgactgagcgctttgagctgtttgtcatgaagaaagagatatgcaatgcgtatactgagctgaatgatcccatgcggcagcggcagctttttgaagaacaggccaaggccaaggctgcaggtgatgatgaggccatgttcatagatgaaaacttctgtactgccctggaatatgggctgccccccacagctggctggggcatgggcattgatcgagtcgccatgtttctcacggactccaacaacatcaaggaagtacttctgtttcctgccatgaaacccgaagacaagaaggagaatgtagcaaccactgatacactggaaagcacaacagttggcasttctgtctagaaaataataattgcaagttgtataastcaggcrtcttygcatttctgcgaaagatcaargtctgcaagggaattcttgtgtgctgctttccatttgacaccgcagttctgttcagccatcagaagagagacaaggaattaaaaatttctttttaatcctgttaccaaataagccatttgtctcttctctttacttttagaatatcaacttttttccccagacttctggcctaatgaatgtttaggattttaccatctt

SEQ ID NO: 4368 - DNA, 1950 bp, Homo sapiens
tcgcaccttgacctggaaattaacgtactatcctccttacttttgggycgggccctccgggaagatggcggccgtgcaggcggccgaggtgaaagtggatggcagcgagccgaaactgagcaagaatgagctgaagagrcgcctgaaagctgagaagaaagtagcagagaaggaggccaaacagaaagagctcagtgagaaacagctaagccaagccactgctgctgccaccaaccacaccactgataatggtgtgggtcctgaggaagagagcgtggacccaaatgtaggatccatgccaaaagagcttctgggggaaagctcatcttctatgatcttcgaggagagggggtgaagttgcaagtcatggccaattccagaaattataaatcagaagaagaatttattcatattaataacaaactgcgtcggggagacataattggagttcaggggaatcctggtaaaaccaagaagggtgagctgagcatcattccgtatgagatcacactgctgtctccctgtttgcatatgttacctcatcttcactttggcctcaaagacaaggaaacaaggtatcgccagagatacttggacttgatcctgaatgactttgtgaggcagaaatttatcatccgctctaagatcatcacatatataagaagtttcttagatgagctgggattcctagagattgaaactcccatgatgaacatcatcccagggggagccgtggccaagcctttcatcacttatcacaacgagctggacatgaacttatatatgagaattgctccagaactctatcataagatgcttgtggttggtggcatcgaccgggtttatgaaattggacgccagttccggaatgaggggattgatttgacgcacaatcctgagttcaccacctgtgagttctacatggcctatgcagactatcacgatctcatggaaatcacggagaagatggtttcagggatggtgaagcatattacaggcagttacaaggtcacctaccacccagatggcccagagggccargcctacgatgttgacttcaccccacccttccggcgaatcaacatggtagaagagcttgagaaagccctggggatgaagctgccagaaacgaacctctttgaaactgaagaaactcgcaaaattcttgatgatatctgtgtggcaaaagctgttgaatgccctccacctcggaccacagccaggctccttgacaagcttgttggggagttcctggaagtgacttgcatcaatcctacattcatctgtgatcacccacagataatgagccctttggctaaatggcaccgctctaaagagggtctgactgagcgctttgagctgtttgtcatgaagaaagagatatgcaatgcgtatactgagctgaatgatcccatgcggcagcggcagctttttgaagaacaggccaaggccaaggctgcaggtgatgatgaggccatgttcatagatgaaaacttctgtactgccctggaatatgggctgccccccacagctggctggggcatgggcattgatcgagtcgccatgtttctcacggactccaacaacatcaaggaagtacttctgtttcctgccatgaaacccgaagacaagaaggagaatgtagcaaccactgatacactggaaagcacaacagttggcasttctgtctagaaaataataattgcaagttgtataastcaggcrtcttygcatttctgcgaaagatcaargtctgcaagggaattcttgtgtgctgctttccatttgacaccgcagttctgttcagccatcagaagagagacaaggaattaaaaatttctttttaatcctgttaccaaataagccatttgtctcttctctttacttttagaatatcaacttttttccccagacttctggcctaatgaatgtttaggattttaccatctt

SEQ ID NO: 4369 - DNA, 2222 bp, Homo sapiens
agatggcggccgtgcaggcggccgaggtgaaagtggatggcagcgagccgaaactgagcaagaagtgagtgtcgctgcgagtctttaaagcctttgcggtaggagagtctgggctgggargcgccgcgaggttcccaccaaggctgctgtgccggggccttcttgccggctctcgtgggtggtggtaatcattagttccagggtgctctgccatgttgacgcaagctgctgtaaggcttgttagggggtccctgcgcaaaacctcctgggcagagtggggtcacagggaactgcgactgggtcaacttgctcctttcacagcgcctcacaaggacaagtcattttctgatcaaagaagtgagctgaagagrcgcctgaaagctgagaagaaagtagcagagaaggaggccaaacagaaagagctcagtgagaaacagctaagccaagccactgctgctgccaccaaccacaccactgataatggtgtgggtcctgaggaagagagcgtggacccaaatcaatactacaaaatccgcagtcaagcaattcatcagctgaaggtcaatggggaagacccatacccacacaagttccatgtagacatctcactcactgacttcatccaaaaatatagtcacctgcagcctggggatcacctgactgacatcaccttaaaggtggcaggtaggatccatgccaaaagagcttctgggggaaagctcatcttctatgatcttcgaggagagggggtgaagttgcaagtcatggccaattccagaaattataaatcagaagaagaatttattcatattaataacaaactgcgtcggggagacataattggagttcaggggaatcctggtaaaaccaagaagggtgagctgagcatcattccgtatgagatcacactgctgtctccctgtttgcatatgttacctcatcttcactttggcctcaaagacaagattgaaactcccatgatgaacatcatcccagggggagccgtggccaagcctttcatcacttatcacaacgagctggacatgaacttatatatgagaattgctccagaactctatcataagatgcttgtggttggtggcatcgaccgggtttatgaaattggacgccagttccggaatgaggggattgatttgacgcacaatcctgagttcaccacctgtgagttctacatggcctatgcagactatcacgatctcatggaaatcacggagaagatggtttcagggatggtgaagcatattacaggcagttacaaggtcacctaccacccagatggcccagagggccargcctacgatgttgacttcaccccacccttccggcgaatcaacatggtagaagagcttgagaaagccctggggatgaagctgccagaaacgaacctctttgaaactgaagaaactcgcaaaattcttgatgatatctgtgtggcaaaagctgttgaatgccctccacctcggaccacagccaggctccttgacaagcttgttggggagttcctggaagtgacttgcatcaatcctacattcatctgtgatcacccacagataatgagccctttggctaaatggcaccgctctaaagagggtctgactgagcgctttgagctgtttgtcatgaagaaagagatatgcaatgcgtatactgagctgaatgatcccatgcggcagcggcagctttttgaagaacaggccaaggccaaggctgcaggtgatgatgaggccatgttcatagatgaaaacttctgtactgccctggaatatgggctgccccccacagctggctggggcatgggcattgatcgagtcgccatgtttctcacggactccaacaacatcaaggaagtacttctgtttcctgccatgaaacccgaagacaagaaggagaatgtagcaaccactgatacactggaaagcacaacagttggcasttctgtctagaaaataataattgcaagttgtataastcaggcrtcttygcatttctgcgaaagatcaargtctgcaagggaattcttgtgtgctgctttccatttgacaccgcagttctgttcagccatcagaagagagacaaggaattaaaaatttctttttaatcctgttaccaaataagccatttgtctcttctctttacttttagaatatcaacttttttccccagacttctggcctaatgaatgtttaggattttaccatctt

SEQ ID NO: 4370 - DNA, 1922 bp, Homo sapiens
ccacagttcctttccccgatagcttcaaattytctgccttttgaaataagcctacttttaactggaataaataattggtcaatctctacctcaggtgaagaggaaccaagcctctggaaacacttaggaacaaactgtaaaaaccaaaggcaattgtgtaaccrgttaaataagcttgctggactttgtccctgtgtatgagttagacaattctttcagctagtttgagtgacgcactgaccagtgaagcgcagtgaagcagtgggaaccggaatatccaaagagtggtttgaaggagaaagaagcattgtggctttatatcctctgggcctgggtttcctgaagtcaccacacatagaggagagagaaaatggctgagttaaagtacatttctggatttgggaatgagtgttcttcagaggatcctcgctgcccaggttcccygccagaaggacagaataatcctcaggtctgcccctacaatctctatgctgmgcagctctcaggatcgkctttcacttgtccayggagcaccaataagagaagckggctgtrtaggattctaccttcagtttctcacaagccctttgaatccattgacgaaggccawgtcactcacaactgggatgmagttgatcctgatcctaaccagcttagatggaaaccatttgagattccaaaagcatctcagaagaaagtagactttgtgagtggcctgcataccttgtgtggagctggagayataaagtctaacaatgggcttgctatccacattttcctctgcaatacctccatggagaacagatgcttttacaattcagatggggacttcttgattgttcckcagaaarggaaccttctcatttacaccgagtttggcaagatgcttgtacagcccaatgagatctgcktcattcagagaggaatgcggttcakcatagatgtctttgaggagaccaggggctacatcttggaggtctatggtgtccactttgagttacctgaccttggaccaaytggggccaatggcttggccaatcctcgtgatttcttgatacccattgcctggtatgaggatcgccaagtaccaggtggttacacggtcattaataaataccagggcaagctgtttgctgccaaacaggatgtctccccgttcaatgttgtggcctggcacgggaattatacaccctacaagtacaacctgaagaatttcatggttatcaactcagtggcctttgamcrtgcagacccatccattttcacagkattgactgctaagtctgtccgccctggagtggccattgctgattttgtcatcttcccacctygayggggggttgctgataagaccttcagkcctccttattaccataggaactgcatgagtgagttcatgggactcatccgaggtcactatgaggcaaagcaaggtgggttcctgccasggggagggagtctacacagcacartgaccccccrtggacctgatgctgactgctttgagaaggccagcaaggtcaagctggcacctgagaggattgccgatggcaccatggcmtttatgtttgaatcatctttaagtctggcrgtcacaaagtggggactcaaggcctccaggtgtttggatgagaactaccacaagtgctgggagccactcaagagccacttcactcccaactccaggaacccagcagaacctaattgagactggaacattgctaccataattaagagtagatttgtgaagatttcttcagaatctcatgctttctggtagtattggaggagggggttggttaaaatgaaaattcacttttcatagtcaagtaactcagaacttttatggaaacgcatttgcaaagttctatggctgtcaccttaattactcaataaacttgctggtgttctgtggacgtagt

SEQ ID NO: 4371 - DNA, 1201 bp, Homo sapiens
ctttgtcacctacagtacatttctggatttgggaatgagtgttcttcagaggatcctcgctgcccaggttcccygccagaaggacagaataatcctcaggtctgcccctacaatctctatgctgmgcagctctcaggatcgkctttcacttgtccayggagcaccaataagagaagckggctgtrtaggattctaccttcagtttctcacaagccctttgaatccattgacgaaggccawgtcactcacaactgggatgmagttgatcctgatcctaaccagcttagatggaaaccatttgagattccaaaagcatctcagaagaaagtagactttgtgagtggcctgcataccttgtgtggagctggagayataaagtctaacaatgggcttgctatccacattttcctctgcaatacctccatggagaacagatgcttttacaattcagatggggacttcttgattgttcckcagaaarggaaccttctcatttacaccgagtttggcaagatgcttgtacagcccaatgagatctgcktcattcagagaggaatgcggttcakcatagatgtctttgaggagaccaggggctacatcttggaggtctatggtgtccactttgagttacctgaccttggaccaaytggggccaatggcttggccaatcctcgtgatttcttgatacccattgcctggtatgaggatcgccaagtaccaggtggttacacggtcattaataaataccagggcaagctgtttgctgccaaacaggatgtctccccgttcaatgttgtggcctggcacgggaattatacaccctacaagtacaacctgaagaatttcatggttatcaactcagtggcctttgamcrtgcagacccatccattttcacagkattgactgctaagtctgtccgccctggagtggccattgctgattttgtcatcttcccacctygayggggggttgctgataagaccttcagkcctccttattaccataggaactgcatgagtgagttcatgggactcatccgaggtcactatgaggcaaagcaaggtgggttcctgccasggggagggagtctacacagcacartgaccccccrtggacctgatgctgactgctttgagaaggccagcaaggtcaagctggcacctgagaggattgccgatggcaccatggtaagtatgttaa

SEQ ID NO: 4372 - DNA, 963 bp, Homo sapiens
ctttgtcacctacagtacatttctggatttgggaatgagtgttcttcagaggatcctcgctgcccaggttcccygccagaaggacagaataatcctcaggtctgcccctacaatctctatgctgmgcagctctcaggatcgkctttcacttgtccayggagcaccaataagagaagckggctgtrtaggattctaccttcagtttctcacaagccctttgaatccattgacgaaggccawgtcactcacaactgggatgmagttgatcctgatcctaaccagcttagatggaaaccatttgagattccaaaagcatctcagaagaaagtagactttgtgagtggcctgcataccttgtgtggagctggagayataaagtctaacaatgggcttgctatccacattttcctctgcaatacctccatggagaacagatgcttttacaattcagatggggacttcttgattgttcckcagaaarggaaccttctcatttacaccgagtttggcaagatgcttgtacagcccaatgagatctgcktcattcagagaggaatgcggttcakcatagatgtctttgaggagaccaggggctacatcttggaggtctatggtgtccactttgagttacctgaccttggaccaaytggggccaatggcttggccaatcctcgtgatttcttgatacccattgcctggtatgaggatcgccaagtaccaggtggttacacggtcattaataaataccagggcaagctgtttgctgccaaacaggatgtctccccgttcaatgttgtggcctggcacgggaattatacaccctacaagtacaacctgaagaatttcatggttatcaactcagtggcctttgamcrtgcagacccatccattttcacagkattgactgctaaaaggccagcaaggtcaagctggcacctgagaggattgccgatggcaccatgg

SEQ ID NO: 4373 - DNA, 661 bp, Homo sapiens
agaatcgcgcaggcgcaattgtgccctggttcgccaagatgtcgttcccaaagtataagccgtcgagcctgcgcactctgcctgagaccctcgacccagccgaatacaacatatctccggaaacccggcgggcgcaagccgagcggttggccataagagcccagctgaaacgagagtacctgcttcagtacaacgatcccaaccgccgagggctcatcgaaaatcctgccttgcttcgttgggcctatgcaagaacaataaatgtctatcctaatttcagacccactcctaaaaactcactcatgggagctctgtgtggatttgggcccctcatcttcatttattatattatcaaaactgagagggataggaaagaaaaacttatccaggaaggaaaattggatcgaacatttcacctctcatattaagtctggcaatgatgactatatgtattcctgyctaaataaatcatctattaatcattaagtagtagtttctctttcttagtattaccttgattcaatgttaaaaactattaacaccctaacaacacagaagcagacgcagcccgtgttgggaatctgctgtcagagtgacagcaaacatttgctgtacattgaatgaatgaacataaacttyattaaactgtgagctcttagaa

SEQ ID NO: 4374 - DNA, 4460 bp, Homo sapiens
taatttaaaggggccgygcctgcggagccgggcggaacgctagcggtgttggcgcggagtggaccccggctgcggcccctggcaatggcgccaccatcggtcccggagtcccagtgatgctctgtgccatagagcccccataacttcactactacgtgatagtaaatccccggcaaaaaccmgcagcgccttgcaagcccacgccaccccaagcatcccaggactcttctgaaacgactccgggctaccagatcggccgtccagctggaatcaaccgatggaggctccgctgcaaactggaatggtgcttggcgtgatgatcggggccggagtggcggtggtrgtcacggccgtgctcatcctcctggtggtgcggaggctgcgagtgccaaaaaccccagccccggatggcccccggtatcggttccggaagagggacaaagtgctcttctatggccggaagattatgcggaaggtgtcacaatccacctcctccctcgtggatacctctgtctccgccacctcccggccacgcatgaggaagaaactgaagatgctcaacattgccaagaagatcctgcgcatccagaaagagacgcccacgctgcagcggaaggagcccccgcccgcagtgctagaagctgacctgaccgagggcgacctggctaactcccatctgccctctgaagtgctttatatgctcaagaacgtccgggtgctgggccacttcgagaagccactcttcctggagctctgccgccacatggtcttccagcggctgggccagggtgactacgtcttccggccgggccagccagatgccagcatctacgtggtgcaggacgggctgctggagctctgtctgccagggcctgacgggaaggagtgtgtggtgaaggaagtggttcctggggacagcgtcaayagccttctcagcatcctggatgtcatcaccggtcaccagcatccccagcggaccgtgtctgcccgggcggcccgggactccacggtgctgcgcctgccggtggaagcattctccgcggtcttcaccaagtacccggagagcttggtgcgggtcgtgcagatcatcatggtgcggctgcagcgagtcaccttcctggcactgcacaactacctgggtctgaccaatgagctcttcagccacgagatccagcccctgcgtctgttccccagccccggcctcccaactcgcaccagccctgtgcggggctccaagagaatggtcagcacctcagctacagacgagcccagggagaccccagggcggccacccgatcccaccggggccccgctgcctggacctacaggggaccctgtgaagcccacatccctggaaaccccctcgscccctctgctgagccgctgcgtctccatgccaggggacatctcaggcttgcagggtggcccccgctccgacttcgacatggcctatgagcgtggccggatctccgtgtccctgcaggaagaggcctccggggggtccctggcagcccccgctcggacccccactcaggagcctcgtgagcagccggcaggcgcctgtgaatacagctactgtgaggatgagtcggccactggtggctgccctttcgggccctaccagggccgccagaccagcagcatcttcgaggcagcaaagcaggagctggccaagctgatgcggattgaggacccctccctcctgaacagcagagtcttgctgcaccacgccaaagctggcaccatcattgcccgccagggagaccaggacgtgagcctgcacttcgtgctctggggctgcctgcacgtgtaccagcgcatgatcgacaaggcggaggacgtgtgcctgttcgtagcgcagcccggggaactggtggggcagctggcggtgctcactggcgaacctctcatcttcacactgcgagcccaacgcgactgcaccttcctgcggatctccaagtccgacttctatgagatcatgcgcgcacagcccagtgtggtgctgagtgcggcgcacacggtggcagccaggatgtcgcccttcgtgcgccagatggacttcgccatcgactggactgcagtggaggcgggacgcgcgctgtacaggcagggcgaccgctccgactgcacttacatcgtgctcaatgggcggctgcgtagcgtgatccagcgaggcagtggcaagaaggagctggtgggcgagtacggccgcggcgacctcatcggcgtggtggaggcactgacccggcagccgcgagccacgacggtgcacgcggtgcgcgacacggagctggccaagcttcccgagggcaccttgggtcacatcaaacgccggtacccgcaggtcgtgacccgccttatccacctactgagccagaaaattctagggaatttgcagcagctgcaaggacccttcccagcaggctctgggttgggtgtgcccccacactcggaactcaccaacccagccagcaacctggcaactgtggcaatcctgcctgtgtgtgctgaggtccccatggtggccttcacgctggagctgcagcacgccctgcaggccatcggtccgacgctactccttaacagtgacatcatccgggcacgcctgggggcctccgcactggatagcatccaagagttccggctgtcagggtggctggcccagcaggaggatgcacaccgtatcgtactctaccagacggacgcctcrctgacgccctggaccgtgcgctgcctgcgacaggccgactgcatcctcattgtgggcctgggggaccaggagcctaccctcggccagctggagcagatgctggagaacacggctgtgcgcgcccttaagcagctagtcctgctccaccgagaggagggcgcgggccccacgcgcaccgtggagtggctaaatatgcgcagctggtgctcggggcacctgcacctgcgctgtccgcgccgcctcttttcgcgccgcagccctgccaagctgcatgagctctacgagaaggttttctccaggcgcgcggaccggcacagcgacttctcccgcttggcgagggtgctcacggggaacaccattgcccttgtgctaggcgggggcggggccaggggctgctcgcacatcggagtactaaaggcattagaggaggcgggggtccccgtggacctggtgggcggcacgtccattggctctttcatcggagcgttgtacgcggaggagcgcagcgccagccgcacgaagcagcgggcccgggagtgggccaagagcatgacttcggtgctggaacctgtgttggacctcacgtacccagtcacctccatgttcactgggtctgcctttaaccgcagcatccatcgggtcttccaggataagcagattgaggacctgtggctgccttacttcaacgtgaccacagatatcaccgcctcagccatgcgagtccacaaagatggctccctgtggcggtacgtgcgcgccagcatgacgctgtcgggctacctgcccccgctgtgcgaccccaaggacgggcacctactcatggatggcggctacatcaacaatctgccaggcaacatgggtgccaaaacggtcatcgccattgacgtggggagccaggatgagacggacctcagcacctacggggacagcctgtccggctggtggctgctgtggaagcggctgaatccctgggctgacaaggtaaaggtyccagacatggctgaaatccagtcccgcctggcctacgtgtcctgtgtgcggcagctagaggttgtcaagtccagctcctactgcgagtacctgcgcccgcccatcgactgcttcaagaccatggactttgggaagttcgaccagatctatgatgtgggctaccagtacgggaaggcggtgtttggaggctggagccgtggcaacgtcattgagaaaatgctcacagaccggcggtctacagaccttaatgagagccgccgtgcagacgtgcttgccttcccaagctctggcttcactgacttggcagagattgtgtcccggattgagccccccacgagctatgtctctgatggctgtgctgacggagaggagtcagattgtctgacagagtatgaggaggacgcyggacccgactgctcgagggatgaaggggggtcccccgagggcgcaagccccagcactgcctccgagatggaggaggagaagtcgattctccggcaacgacgctgtctgccccaggagccgcccggctcagccacagatgcctgaggacctcgacaggggtcaccccctccctcccacccctggactgggctgggggtggccccgtgggggtagctcactccccctcctgctgctatgcctgtgacccccgcggcccacacactggactgacctgccctgagcggggatgcagtgttgcactgatgacttgaccagcccctcccccaataaactcgcctcttggaaatggcttcct

SEQ ID NO: 4375 - DNA, 4837 bp, Homo sapiens
gtgtttccacaccggtagccagctgtgccctgaggtggaagaggaccggccacccaggaattttccaagtaacgactcggagtctccgggattcctatctcccggcccccgaatttccattaatattctagcgatgtcagaaacatcctcagcttcccagaaaaatcccagtaatattccagcatctctcagtatcttccaaggagcccggacgccctccccaggcccgctctcataagcaccccaggaatgtgcccacccacctcctggttttcccagcagtagtattgtaatcctcagaatctcagtaactttccagtgaccccgcatccccacccactaatcccagcgtctctggttacgcctcccagcaatggcgccaccatcggtcccggagtcccagtgatgctctgtgccatagagcccccataacttcactactacgtgatagtaaatccccggcaaaaaccmgcagcgccttgcaagcccacgccaccccaagcatcccaggactcttctgaaacagggcagtgacccgggaggaagtcaccaggtgcagaggaccgtgccctgtggggacctgcctgcaggctgctgacagactccgggctaccagatcggccgtccagctggaatcaaccgatggaggctccgctgcaaactggaatggtgcttggcgtgatgatcggggccggagtggcggtggtrgtcacggccgtgctcatcctcctggtggtgcggaggctgcgagtgccaaaaaccccagccccggatggcccccggtatcggttccggaagagggacaaagtgctcttctatggccggaagattatgcggaaggtgtcacaatccacctcctccctcgtggatacctctgtctccgccacctcccggccacgcatgaggaagaaactgaagatgctcaacattgccaagaagatcctgcgcatccagaaagagacgcccacgctgcagcggaaggagcccccgcccgcagtgctagaagctgacctgaccgagggcgacctggctaactcccatctgccctctgaagtgctttatatgctcaagaacgtccgggtgctgggccacttcgagaagccactcttcctggagctctgccgccacatggtcttccagcggctgggccagggtgactacgtcttccggccgggccagccagatgccagcatctacgtggtgcaggacgggctgctggagctctgtctgccagggcctgacgggaaggagtgtgtggtgaaggaagtggttcctggggacagcgtcaayagccttctcagcatcctggatgtcatcaccggtcaccagcatccccagcggaccgtgtctgcccgggcggcccgggactccacggtgctgcgcctgccggtggaagcattctccgcggtcttcaccaagtacccggagagcttggtgcgggtcgtgcagatcatcatggtgcggctgcagcgagtcaccttcctggcactgcacaactacctgggtctgaccaatgagctcttcagccacgagatccagcccctgcgtctgttccccagccccggcctcccaactcgcaccagccctgtgcggggctccaagagaatggtcagcacctcagctacagacgagcccagggagaccccagggcggccacccgatcccaccggggccccgctgcctggacctacaggggaccctgtgaagcccacatccctggaaaccccctcgscccctctgctgagccgctgcgtctccatgccaggggacatctcaggcttgcagggtggcccccgctccgacttcgacatggcctatgagcgtggccggatctccgtgtccctgcaggaagaggcctccggggggtccctggcagcccccgctcggacccccactcaggagcctcgtgagcagccggcaggcgcctgtgaatacagctactgtgaggatgagtcggccactggtggctgccctttcgggccctaccagggccgccagaccagcagcatcttcgaggcagcaaagcaggagctggccaagctgatgcggattgaggacccctccctcctgaacagcagagtcttgctgcaccacgccaaagctggcaccatcattgcccgccagggagaccaggacgtgagcctgcacttcgtgctctggggctgcctgcacgtgtaccagcgcatgatcgacaaggcggaggacgtgtgcctgttcgtagcgcagcccggggaactggtggggcagctggcggtgctcactggcgaacctctcatcttcacactgcgagcccaacgcgactgcaccttcctgcggatctccaagtccgacttctatgagatcatgcgcgcacagcccagtgtggtgctgagtgcggcgcacacggtggcagccaggatgtcgcccttcgtgcgccagatggacttcgccatcgactggactgcagtggaggcgggacgcgcgctgtacaggcagggcgaccgctccgactgcacttacatcgtgctcaatgggcggctgcgtagcgtgatccagcgaggcagtggcaagaaggagctggtgggcgagtacggccgcggcgacctcatcggcgtggtggaggcactgacccggcagccgcgagccacgacggtgcacgcggtgcgcgacacggagctggccaagcttcccgagggcaccttgggtcacatcaaacgccggtacccgcaggtcgtgacccgccttatccacctactgagccagaaaattctagggaatttgcagcagctgcaaggacccttcccagcaggctctgggttgggtgtgcccccacactcggaactcaccaacccagccagcaacctggcaactgtggcaatcctgcctgtgtgtgctgaggtccccatggtggccttcacgctggagctgcagcacgccctgcaggccatcggtccgacgctactccttaacagtgacatcatccgggcacgcctgggggcctccgcactggatagcatccaagagttccggctgtcagggtggctggcccagcaggaggatgcacaccgtatcgtactctaccagacggacgcctcrctgacgccctggaccgtgcgctgcctgcgacaggccgactgcatcctcattgtgggcctgggggaccaggagcctaccctcggccagctggagcagatgctggagaacacggctgtgcgcgcccttaagcagctagtcctgctccaccgagaggagggcgcgggccccacgcgcaccgtggagtggctaaatatgcgcagctggtgctcggggcacctgcacctgcgctgtccgcgccgcctcttttcgcgccgcagccctgccaagctgcatgagctctacgagaaggttttctccaggcgcgcggaccggcacagcgacttctcccgcttggcgagggtgctcacggggaacaccattgcccttgtgctaggcgggggcggggccaggggctgctcgcacatcggagtactaaaggcattagaggaggcgggggtccccgtggacctggtgggcggcacgtccattggctctttcatcggagcgttgtacgcggaggagcgcagcgccagccgcacgaagcagcgggcccgggagtgggccaagagcatgacttcggtgctggaacctgtgttggacctcacgtacccagtcacctccatgttcactgggtctgcctttaaccgcagcatccatcgggtcttccaggataagcagattgaggacctgtggctgccttacttcaacgtgaccacagatatcaccgcctcagccatgcgagtccacaaagatggctccctgtggcggtacgtgcgcgccagcatgacgctgtcgggctacctgcccccgctgtgcgaccccaaggacgggcacctactcatggatggcggctacatcaacaatctgccagcggacatcgcccgcagcatgggtgccaaaacggtcatcgccattgacgtggggagccaggatgagacggacctcagcacctacggggacagcctgtccggctggtggctgctgtggaagcggctgaatccctgggctgacaaggtaaaggtyccagacatggctgaaatccagtcccgcctggcctacgtgtcctgtgtgcggcagctagaggttgtcaagtccagctcctactgcgagtacctgcgcccgcccatcgactgcttcaagaccatggactttgggaagttcgaccagatctatgatgtgggctaccagtacgggaaggcggtgtttggaggctggagccgtggcaacgtcattgagaaaatgctcacagaccggcggtctacagaccttaatgagagccgccgtgcagacgtgcttgccttcccaagctctggcttcactgacttggcagagattgtgtcccggattgagccccccacgagctatgtctctgatggctgtgctgacggagaggagtcagattgtctgacagagtatgaggaggacgcyggacccgactgctcgagggatgaaggggggtcccccgagggcgcaagccccagcactgcctccgagatggaggaggagaagtcgattctccggcaacgacgctgtctgccccaggagccgcccggctcagccacagatgcctgaggacctcgacaggggtcaccccctccctcccacccctggactgggctgggggtggccccgtgggggtagctcactccccctcctgctgctatgcctgtgacccccgcggcccacacactggactgacctgccctgagcggggatgcagtgttgcactgatgacttgaccagcccctcccccaataaactcgcctcttggaaatggcttcct

SEQ ID NO: 4376 - DNA, 4884 bp, Homo sapiens
aacgctagcggtgttggcgcggagtggaccccggctgcggcccctgggtgtttccacaccggtagccagctgtgccctgaggtggaagaggaccggccacccaggaattttccaagtaacgactcggagtctccgggattcctatctcccggcccccgaatttccattaatattctagcgatgtcagaaacatcctcagcttcccagaaaaatcccagtaatattccagcatctctcagtatcttccaaggagcccggacgccctccccaggcccgctctcataagcaccccaggaatgtgcccacccacctcctggttttcccagcagtagtattgtaatcctcagaatctcagtaactttccagtgaccccgcatccccacccactaatcccagcgtctctggttacgcctcccagcaatggcgccaccatcggtcccggagtcccagtgatgctctgtgccatagagcccccataacttcactactacgtgatagtaaatccccggcaaaaaccmgcagcgccttgcaagcccacgccaccccaagcatcccaggactcttctgaaacagggcagtgacccgggaggaagtcaccaggtgcagaggaccgtgccctgtggggacctgcctgcaggctgctgacagactccgggctaccagatcggccgtccagctggaatcaaccgatggaggctccgctgcaaactggaatggtgcttggcgtgatgatcggggccggagtggcggtggtrgtcacggccgtgctcatcctcctggtggtgcggaggctgcgagtgccaaaaaccccagccccggatggcccccggtatcggttccggaagagggacaaagtgctcttctatggccggaagattatgcggaaggtgtcacaatccacctcctccctcgtggatacctctgtctccgccacctcccggccacgcatgaggaagaaactgaagatgctcaacattgccaagaagatcctgcgcatccagaaagagacgcccacgctgcagcggaaggagcccccgcccgcagtgctagaagctgacctgaccgagggcgacctggctaactcccatctgccctctgaagtgctttatatgctcaagaacgtccgggtgctgggccacttcgagaagccactcttcctggagctctgccgccacatggtcttccagcggctgggccagggtgactacgtcttccggccgggccagccagatgccagcatctacgtggtgcaggacgggctgctggagctctgtctgccagggcctgacgggaaggagtgtgtggtgaaggaagtggttcctggggacagcgtcaayagccttctcagcatcctggatgtcatcaccggtcaccagcatccccagcggaccgtgtctgcccgggcggcccgggactccacggtgctgcgcctgccggtggaagcattctccgcggtcttcaccaagtacccggagagcttggtgcgggtcgtgcagatcatcatggtgcggctgcagcgagtcaccttcctggcactgcacaactacctgggtctgaccaatgagctcttcagccacgagatccagcccctgcgtctgttccccagccccggcctcccaactcgcaccagccctgtgcggggctccaagagaatggtcagcacctcagctacagacgagcccagggagaccccagggcggccacccgatcccaccggggccccgctgcctggacctacaggggaccctgtgaagcccacatccctggaaaccccctcgscccctctgctgagccgctgcgtctccatgccaggggacatctcaggcttgcagggtggcccccgctccgacttcgacatggcctatgagcgtggccggatctccgtgtccctgcaggaagaggcctccggggggtccctggcagcccccgctcggacccccactcaggagcctcgtgagcagccggcaggcgcctgtgaatacagctactgtgaggatgagtcggccactggtggctgccctttcgggccctaccagggccgccagaccagcagcatcttcgaggcagcaaagcaggagctggccaagctgatgcggattgaggacccctccctcctgaacagcagagtcttgctgcaccacgccaaagctggcaccatcattgcccgccagggagaccaggacgtgagcctgcacttcgtgctctggggctgcctgcacgtgtaccagcgcatgatcgacaaggcggaggacgtgtgcctgttcgtagcgcagcccggggaactggtggggcagctggcggtgctcactggcgaacctctcatcttcacactgcgagcccaacgcgactgcaccttcctgcggatctccaagtccgacttctatgagatcatgcgcgcacagcccagtgtggtgctgagtgcggcgcacacggtggcagccaggatgtcgcccttcgtgcgccagatggacttcgccatcgactggactgcagtggaggcgggacgcgcgctgtacaggcagggcgaccgctccgactgcacttacatcgtgctcaatgggcggctgcgtagcgtgatccagcgaggcagtggcaagaaggagctggtgggcgagtacggccgcggcgacctcatcggcgtggtggaggcactgacccggcagccgcgagccacgacggtgcacgcggtgcgcgacacggagctggccaagcttcccgagggcaccttgggtcacatcaaacgccggtacccgcaggtcgtgacccgccttatccacctactgagccagaaaattctagggaatttgcagcagctgcaaggacccttcccagcaggctctgggttgggtgtgcccccacactcggaactcaccaacccagccagcaacctggcaactgtggcaatcctgcctgtgtgtgctgaggtccccatggtggccttcacgctggagctgcagcacgccctgcaggccatcggtccgacgctactccttaacagtgacatcatccgggcacgcctgggggcctccgcactggatagcatccaagagttccggctgtcagggtggctggcccagcaggaggatgcacaccgtatcgtactctaccagacggacgcctcrctgacgccctggaccgtgcgctgcctgcgacaggccgactgcatcctcattgtgggcctgggggaccaggagcctaccctcggccagctggagcagatgctggagaacacggctgtgcgcgcccttaagcagctagtcctgctccaccgagaggagggcgcgggccccacgcgcaccgtggagtggctaaatatgcgcagctggtgctcggggcacctgcacctgcgctgtccgcgccgcctcttttcgcgccgcagccctgccaagctgcatgagctctacgagaaggttttctccaggcgcgcggaccggcacagcgacttctcccgcttggcgagggtgctcacggggaacaccattgcccttgtgctaggcgggggcggggccaggggctgctcgcacatcggagtactaaaggcattagaggaggcgggggtccccgtggacctggtgggcggcacgtccattggctctttcatcggagcgttgtacgcggaggagcgcagcgccagccgcacgaagcagcgggcccgggagtgggccaagagcatgacttcggtgctggaacctgtgttggacctcacgtacccagtcacctccatgttcactgggtctgcctttaaccgcagcatccatcgggtcttccaggataagcagattgaggacctgtggctgccttacttcaacgtgaccacagatatcaccgcctcagccatgcgagtccacaaagatggctccctgtggcggtacgtgcgcgccagcatgacgctgtcgggctacctgcccccgctgtgcgaccccaaggacgggcacctactcatggatggcggctacatcaacaatctgccagcggacatcgcccgcagcatgggtgccaaaacggtcatcgccattgacgtggggagccaggatgagacggacctcagcacctacggggacagcctgtccggctggtggctgctgtggaagcggctgaatccctgggctgacaaggtaaaggtyccagacatggctgaaatccagtcccgcctggcctacgtgtcctgtgtgcggcagctagaggttgtcaagtccagctcctactgcgagtacctgcgcccgcccatcgactgcttcaagaccatggactttgggaagttcgaccagatctatgatgtgggctaccagtacgggaaggcggtgtttggaggctggagccgtggcaacgtcattgagaaaatgctcacagaccggcggtctacagaccttaatgagagccgccgtgcagacgtgcttgccttcccaagctctggcttcactgacttggcagagattgtgtcccggattgagccccccacgagctatgtctctgatggctgtgctgacggagaggagtcagattgtctgacagagtatgaggaggacgcyggacccgactgctcgagggatgaaggggggtcccccgagggcgcaagccccagcactgcctccgagatggaggaggagaagtcgattctccggcaacgacgctgtctgccccaggagccgcccggctcagccacagatgcctgaggacctcgacaggggtcaccccctccctcccacccctggactgggctgggggtggccccgtgggggtagctcactccccctcctgctgctatgcctgtgacccccgcggcccacacactggactgacctgccctgagcggggatgcagtgttgcactgatgacttgaccagcccctcccccaataaactcgcctcttggaaatggcttcct

SEQ ID NO: 4377 - DNA, 1884 bp, Homo sapiens
ccgaggccccgccccacccgcgagccgcagccgcggccccacagcttctggggctggggccccggcagccgggcaggccggcctgacctcgacctccgccgtgcgggcccgaccggtgagtccagcccggcagtcgcaggacccggccgccagcctctccctccacctctccctgcccccagcgccaggcgcgggctgcgctcggtggcggcggcggggccctcaggcggccatggcggcaggcgccggggccgggtccgcgccgcgctggctgagggcgctgagcgagccgctgagcgcggcgcagctgcggcgactggaggagcaccgctacagcgcggcgggcgtctcgctgctcgagccgccgctgcagctctactggacctggctgctccagtggatcccgctctggatggcccccaactccatcaccctgctggggctcgccgtcaacgtggtcaccacgctcgtgctcatctcctactgtcccacggccaccgaagaggcaccatactggacataccttttatgtgcactgggactttttatttaccagtcactggatgctattgatgggaaacaagccagaagaacaaactcttgttcccctttaggggagctctttgaccatggctgtgactctctttccacagtatttatggcagtgggagcrtcaattgccgctcgcttaggaacttatcctgactggtttttttyctgctcttttattgggatgtttgtgttttattgcgctcattggcagacttatgtttcaggcatgttgagatttggaaaagtggatgtaactgaaattcagatagctttagtgattgtctttgtgttgtctgcatttggaggagcaacaatgtgggactatacgattcctattctagaaataaaattgaagatccttccagttcttggatttctaggtggagtaatattttcctgttcaaattatttccatgttatcctccatggtggtgttggcaagaatggatccactatagcaggcaccagtgtcttgtcacctggactccacataggactaattattatactggcaataatgatctataaaaagtcagcaactgatgtgtttgaaaagcatccttgtctttatatcctaatgtttggatgtgtctttgctaaagtctcacaaaaattagtggtagctcacatgaccaaaagtgaactatatcttcaagacactgtctttttggggccaggtcttttgtttttagaccagtactttaataaytttatagacgaatatgttgttctatggatggcaatggtgatttcttcatttgatatggtgatatactttagtgctttgtgcctgcaaatttcaagacaccttcatctaaatatattcaagactgcatgtcatcaagcacctgaacaggttcaagttctttcttcaaagagtcatcagaataacatggattgaagagacttccgaacacttgctatctcttgctgctgctgtttcatggaaggagatattaaacatttgtttaatttttatttaagtgttatacctatttcagcaaataaaatatttcattgcttatattaatccttattttttcaatttcaatatgatcacttacagtttccatcataatttttttttgcaacatagccatttcttttttaaattcattttgtgcaccagtaagtagattatcatgattcttctccaactcttccatactctaaaaacacaaaagacaagttaagttacaaaggaccacttttcatctcaggttctaaacttgtacaattaattttcaaaagtagtaatttttgaatattcaaatgctcatctatttgaaataaaaatattctaagtaatacatgaataccaaaatacctact

SEQ ID NO: 4378 - DNA, 1879 bp, Homo sapiens
ccgaggccccgccccacccgcgagccgcagccgcggccccacagcttctggggctggggccccggcagccgggcaggccggcctgacctcgacctccgccgtgcgggcccgaccggtgagtccagcccggcagtcgcaggacccggccgccagcctctccctccacctctccctgcccccagcgccaggcgcgggctgcgctcggtggcggcggcggggccctcaggcggccatggcggcaggcgccggggccgggtccgcgccgcgctggctgagggcgctgagcgagccgctgagcgcggcgcagctgcggcgactggaggagcaccgctacagcgcggcgggcgtctcgctgctcgagccgccgctgcagctctactggacctggctgctccagtggatcccgctctggatggcccccaactccatcaccctgctggggctcgccgtcaacgtggtcaccacgctcgtgctcatctcctactgtcccacggccaccgaagaggcaccatactggacataccttttatgtgcactgggactttttatttaccagtcactggatgctattgatgggaaacaagccagaagaacaaactcttgttcccctttaggggagctctttgaccatggctgtgactctctttccacagtatttatggcagtgggagcrtcaattgccgctcgcttaggaacttatcctgactggtttttttyctgctcttttattgggatgtttgtgttttattgcgctcattggcagacttatgtttcaggcatgttgagatttggaaaagtggatgtaactgaaattcagatagctttagtgattgtctttgtgttgtctgcatttggaggagcaacaatgtgggactatacgattcctattctagaaataaaattgaagatccttccagttcttggatttctaggtggagtaatattttcctgttcaaattatttccatgttatcctccatggtggtgttggcaagaatggatccactatagcaggcaccagtgtcttgtcacctggactccacataggactaattattatactggcaataatgatctataaaaagtcagcaactgatgtgtttgaaaagcatccttgtctttatatcctaatgtttggatgtgtctttgctaaagtctcacaaaaattagtggtagctcacatgaccaaaagtgaactatatcttcaagacactgtctttttggggccaggtcttttgtttttagaccagtactttaataaytttatagacgaatatgttgttctatggatggcaatggtaagtatttttctccattttatttattttttaacaatggtgatttcttcatttgatatggtgatatactttagtgctttgtgcctgcaaatttcaagacaccttcgttcaagttctttcttcaaagagtcatcagaataacatggattgaagagacttccgaacacttgctatctcttgctgctgctgtttcatggaaggagatattaaacatttgtttaatttttatttaagtgttatacctatttcagcaaataaaatatttcattgcttatattaatccttattttttcaatttcaatatgatcacttacagtttccatcataatttttttttgcaacatagccatttcttttttaaattcattttgtgcaccagtaagtagattatcatgattcttctccaactcttccatactctaaaaacacaaaagacaagttaagttacaaaggaccacttttcatctcaggttctaaacttgtacaattaattttcaaaagtagtaatttttgaatattcaaatgctcatctatttgaaataaaaatattctaagtaatacatgaataccaaaatacctact

SEQ ID NO: 4379 - DNA, 1955 bp, Homo sapiens
ccgaggccccgccccacccgcgagccgcagccgcggccccacagcttctggggctggggccccggcagccgggcaggccggcctgacctcgacctccgccgtgcgggcccgaccggtgagtccagcccggcagtcgcaggacccggccgccagcctctccctccacctctccctgcccccagcgccaggcgcgggctgcgctcggtggcggcggcggggccctcaggcggccatggcggcaggcgccggggccgggtccgcgccgcgctggctgagggcgctgagcgagccgctgagcgcggcgcagctgcggcgactggaggagcaccgctacagcgcggcgggcgtctcgctgctcgagccgccgctgcagctctactggacctggctgctccagtggatcccgctctggatggcccccaactccatcaccctgctggggctcgccgtcaacgtggtcaccacgctcgtgctcatctcctactgtcccacggccaccgaagaggcaccatactggacataccttttatgtgcactgggactttttatttaccagtcactggatgctattgatgggaaacaagccagaagaacaaactcttgttcccctttaggggagctctttgaccatggctgtgactctctttccacaggaacttatcctgactggtttttttyctgctcttttattgggatgtttgtgttttattgcgctcattggcagacttatagtggatgtaactgaaattcagatagctttagtgattgtctttgtgttgtctgcatttggaggagcaacaatgtgggactatacgattcctattctagaaataaaattgaagatccttccagttcttggatttctaggtggagtaatattttcctgttcaaattatttccatgttatcctccatggtggtgttggcaagaatggatccactatagcaggcaccagtgtcttgtcacctggactccacataggactaattattatactggcaataatgatctataaaaagtcagcaactgatgtgtttgaaaagcatccttgtctttatatcctaatgtttggatgtgtctttgctaaagtctcacaaaaattagtgatttcttcatttgatatggtgatatactttagtgctttgtgcctgcaaatttcaagacaccttcatctaaatatattcaagactgcatgtcatcaagcacctgaacaggttcaagttctttcttcaaagagtcatcagaataacatggattgaagagacttccgaacacttgctatctcttgctgctgctgtttcatggaaggagatattaaacatttgtttaatttttatttaagtgttatacctatttcagcaaataaaatatttcattgcttatattaatccttattttttcaatttcaatatgatcacttacagtttccatcataatttttttttgcaacatagccatttcttttttaaattcattttgtgcaccagtaagtagattatcatgattcttctccaactcttccatactctaaaaacacaaaagacaagttaagttacaaaggaccacttttcatctcaggttctaaacttgtacaattaattttcaaaagtagtaatttttgaatattcaaatgctcatctatttgaaataaaaatattctaagtaatacatgaataccaaaatacctactaaaaaagaaaaaatataagacatgaataaaatgttataggaagtacaatgtagtatactttgcccacaatgggtttcctgaactgttaaggtcaagataaaaaagactggaagtcccacatcagtaaaaaccatttctattaagctttccaaatatcaagcaataatctacttatgactaatagtgtgccatgaattcactagagggaataaaataatctatagtacaacctctttcacattatgaaaaataaaaattatgtctt

SEQ ID NO: 4380 - DNA, 964 bp, Homo sapiens
gagcttggggaagggtgargcctgcccgccgcgaagagggggtgatctcggcgacccccggcggcatgttcgaggctgctccgggagcccagccgcccgggagcgccccaccggcggggaacgggtcggagctgcagtgggacgcgggggcggtgggatacggggggtctcgacacctctctgggccgtaatcgccttcgcttctccccggcaggaagcgcgcccccggggccggtcccggagggctcgatccgcatctacagcatgaggttctgcccgtttgctgagaggacgcgtctagtcctgaaggccaagggaatcaggcatgaagtcatcaatatcaacctgaaaaataagcctgagtggttctttaagaaaaatccctttggtctggtgccagttctggaaaacagtcagggtcagctgatctacgagtctgccatcacctgtgagtacctggatgaagcatacccagggaagaagctgttgccggatgacccctatgagaaagcttgccagaagatgatcttagagttgttttctaaggtgccatccttggtaggaagctttattagaagccaaaataaagaagactatgmtggcctaaaagargaatttcgtaaagaatttaccaagctagaggaggttctgactaataagaagacgaccttctttggtggcaattctatctctatgattgattacctcatctggccctggtttgaacggctggaagcaatgaagttaaatgagtgtgtagaccacactccaaaactgaaactgtggatggcagccatgaagraagatcccacagtytcagccctgcttamtagtgagaaagactggcaaggtttcctagagctctacttacagaacagccctgaggcctgtgactatgggctytgaarggggcaggagtcagcaataaagctatgtctgatattttccttcactaatatgaata

SEQ ID NO: 4381 - DNA, 971 bp, Homo sapiens
tttaaggratcaaacttgacttgtaaagccaataaaagccacttggagaattggcctcagatcttgtctgcaactgtccctgtaaaggtgaggaaactgaaacacactgagctgaacaggagcctttggagagaacgctctggaccggtgagtgagccatgaggtcgggccacaggctctgaagtcgtgaagccttgggacggagcgggtggtgcttcgaggaagcgcgcccccggggccggtcccggagggctcgatccgcatctacagcatgaggttctgcccgtttgctgagaggacgcgtctagtcctgaaggccaagggaatcaggcatgaagtcatcaatatcaacctgaaaaataagcctgagtggttctttaagaaaaatccctttggtctggtgccagttctggaaaacagtcagggtcagctgatctacgagtctgccatcacctgtgagtacctggatgaagcatacccagggaagaagctgttgccggatgacccctatgagaaagcttgccagaagatgatcttagagttgttttctaaggtgccatccttggtaggaagctttattagaagccaaaataaagaagactatgmtggcctaaaagargaatttcgtaaagaatttaccaagctagaggaggttctgactaataagaagacgaccttctttggtggcaattctatctctatgattgattacctcatctggccctggtttgaacggctggaagcaatgaagttaaatgagtgtgtagaccacactccaaaactgaaactgtggatggcagccatgaagraagatcccacagtytcagccctgcttamtagtgagaaagactggcaaggtttcctagagctctacttacagaacagccctgaggcctgtgactatgggctytgaarggggcaggagtcagcaataaagctatgtctgatattttccttcactaatatgaata

SEQ ID NO: 4382 - DNA, 1399 bp, Homo sapiens
atttccttggggaggtgtgtggcctttgatctttgtagctatttagcaacaaaatgggaggcagtgttgcctgactcagtttccaagcttgactcttccctttggcatagtgagtttggagtcaagagatttttattttcccttcacaagctgaacaggagcctttggagagaacgctctggaccggtgagtgagccatgaggtcgggccacaggctctgaagtcgtgaagccttgggacggagcgggtggtgcttcgaggtcagtgtcacgggagggaggtcagggtcagggtcrgacgtggagccccgtggagtgcggagtggtgaccccttcgttcgggggcggagggatgactgagcatttataacttytgtgtatctccccgtgggtgcarcccttggccagcgwgatgctttgacacagccccttaagatgttttaagggctatcccataaagccgggaaggcacaacgggtggagctggcggccgccgggggcaggcacttttgagctaaggaggaagcgggggagggaaggagggcgggaaggacgcgccacctacttcctgaatcccctgcaaaccccagaggagctcggcctgcgctgcgccacgatgtccggggagtcagccaggagcttggggaagggaagcgcgcccccggggccggtcccggagggctcgatccgcatctacagcatgaggttctgcccgtttgctgagaggacgcgtctagtcctgaaggccaagggaatcaggcatgaagtcatcaatatcaacctgaaaaataagcctgagtggttctttaagaaaaatccctttggtctggtgccagttctggaaaacagtcagggtcagctgatctacgagtctgccatcacctgtgagtacctggatgaagcatacccagggaagaagctgttgccggatgacccctatgagaaagcttgccagaagatgatcttagagttgttttctaaggtgccatccttggtaggaagctttattagaagccaaaataaagaagactatgmtggcctaaaagargaatttcgtaaagaatttaccaagctagaggaggttctgactaataagaagacgaccttctttggtggcaattctatctctatgattgattacctcatctggccctggtttgaacggctggaagcaatgaagttaaatgagtgtgtagaccacactccaaaactgaaactgtggatggcagccatgaagraagatcccacagtytcagccctgcttamtagtgagaaagactggcaaggtttcctagagctctacttacagaacagccctgaggcctgtgactatgggctytgaarggggcaggagtcagcaataaagctatgtctgatattttccttcactaatatgaata

SEQ ID NO: 4383 - DNA, 1093 bp, Homo sapiens
aggaagcggtcaaattgcatttttctccagcgagaggaaggatgactcctagacctgtctttgtcccatacttgggaagataagctgttagtttacattgccaagatgaaattcaactgatctgttttagagtaaagatcttgcgggccaacaaggaatttccttggggaggtgtgtggcctttgatctttgtagctatttagcaacaaaatgggaggcagtgttgcctgactcagtttccaagcttgactcttccctttggcatagtgagtttggagtcaagagatttttattttcccttcacaagctgaacaggagcctttggagagaacgctctggaccggaagcgcgcccccggggccggtcccggagggctcgatccgcatctacagcatgaggttctgcccgtttgctgagaggacgcgtctagtcctgaaggccaagggaatcaggcatgaagtcatcaatatcaacctgaaaaataagcctgagtggttctttaagaaaaatccctttggtctggtgccagttctggaaaacagtcagggtcagctgatctacgagtctgccatcacctgtgagtacctggatgaagcatacccagggaagaagctgttgccggatgacccctatgagaaagcttgccagaagatgatcttagagttgttttctaaggtgccatccttggtaggaagctttattagaagccaaaataaagaagactatgmtggcctaaaagargaatttcgtaaagaatttaccaagctagaggaggttctgactaataagaagacgaccttctttggtggcaattctatctctatgattgattacctcatctggccctggtttgaacggctggaagcaatgaagttaaatgagtgtgtagaccacactccaaaactgaaactgtggatggcagccatgaagraagatcccacagtytcagccctgcttamtagtgagaaagactggcaaggtttcctagagctctacttacagaacagccctgaggcctgtgactatgggctytgaarggggcaggagtcagcaataaagctatgtctgatattttccttcactaatatgaata

SEQ ID NO: 4384 - DNA, 3441 bp, Homo sapiens
agtttcgctctgctgcccaggctggagtacagtgatgtgatctcctgacgtcaagtgatccattcgcctcggcctcccaaagttctgggattacaagtaatacaaaatacagttaaaataaaatgtcarcctcctggagtgatcggttacagaatgcagcagatatgcctgctaacatggataagcatgccctgaaaaagtatcgtcgagaagcctatcatcgggtgtttgtgaaccgaagtttagcaatggaaaagataaagtgttttggttttgatatggattatacccttgctgtgtacaagtccccagagtatgagtcccttggttttgagcttactgtggagagattagtttctattggctatccccaggagttgctcagctttgcttatgattctacattccctaccaggggacttgtctttgacacactgtatggaaatcttttgaaagtcgatgcctatggaaacctcttggtctgtgcacatggatttaactttataaggggaccagaaactagagaacrgtatccaaataaatttatccagcgagatgatactgaaagattttacattctgaacacactattcaacctaccagagacctacctgttggcctgcctagtagatttttttactaattgtcccagatataccagttgtgaaacaggatttaaagatggggacctcttcatgtcctaccggagtatgttccaggatgtaagagatgctgttgactgggttcattacaagggctcccttaaggaaaagacagttgaaaatcttgagaagtatgtagtcaaagatggaaaactgcctttgcttctgagccggatgaaggaagtagggaaagtatttcttgctaccaacagtgactataaatatacagataaaattatgacttacctgtttgacttcccacatggccccaagcctgggagctcccatcgaccatggcagtcctactttgacttgatcttggtggatgcacggaaaccactcttttttggagaaggcacagtactgcgtcaggtggatactaaaactggcaagctgaaaattggtacctacacagggcccctacagcatggtatcgtctactcaggaggttcttctgatacgatctgtgacctgttgggagccaagggaaaagacattttgtatattggagatcacatttttggggacattttaaaatcaaagaaacggcaagggtggcgaacttttttggtgattcctgaactcgcacaggagctacatgtctggactgacaagagttcacttttcgaagaacttcagagcttggatattttcttggctgaactctacaagcatcttgacagcagtagcaatgagcgtccagacatcagttccatccagagacgtattaagaaagtaactcatgacatggacatgtgctatgggatgatgggaagcctgtttcgcagtggctcccggcagaccctttttgccagtcaagtgatgcgttatgctgacctctatgcagcatctttcatcaacctgctgtattaccctttcagctacctcttcagggctgcccatgtcttgatgcctcatgaatcaacggtggagcacacacacgtagatwtcaatgagatggagtctcctcttgccacccggaaccgcacatcagtggatttcaaagacactgactacaagcggcaccagctgacacggtcaattagtgagattaaacctcccaacctcttcccactggccccccaggaaattacacactgccatgaygaagatgatgatgaagaggaggaggaggaggaagaataaggaggaaaaccaaaaccccaagcacccattaaacaagtcctggcaggactcacaggaacaaacgaggtccctgttagggttctactcgggggagggagggggctccatgaaaggtacgtctgaaaagtttctgaagattttattatcatagatacttgttttggttttgtgtatctgtactctctgcagatggtccaaaattgtaatggagtctgtattagaagaaaataagggtaaaatcaggctgaactgcatgtatatggctccactgtggcttgtgacacktttaaaatcatccgtatgtcagtgtatctggatacacgaggaaaaggaaagagtctcagagtggaacaaagagtgggaagaggtgatctgtaatgttacaaattgtgctattactccaaggtccaacttttccagtgcattacatggtattgtatatcagtggagaaatgtattatttccatgatcaaatgtagtctctgttaaggtcaagttttcttttataagcctttaattcatcctcagtgactctggcaaggctgcttctctatcactggctttgcacagaagwatgctctactwgcgttgctttagggcaggattctattttgagggaaaagacagtatccttattaccttttgtttgtttaatagcacaaatgcttatttgttatccaaaaacaacctccttcttatctgtgataaatctatagaaagaatttagctgcaagtggacaaaggaacaagcccccagaaaagaaagggaagaactgccttcttatactacagaacatgcattagtgtgggctatatagctgtggctcatgctacccaattccagatttctttgtcctctaagagttgattgctgtatattaaaattgaacatcagaggatgggaagagggctctgtaagccagaaccttactaaagtagagggcacaatcagtgtgaataaattcacttcagaatctcaagtcaaggccaggcacggcrgctcacgcctgtaatcccagcactttgggaggccgagacaggcggatcacctgaggtcgggagttcgagaccagccttaccaacatggagaaaccccatctctactaaaaatacaaaattacctgggcgtggtggtgcatgcctgtaatcccatcatctactcaggaggctgaggcaggagaattgcttgaacccaggaggcggaggttgcagtgagccaggattgtgccattgcactccagcctgggcaacaagaacaaaactccatctcaaaaaataaaaatcccaatcccaagtcgaaatcacytcttgttttaaacaagaatgaatcattactgtgtatgttagggtattaaaactgtttcaccagtacagtgaaagttgtttcaacattttaaacaaacagtggttatagactctttctttaaccattgtatattttcttccattcttgtcattggtcaataggggagggtagattagctgctccagaattcaataaagtgtaatatttctaacggtgactttgacctattctgtagtacaactgtaatagctattggtcttcaagtgggtttagatttggtgacatcagtttgatattctcttaaaggaaataaatattcaagaactg

SEQ ID NO: 4385 - DNA, 3509 bp, Homo sapiens
cggggagggcgcgcgtygaggcggctgcggcagttgcgcgctgggattgttgcsgtgcgctggagccgagtttcgctctgctgcccaggctggagtacagtgatgtgatctcctgacgtcaagtgatccattcgcctcggcctcccaaagttctgggattacaagtaatacaaaatacagttaaaataaaatgtcarcctcctggagtgatcggttacagaatgcagcagatatgcctgctaacatggataagcatgccctgaaaaagtatcgtcgagaagcctatcatcgggtgtttgtgaaccgaagtttagcaatggaaaagataaagtgttttggttttgatatggattatacccttgctgtgtacaagtccccagagtatgagtcccttggttttgagcttactgtggagagattagtttctattggctatccccaggagttgctcagctttgcttatgattctacattccctaccaggggacttgtctttgacacactgtatggaaatcttttgaaagtcgatgcctatggaaacctcttggtctgtgcacatggatttaactttataaggggaccagaaactagagaacrgtatccaaataaatttatccagcgagatgatactgaaagattttacattctgaacacactattcaacctaccagagacctacctgttggcctgcctagtagatttttttactaattgtcccagatataccagttgtgaaacaggatttaaagatggggacctcttcatgtcctaccggagtatgttccaggatgtaagagatgctgttgactgggttcattacaagggctcccttaaggaaaagacagttgaaaatcttgagaagtatgtagtcaaagatggaaaactgcctttgcttctgagccggatgaaggaagtagggaaagtatttcttgctaccaacagtgactataaatatacagataaaattatgacttacctgtttgacttcccacatggccccaagcctgggagctcccatcgaccatggcagtcctactttgacttgatcttggtggatgcacggaaaccactcttttttggagaaggcacagtactgcgtcaggtggatactaaaactggcaagctgaaaattggtacctacacagggcccctacagcatggtatcgtctactcaggaggttcttctgatacgatctgtgacctgttgggagccaagggaaaagacattttgtatattggagatcacatttttggggacattttaaaatcaaagaaacggcaagggtggcgaacttttttggtgattcctgaactcgcacaggagctacatgtctggactgacaagagttcacttttcgaagaacttcagagcttggatattttcttggctgaactctacaagcatcttgacagcagtagcaatgagcgtccagacatcagttccatccagagacgtattaagaaagtaactcatgacatggacatgtgctatgggatgatgggaagcctgtttcgcagtggctcccggcagaccctttttgccagtcaagtgatgcgttatgctgacctctatgcagcatctttcatcaacctgctgtattaccctttcagctacctcttcagggctgcccatgtcttgatgcctcatgaatcaacggtggagcacacacacgtagatwtcaatgagatggagtctcctcttgccacccggaaccgcacatcagtggatttcaaagacactgactacaagcggcaccagctgacacggtcaattagtgagattaaacctcccaacctcttcccactggccccccaggaaattacacactgccatgaygaagatgatgatgaagaggaggaggaggaggaagaataaggaggaaaaccaaaaccccaagcacccattaaacaagtcctggcaggactcacaggaacaaacgaggtccctgttagggttctactcgggggagggagggggctccatgaaaggtacgtctgaaaagtttctgaagattttattatcatagatacttgttttggttttgtgtatctgtactctctgcagatggtccaaaattgtaatggagtctgtattagaagaaaataagggtaaaatcaggctgaactgcatgtatatggctccactgtggcttgtgacacktttaaaatcatccgtatgtcagtgtatctggatacacgaggaaaaggaaagagtctcagagtggaacaaagagtgggaagaggtgatctgtaatgttacaaattgtgctattactccaaggtccaacttttccagtgcattacatggtattgtatatcagtggagaaatgtattatttccatgatcaaatgtagtctctgttaaggtcaagttttcttttataagcctttaattcatcctcagtgactctggcaaggctgcttctctatcactggctttgcacagaagwatgctctactwgcgttgctttagggcaggattctattttgagggaaaagacagtatccttattaccttttgtttgtttaatagcacaaatgcttatttgttatccaaaaacaacctccttcttatctgtgataaatctatagaaagaatttagctgcaagtggacaaaggaacaagcccccagaaaagaaagggaagaactgccttcttatactacagaacatgcattagtgtgggctatatagctgtggctcatgctacccaattccagatttctttgtcctctaagagttgattgctgtatattaaaattgaacatcagaggatgggaagagggctctgtaagccagaaccttactaaagtagagggcacaatcagtgtgaataaattcacttcagaatctcaagtcaaggccaggcacggcrgctcacgcctgtaatcccagcactttgggaggccgagacaggcggatcacctgaggtcgggagttcgagaccagccttaccaacatggagaaaccccatctctactaaaaatacaaaattacctgggcgtggtggtgcatgcctgtaatcccatcatctactcaggaggctgaggcaggagaattgcttgaacccaggaggcggaggttgcagtgagccaggattgtgccattgcactccagcctgggcaacaagaacaaaactccatctcaaaaaataaaaatcccaatcccaagtcgaaatcacytcttgttttaaacaagaatgaatcattactgtgtatgttagggtattaaaactgtttcaccagtacagtgaaagttgtttcaacattttaaacaaacagtggttatagactctttctttaaccattgtatattttcttccattcttgtcattggtcaataggggagggtagattagctgctccagaattcaataaagtgtaatatttctaacggtgactttgacctattctgtagtacaactgtaatagctattggtcttcaagtgggtttagatttggtgacatcagtttgatattctcttaaaggaaataaatattcaagaactg

SEQ ID NO: 4386 - DNA, 3406 bp, Homo sapiens
agggcgcgcgtygaggcggctgcggcagttgcgcgctgggattgttgcsgtgcgctggagccgaatacaaaatacagttaaaataaaatgtcarcctcctggagtgatcggttacagaatgcagcagatatgcctgctaacatggataagcatgccctgaaaaagtatcgtcgagaagcctatcatcgggtgtttgtgaaccgaagtttagcaatggaaaagataaagtgttttggttttgatatggattatacccttgctgtgtacaagtccccagagtatgagtcccttggttttgagcttactgtggagagattagtttctattggctatccccaggagttgctcagctttgcttatgattctacattccctaccaggggacttgtctttgacacactgtatggaaatcttttgaaagtcgatgcctatggaaacctcttggtctgtgcacatggatttaactttataaggggaccagaaactagagaacrgtatccaaataaatttatccagcgagatgatactgaaagattttacattctgaacacactattcaacctaccagagacctacctgttggcctgcctagtagatttttttactaattgtcccagatataccagttgtgaaacaggatttaaagatggggacctcttcatgtcctaccggagtatgttccaggatgtaagagatgctgttgactgggttcattacaagggctcccttaaggaaaagacagttgaaaatcttgagaagtatgtagtcaaagatggaaaactgcctttgcttctgagccggatgaaggaagtagggaaagtatttcttgctaccaacagtgactataaatatacagataaaattatgacttacctgtttgacttcccacatggccccaagcctgggagctcccatcgaccatggcagtcctactttgacttgatcttggtggatgcacggaaaccactcttttttggagaaggcacagtactgcgtcaggtggatactaaaactggcaagctgaaaattggtacctacacagggcccctacagcatggtatcgtctactcaggaggttcttctgatacgatctgtgacctgttgggagccaagggaaaagacattttgtatattggagatcacatttttggggacattttaaaatcaaagaaacggcaagggtggcgaacttttttggtgattcctgaactcgcacaggagctacatgtctggactgacaagagttcacttttcgaagaacttcagagcttggatattttcttggctgaactctacaagcatcttgacagcagtagcaatgagcgtccagacatcagttccatccagagacgtattaagaaagtaactcatgacatggacatgtgctatgggatgatgggaagcctgtttcgcagtggctcccggcagaccctttttgccagtcaagtgatgcgttatgctgacctctatgcagcatctttcatcaacctgctgtattaccctttcagctacctcttcagggctgcccatgtcttgatgcctcatgaatcaacggtggagcacacacacgtagatwtcaatgagatggagtctcctcttgccacccggaaccgcacatcagtggatttcaaagacactgactacaagcggcaccagctgacacggtcaattagtgagattaaacctcccaacctcttcccactggccccccaggaaattacacactgccatgaygaagatgatgatgaagaggaggaggaggaggaagaataaggaggaaaaccaaaaccccaagcacccattaaacaagtcctggcaggactcacaggaacaaacgaggtccctgttagggttctactcgggggagggagggggctccatgaaaggtacgtctgaaaagtttctgaagattttattatcatagatacttgttttggttttgtgtatctgtactctctgcagatggtccaaaattgtaatggagtctgtattagaagaaaataagggtaaaatcaggctgaactgcatgtatatggctccactgtggcttgtgacacktttaaaatcatccgtatgtcagtgtatctggatacacgaggaaaaggaaagagtctcagagtggaacaaagagtgggaagaggtgatctgtaatgttacaaattgtgctattactccaaggtccaacttttccagtgcattacatggtattgtatatcagtggagaaatgtattatttccatgatcaaatgtagtctctgttaaggtcaagttttcttttataagcctttaattcatcctcagtgactctggcaaggctgcttctctatcactggctttgcacagaagwatgctctactwgcgttgctttagggcaggattctattttgagggaaaagacagtatccttattaccttttgtttgtttaatagcacaaatgcttatttgttatccaaaaacaacctccttcttatctgtgataaatctatagaaagaatttagctgcaagtggacaaaggaacaagcccccagaaaagaaagggaagaactgccttcttatactacagaacatgcattagtgtgggctatatagctgtggctcatgctacccaattccagatttctttgtcctctaagagttgattgctgtatattaaaattgaacatcagaggatgggaagagggctctgtaagccagaaccttactaaagtagagggcacaatcagtgtgaataaattcacttcagaatctcaagtcaaggccaggcacggcrgctcacgcctgtaatcccagcactttgggaggccgagacaggcggatcacctgaggtcgggagttcgagaccagccttaccaacatggagaaaccccatctctactaaaaatacaaaattacctgggcgtggtggtgcatgcctgtaatcccatcatctactcaggaggctgaggcaggagaattgcttgaacccaggaggcggaggttgcagtgagccaggattgtgccattgcactccagcctgggcaacaagaacaaaactccatctcaaaaaataaaaatcccaatcccaagtcgaaatcacytcttgttttaaacaagaatgaatcattactgtgtatgttagggtattaaaactgtttcaccagtacagtgaaagttgtttcaacattttaaacaaacagtggttatagactctttctttaaccattgtatattttcttccattcttgtcattggtcaataggggagggtagattagctgctccagaattcaataaagtgtaatatttctaacggtgactttgacctattctgtagtacaactgtaatagctattggtcttcaagtgggtttagatttggtgacatcagtttgatattctcttaaaggaaataaatattcaagaactg

SEQ ID NO: 4387 - DNA, 2030 bp, Homo sapiens
aacagcgttgttttttgcatgttttgcacttagccagaggaagtctggcgcatccgagccggccagccgagcacatctggaagtggtttctggggccgcccctctctgccagckcaactcctgggttcccagcggcttcgcgcagaggtggaagaaacccgagacgttccgaagtcaacgcaagcaaaggggagtgcgggtcggggaggaatattcttttggaaacgtaatattggccttggggctctccagccctttgggacttccaatgggatcttagaagcagccgaagcagcgtgagggcggcagcccagggccagccacgatttgaacgctctgccttgcagctcttctggaccgaggagcccaaagccctaccctcaccattcaccaggtcctgtgggaagagcagcgtggaggtgggctgaggttagaaggtgcagagcgtggaagaagattgtgagctgagtattggacatctgttcttgaatagtccctgggcctgccataggaaaggaagttctccagggttacagttcttatccgcgtgaatacacrtggctctgttacgaaaaattaatcaggtgctgctgttccttctgatcgtgaccctctgtgtgattctgtataagaaagttcataaggggactgtgcccaagaatgacgcagatgatgaatccgagactcctgaagaactggaagaagagattcctgtggtgatttgtgctgcagcagggaggatgggtgccactatggctgccatcaatagcatctacagcaacactgacgccaacatcttgttctatgtagtgggactccggaatactctgactcgaatacgaaaatggattgaacattccaaactgagagaaataaactttaaaatcgtggaattcaacccgatggtcctcaaagggaagatcagaccagactcatcgaggcctgaattgctccagcctctgaactttgttcgattttatctccctctacttatccaccaacacgagaaagtcatctatttggacgatgatgtaattgtacaaggtgatatccaagaactgtatgacaccaccttggccctgggccacgcggcggctttctcagatgactgcgatttgccctctgctcaggacataaacagactygtgggacttcagaacacatatatgggctatctggactaccggaagaaggccatcaaggaccttggcatcagccccagcacctgctctttcaatcctggtgtgattgttgccaacatgacagaatggaagcaccagcgcatcaccaagcaattggagaaatggatgcaaaagaatgtggaggaaaacctctatagcagctccctgggaggaggggtggccacctccccaatgctgattgtgtttcatgggaaatattccacaattaaccccctgtggcacataaggcacctgggctggaatccagatgccagatattcggagcattttctgcaggaagctaaattactccactggaatggaagacataaaccttgggacttccctagtgttcacaacgacttatgggaaagctggtttgttcctgaccctgcagggatatttaaactcaatcaccatagctgatataactctacccttaaaatattccctgtatagaaatgtggaattgtccctttgtagccaactataacattgttctttatgaatattacctttgatacatatgatccacaatataaaaaccaaaaactactgtgtgcaaattataccttggaccatataggcattgattaacttctttaagtacatgtgataactatggaaatcaagattatgtgactgaaaaacataaaggaagagacccatctagataacagcaatcaacctgcttaattctgaatgacaattatatccacaaatttttaaaacttctacatgtatttttcacatgaagatctccttaacaggttgccaaccttttcttttataaaactattacatttaaaatatggacgtctgaaaaataaaatattcatcatttttatg

SEQ ID NO: 4388 - DNA, 2120 bp, Homo sapiens
cgcgggcagtggagagacgctggggaaggggggtcctgacaggggagccccgcccccaccccaggcgacttggccagcggccacccggagcaacgcaccttagggtggaaggacgcttcccactgaccacgtctcccatccccacccagagcctcccgttcggtattttgggaagaagccacagcatcttcctttacgtccactttaattgagcatmtaggatgtgtgggcgaggcagtctcacaagcaacgtgagagaagctcgggtagagaacagcgttgttttttgcatgttttgcacttagccagaggaagtctggcgcatccgagccggccagccgagcacatctggaagtggtttctggggccgcccctctctgccagckcaactcctgggttcccagcggcttcgcgcagaggtggaagaaacccgagacgttccgaagtcaacgcaagcaaaggggagtgcgggtcggggaggaatattcttttggaaacgtaatattggccttggggctctccagccctttgggacttccaatgggatcttagaagcagccgaagcagcgtgagggcggcagcccagggccagccacgatttgaacgctctgccttgcagctcttctggaccgaggagcccaaagccctaccctcaccattcaccagttaatcaggtgctgctgttccttctgatcgtgaccctctgtgtgattctgtataagaaagttcataaggggactgtgcccaagaatgacgcagatgatgaatccgagactcctgaagaactggaagaagagattcctgtggtgatttgtgctgcagcagggaggatgggtgccactatggctgccatcaatagcatctacagcaacactgacgccaacatcttgttctatgtagtgggactccggaatactctgactcgaatacgaaaatggattgaacattccaaactgagagaaataaactttaaaatcgtggaattcaacccgatggtcctcaaagggaagatcagaccagactcatcgaggcctgaattgctccagcctctgaactttgttcgattttatctccctctacttatccaccaacacgagaaagtcatctatttggacgatgatgtaattgtacaaggtgatatccaagaactgtatgacaccaccttggccctgggccacgcggcggctttctcagatgactgcgatttgccctctgctcaggacataaacagactygtgggacttcagaacacatatatgggctatctggactaccggaagaaggccatcaaggaccttggcatcagccccagcacctgctctttcaatcctggtgtgattgttgccaacatgacagaatggaagcaccagcgcatcaccaagcaattggagaaatggatgcaaaagaatgtggaggaaaacctctatagcagctccctgggaggaggggtggccacctccccaatgctgattgtgtttcatgggaaatattccacaattaaccccctgtggcacataaggcacctgggctggaatccagatgccagatattcggagcattttctgcaggaagctaaattactccactggaatggaagacataaaccttgggacttccctagtgttcacaacgacttatgggaaagctggtttgttcctgaccctgcagggatatttaaactcaatcaccatagctgatataactctacccttaaaatattccctgtatagaaatgtggaattgtccctttgtagccaactataacattgttctttatgaatattacctttgatacatatgatccacaatataaaaaccaaaaactactgtgtgcaaattataccttggaccatataggcattgattaacttctttaagtacatgtgataactatggaaatcaagattatgtgactgaaaaacataaaggaagagacccatctagataacagcaatcaacctgcttaattctgaatgacaattatatccacaaatttttaaaacttctacatgtatttttcacatgaagatctccttaacaggttgccaaccttttcttttataaaactattacatttaaaatatggacgtctgaaaaataaaatattcatcatttttatg

SEQ ID NO: 4389 - DNA, 2302 bp, Homo sapiens
cgcgggcagtggagagacgctggggaaggggggtcctgacaggggagccccgcccccaccccaggcgacttggccagcggccacccggagcaacgcaccttagggtggaaggacgcttcccactgaccacgtctcccatccccacccagagcctcccgttcggtattttgggaagaagccacagcatcttcctttacgtccactttaattgagcatmtaggatgtgtgggcgaggcagtctcacaagcaacgtgagagaagctcgggtagagaacagcgttgttttttgcatgttttgcacttagccagaggaagtctggcgcatccgagccggccagccgagcacatctggaagtggtttctggggccgcccctctctgccagckcaactcctgggttcccagcggcttcgcgcagaggtggaagaaacccgagacgttccgaagtcaacgcaagcaaaggggagtgcgggtcggggaggaatattcttttggaaacgtaatattggccttggggctctccagccctttgggacttccaatgggatcttagaagcagccgaagcagcgtgagggcggcagcccagggccagccacgatttgaacgctctgccttgcagctcttctggaccgaggagcccaaagccctaccctcaccattcaccaggtcctgtgggaagagcagcgtggaggtgggctgaggttagaaggtgcagagcgtggaagaagattgtgagctgagtattggacatctgttcttgaatagtccctgggcctgccataggaaaggaagttctccagggttacagttcttatccgcgtgaatacacrtggctctgttacgaaaaattaatcaggtgctgctgttccttctgatcgtgaccctctgtgtgattctgtataagaaagttcataaggggactgtgcccaagaatgacgcagatgatgaatccgagactcctgaagaactggaagaagagattcctgtggtgatttgtgctgcagcagggaggatgggtgccactatggctgccatcaatagcatctacagcaacactgacgccaacatcttgttctatgtagtgggactccggaatactctgactcgaatacgaaaatggattgaacattccaaactgagagaaataaactttaaaatcgtggaattcaacccgatggtcctcaaagggaagatcagaccagactcatcgaggcctgaattgctccagcctctgaactttgttcgattttatctccctctacttatccaccaacacgagaaagtcatctatttggacgatgatgtaattgtacaaggtgatatccaagaactgtatgacaccaccttggccctgggccacgcggcggctttctcagatgactgcgatttgccctctgctcaggacataaacagactygtgggacttcagaacacatatatgggctatctggactaccggaagaaggccatcaaggaccttggcatcagccccagcacctgctctttcaatcctggtgtgattgttgccaacatgacagaatggaagcaccagcgcatcaccaagcaattggagaaatggatgcaaaagaatgtggaggaaaacctctatagcagctccctgggaggaggggtggccacctccccaatgctgattgtgtttcatgggaaatattccacaattaaccccctgtggcacataaggcacctgggctggaatccagatgccagatattcggagcattttctgcaggaagctaaattactccactggaatggaagacataaaccttgggacttccctagtgttcacaacgacttatgggaaagctggtttgttcctgaccctgcagggatatttaaactcaatcaccatagctgatataactctacccttaaaatattccctgtatagaaatgtggaattgtccctttgtagccaactataacattgttctttatgaatattacctttgatacatatgatccacaatataaaaaccaaaaactactgtgtgcaaattataccttggaccatataggcattgattaacttctttaagtacatgtgataactatggaaatcaagattatgtgactgaaaaacataaaggaagagacccatctagataacagcaatcaacctgcttaattctgaatgacaattatatccacaaatttttaaaacttctacatgtatttttcacatgaagatctccttaacaggttgccaaccttttcttttataaaactattacatttaaaatatggacgtctgaaaaataaaatattcatcatttttatg

SEQ ID NO: 4390 - DNA, 2476 bp, Homo sapiens
gcggccgccgcggctgcggccgtggcaaagaaacaggctgcgggcggcaggaagggctgctggggctgcggctggggctgctggccggcgccgccgctctccatcttggcagagctttccatgcgcagcggcggccaaggagtcgcggaatcagagcgatccgggacgcgagtgcgaggttaaaacyttcagccccmcgtgctgtttgcaaacctgcctgtacctgaggccctaaaaagccagagacctcactcccggggagccagcakrtccactgcggtcctggaaaacccaggsttgggcaggaaactcyctgactttggaywggaaamaagctatattgaagacaactgcaatcaaaatggtgccatatcactgatcttstyayycawagaagaagttggtgcattggccaaagtattgcgcttatttgaggagaatgatgtaaacctgacccacattgaatctagacctyctcrtttaaagaaagatgvgtakraatttttcmcccatttgkataaacgtmgmctgyctgctctgayaaacakcwtcaagatctygaggcrtgacaytggtgmcactgtccatgagctttcacgagataagaagaaagacacagtgccctggttcccaagaaccattcaagagctggacagatttgycaatcagattctcagytatggagcggaactggatgctgaccaccctggttttaaagatcctgtgtaccgtgcaagacggaagcagtttgctgacattgcctacaactaccgccatgggcagcccatccctcgagtggaatacatggaggaagaaaagaaaacayrsggcacagygttcaagactcygaagtccttgtataaaaccyrtgcttrytrkgmgkasrrtcacatttttmcacytcytgaaaagtaskgtgkcttccatgragdtaacattccccagctggaagacrttyytyarttmctgcagacttgcmctrbtkycydcytcygacctgtrgctggcctgywttcctctbrggatwtckygggtddcctgrycttcyvagtcttscwckrcacacagyacatcagacatggatccragyscrtkkrtrhccccraayytracwwctgcyatgagctgttgggacatgtgcccttgttttcagatyrcagctttkyccagtttbcccrggaarttggcsttgcctctctgggtgcacctgatgaatacattgaaaasctyrscacaatttrstrgttkrctgtggastttgggctctgcaaacaagkakactccatawvgvcatatggtgctgggctcstgyyawcctttbgtgaattayagyavkgcttatsakagaagmcaaagcttctccccctggagctggagargwcarccatccaaaattrcwctgtcayggagttccagcccctstrtyacgtggcagagagttttaatsmtsscaaggagaaagtaaggaactttgytgccacaayayytcggcccttctcagttcgctryracccakacmcccaaaggattraggtctyggacaatacccagcagcttaagattttggctgattccattaacygtgaaattggaatcctttgcagtgccctccagaaaataaagtaaagccatggacagaatgtggtctgtcagctgtgaatctgttgatggagatccaactatttctttcatcagaaaaagtccgaaaagcaaaccttaatttgaaataacagcyttaaatcctttacaagatggagaaacaacaaataagtcaaaataatctgaaatgacaggatatgagtacatactcaaragcataatggtaaatcttttggggtcatctttgatttagagatgataatcccatactctcaattgagttaaatcagtaatctgtcgcatttcatcaagattaattaaaatttgggacctgcttcattcaagcttcatatatgctttgcagagaactcataaaggagcatataaggctaaatgtaaaacacaagactgtcattagaattgaattattgggcttaatataaatcgtaacctatgaagtttattttctattttagttaactatgattccaattactactttgttattgtacctaagtaaattttctttargtcagaagcccattaaaatagttacaagcattgaacttctttagtattatattaatataaaaacatttttgtatgttttattgtaatcataaatactgctgtataaggtaataaaactctgcacctaatccccataacttccagtatcattttccaattaattatcaagtctgttttgggaaacactttgaggacatttatgatgcagcagatgttgactaaaggcttggttggtagatattcaggaaatgttcactgaataaataagtaaatacattattgaaaagcaaatctgtataaatgtgaaatttttatttgtattagtaataaaacattagtagtttaa

SEQ ID NO: 4391 - DNA, 2192 bp, Homo sapiens
gcggccgccgcggctgcggccgtggcaaagaaacaggctgcgggcggcaggaagggctgctggggctgcggctggggctgctggccggcgccgccgctctccatcttggcagagctttccatgcgcagcggcggccaaggagtcgcggaatcagagcgatccgggacgcgagtgcgaggttaaaacyttcagccccmcgtgctgtttgcaaacctgcctgtacctgaggccctaaaaagccagagacctcactcccggggagccagcakrtccactgcggtcctggaaaacccaggsttgggcaggaaactcyctgactttggaywggaaamaagctatattgaagacaactgcaatcaaaatggtgccatatcactgatcttstyayycawagaagaagttggtgcattggccaaagtattgcgcttatttgaggagaatgatgtaaacctgacccacattgaatctagacctyctcrtttaaagaaagatgvgtakraatttttcmcccatttgkataaacgtmgmctgyctgctctgayaaacakcwtcaagatctygaggcrtgacaytggtgmcactgtccatgagctttcacgagataagaagaaagacacagtgccctggttcccaagaaccattcaagagctggacagatttgycaatcagattctcagytatggagcggaactggatgctgaccaccctggttttaaagatcctgtgtaccgtgcaagacggaagcagtttgctgacattgcctacaactaccgccatgggcagcccatccctcgagtggaatacatggaggaagaaaagaaaacayrsggcacagygttcaagactcygaagtccttgtataaaaccyrtgcttrytrkgmgkasrrtcacatttttmcacytcytgaaaagtaskgtgkcttccatgragdtaacattccccagctggaagacrttyytyarttmctgcagacttgcmctrbtkycydcytcygacctgtrgctggcctgywttcctctbrggatwtckygggtddcctgrycttcyvagtcttscwckrcacacagyacatcagacatggatccragyscrtkkrtrhccccraayytracwwctgcyatgagctgttgggacatgtgcccttgttttcagatyrcagctttkyccagtttbcccrggaarttggcsttgcctctctgggtgcacctgatgaatacattgaaaasctyrscacaatttrstrgttkrctgtggastttgggctctgcaaacaagkakactccatawvgvcatatggtgctgggctcstgyyawcctttbgtgaattayagyavkgcttatsakagaagmcaaagcttctccccctggagctggagargwcarccatccaaaattrcwctgtcayggagttccagcccctstrtyacgtggcagagagttttaatsmtsscaaggagaaagtaaggaactttgytgccacaayayytcggcccttctcagttcgctryracccakacmcccaaaggattraggtctyggacaatacccagcagcttaagattttggctgattccattaacygtgaaattggaatcctttgcagtgccctccagaaaataaagtaaagccatggacagaatgtggtctgtcagctgtgaatctgttgatggagatccaactatttctttcatcagaaaaagtccgaaaagcaaaccttaatttgaaataacagcyttaaatcctttacaagatggagaaacaacaaataagtcaaaataatctgaaatgacaggatatgagtacatactcaaragcataatggtaaatcttttggggtcatctttgatttagagatgataatcccatactctcaattgagttaaatcagtaatctgtcgcatttcatcaagattaattaaaatttgggacctgcttcattcaagcttcatatatgctttgcagagaactcataaaggagcatataaggctaaatgtaaaacacaagactgtcattagaattgaattattgggcttaatataaatcgtaacctatgaagtttattttctattttagttaactatgattccaattactactttgttattgtacctaagtaaattttctttargtcagaagcccaatttttgtatgttttattgtaatcataaatactgctgtataaggtaataa

SEQ ID NO: 4392 - DNA, 2682 bp, Homo sapiens
cagctgggggtaaggggggcggattattcatataattgttataccagacggtcgcaggcttagtccaattgcagagaactcgcttcccaggcttctgagagtcccggaagtgcctaaacctgtctaatcgacggggcttgggtggcccgtcgctcccyggcttcttccctttacccagggcgggcagcgaagtggtgcctcctgcgtcccccacaccctccctcagyccctcccctccggcccgtcctgggcaggtgacctggagcatccggcaggctgccctggcctcctgcgtcaggacaacgcccacgaggggcgttactgtgyggagatgcaccacgcaagagacaccctttgtaactctcttctcctccctagtgcgaggttaaaacyttcagccccmcgtgctgtttgcaaacctgcctgtacctgaggccctaaaaagccagagacctcactcccggggagccagcakrtccactgcggtcctggaaaacccaggsttgggcaggaaactcyctgactttggaywggaaamaagctatattgaagacaactgcaatcaaaatggtgccatatcactgatcttstyayycawagaagaagttggtgcattggccaaagtattgcgcttatttgaggagaatgatgtaaacctgacccacattgaatctagacctyctcrtttaaagaaagatgvgtakraatttttcmcccatttgkataaacgtmgmctgyctgctctgayaaacakcwtcaagatctygaggcrtgacaytggtgmcactgtccatgagctttcacgagataagaagaaagacacagtgccctggttcccaagaaccattcaagagctggacagatttgycaatcagattctcagytatggagcggaactggatgctgaccaccctggttttaaagatcctgtgtaccgtgcaagacggaagcagtttgctgacattgcctacaactaccgccatgggcagcccatccctcgagtggaatacatggaggaagaaaagaaaacayrsggcacagygttcaagactcygaagtccttgtataaaaccyrtgcttrytrkgmgkasrrtcacatttttmcacytcytgaaaagtaskgtgkcttccatgragdtaacattccccagctggaagacrttyytyarttmctgcagacttgcmctrbtkycydcytcygacctgtrgctggcctgywttcctctbrggatwtckygggtddcctgrycttcyvagtcttscwckrcacacagyacatcagacatggatccragyscrtkkrtrhccccraayytracwwctgcyatgagctgttgggacatgtgcccttgttttcagatyrcagctttkyccagtttbcccrggaarttggcsttgcctctctgggtgcacctgatgaatacattgaaaasctyrscacaatttrstrgttkrctgtggastttgggctctgcaaacaagkakactccatawvgvcatatggtgctgggctcstgyyawcctttbgtgaattayagyavkgcttatsakagaagmcaaagcttctccccctggagctggagargwcarccatccaaaattrcwctgtcayggagttccagcccctstrtyacgtggcagagagttttaatsmtsscaaggagaaagtaaggaactttgytgccacaayayytcggcccttctcagttcgctryracccakacmcccaaaggattraggtctyggacaatacccagcagcttaagattttggctgattccattaacygtgaaattggaatcctttgcagtgccctccagaaaataaagtaaagccatggacagaatgtggtctgtcagctgtgaatctgttgatggagatccaactatttctttcatcagaaaaagtccgaaaagcaaaccttaatttgaaataacagcyttaaatcctttacaagatggagaaacaacaaataagtcaaaataatctgaaatgacaggatatgagtacatactcaaragcataatggtaaatcttttggggtcatctttgatttagagatgataatcccatactctcaattgagttaaatcagtaatctgtcgcatttcatcaagattaattaaaatttgggacctgcttcattcaagcttcatatatgctttgcagagaactcataaaggagcatataaggctaaatgtaaaacacaagactgtcattagaattgaattattgggcttaatataaatcgtaacctatgaagtttattttctattttagttaactatgattccaattactactttgttattgtacctaagtaaattttctttargtcagaagcccattaaaatagttacaagcattgaacttctttagtattatattaatataaaaacatttttgtatgttttattgtaatcataaatactgctgtataaggtaataaaactctgcacctaatccccataacttccagtatcattttccaattaattatcaagtctgttttgggaaacactttgaggacatttatgatgcagcagatgttgactaaaggcttggttggtagatattcaggaaatgttcactgaataaataagtaaatacattattgaaaagcaaatctgtataaatgtgaaatttttatttgtattagtaataaaacattagtagtttaa

SEQ ID NO: 4393 - DNA, 3813 bp, Homo sapiens
cccctcccttcttgtaagagagtgctaggcacatagcctcctcctattcctaatcctcccaccaaagaaagaggcacagagttcattacttagtgggggccagctgtgatcggccaactgccagctgccttaaaaaggaagaccagtgatgctaggatggagtgaaacccaagaggaagtgccatcatgaggaatcaatgagagatctgtgaagagagagggctgggtgggagcccagaaggatagaacctggaagatcaatatctcccgtgagggaaataacaatggagccaggttctaagtcagtgtctaggtcagactggcaacctgaaccacaccagaggcctataaccccgctagagcctgggccagaaaagacacccatagcccagccagaatcgaagactctgcagggatccaatacccaacagaagcctgcttcaaaccaaagacccctcacccagcaggagacccctgcacaacatgatgctgaatcccagaaggaacctagagcccaacaaaaatctgcttcacaagaggaatttcttgccccacagaagcccgcaccacagcaatcacctyacatccaaagggtgctgctcactcaacaggaagctgcctcccagcagggacctgggctaggaaaagaatctataactcaacaggagccagcattgagacaaagacatgtagcccagccagggcctgggccaggagagccacctccagctcaacaagaagctgaatcaacacctgcggcccaggctaaacctggagccaaaagggagccatctgccccgactgaatctacgwcccaagagacacctgaacagtcagacaagcaaacaacgccagtccagggagccaaatccaagcagggatctttgacagagctgggatttctaacaaaacttcaggaactatccatacagcdatcagccctagagtggaaggcactttctgagtgggtcacagattctgagtcagaatcagatgtgggatcatcttcagacacagattctccagccacgatgggtggaatggtggcccagggagtgaagctaggcttcaaaggaaaatctggttataaagtgatgtcaggatacagtgggacgtcgccacatgagaaaaccagtgctcggaatcacagacactaccaggatacagcctcaaggctcatccacaacatggacctgcgcacaatgacacagtcgctggtgactctggcggaggacaacatagccttcttctcgagccagggtcctggggaaacggcccagcggctgtcaggcgtttttgccggtgtacgggagcaggcgctggggctggagccggccctgggccgcctgctgggtgtggcgcacctctttgacctggacccagagacaccggccaacgggtaccgcagcctagtgcacacagcccgctgctgcctggcgcacctcctgcacaaatcccgctatgtggcctccaaccgccgcagcatcttcttccgcaccagccacaacctggccgagctggaggcctacctggctgccctcacccagctccgygctctggtctactacgcccagcgcctgctggttaccaatcggccgggggtactcttctttgagggcgacgaggggctcaccgccgacttcctccgggagtatgtcacgctgcataagggatgcttctatggccgctgcctgggcttccagttcacgcctgccatccggccattcctgcagaccatctccattgggctggtgtccttcggggagcactacaaacgcmacgagacaggcctcagtgtggccgccagctctctcttcaccagcggccgctttgccatcgaccccgagctgcgtggggctgagtttgagcggatcacacagaacctggacgtgcacttctggaaagccttctggaacatcaccgagatggaagtgctatcgtctctggccaacatggcatcrgccaccgtgagggtaagccgcctgctcagcctgccacccgaagcctttgagatgccactgactgccgaccccacgctcacggtcaccatctcacccccactggcccacacaggccctgggcccgtcctcgtcaggctcatctcctatgacctgygtgaaggacaggacagtgaggagctcagcagcctgataaagtccaacggccaacggagcctggagctgtggccrcgcccccagcaggcaccccgctcgcggtccctgatagtgcacttccacggcggtggctttgtggcccagacctccagatcccacgagccctacctcaagagctgggcccaggagctgggcgcccccatcatctccatcgactactccctggcccctgaggcccccttcccccgtgcgctggaggagtgcttcttcgcctactgctgggccatcaagcactgcgccctccttggctcaacaggggaacgaatctgccttgcgggggacagtgcaggcgggaacctctgcttcaccgtggctcttcgggcagcagcctacggggtgcgggtgccagatggcatcatggcagcctacccrgccacaatgctgcagcctgccgcctctccctcccgcctgctgagcctcatggaccccttgctgcccctcagtgtgctctccaagtgtgtcagcgcctatgctggtgcaaagacggaggaccactccaactcagaccagaaagccctcggcatgatggggctggtgcggcgggacacagccctgctcctccgagacttccgcctgggtgcctcctcatggctcaactccttcctggagttaagtgggcgcaagtcccagaagatgtcggagcccatagcagagccgatgcgccgcagtgtgtctgaagcagcactggcccagccccagggcccactgggcacggattccctcaagaacctgaccctgagggacttgagcctgaggggaaactccgagacgtcgtcggacacccccgagatgtcgctgtcagctgagacacttagcccctccacaccctccgatgtcaacttcttattaccacctgaggatgcaggggaagaggctgaggccaaaaatgagctgagccccatggacagaggcctgggcgtcmgtgccgccttccccgagggtttccacccccgacgctccagccagggtgccacacagatgcccctctactcctcacccatagtcaagaaccccttcatgtcgccgctgctggcacccgacagcatgctcaagagcctgccacctgtgcacatcgtggcgtgcgcgctggaccccatgctggacgactcggtcatgctcgcgcggcgactgcgcaacctgggccagccggtgacgctgcgcgtggtggaggacctgccgcacggcttcctgaccctagasgcgctgtgtcgcgagacgcgccaggccgcagagctgtgcgtggagcgcatccgcctcgtcctcactcctcccgccggagccgggccgagcggggagacgggggctgcgggggtagacgggggctgcggggggcgacactaaaagcctgttgttcccatctgcgccggcctccgtcatgaatgccttccgggccgggcggaaggggacgcgggctgtgccttacttaagtcgggggtggcaagggggcggggcgggggcccgaaagctgagacccycgccacggggagggggacgcgcacacacaccggtcaccgagacggctggacctgcacgccaccgctgccttttgctgctgctgctgcggcgaccgccgcagggacggggactggccctcccttgcaggtcggtttggtttgttgtaaataaaagtatttaatta

SEQ ID NO: 4394 - DNA, 3558 bp, Homo sapiens
ccgccgcagcctctgtgcggtgggaccaacggacggacggacggacgcgcgcacctaccgaggcgcgggcgctgcagaggctcccagcccaagcctgagcctgagcccgccccgaggtccccgccccgcccgcctggctctctcgccgcggagccgccaagatgggggacaagaaagatgacaaggactcacccaagaagaacaagggcaaggagcgccgggacctggatgacctcaagaaggaggtggctatgacagarcacaagatgtcagtggaagaggtctgccggaaatacaacacagactgtgtgcagggtttgacccacagcaaagcccaggagatcctggcccgggatgggcctaacgcactcacgccaccgcctaccaccccagagtgggtcaagttttgccggcagctcttcgggggcttctccatcctgctgtggatcggggctatcctctgcttcctggcctacggtatccaggcgggcaccgaggacgacccctctggtgacaacctgtacctgggcatcgtgctggcggccgtggtgatcatcactggctgcttctcctactaccaggaggccaagagctccaagatcatggagtccttcaagaacatggtgccccagcaagccctggtgatccgggaaggtgagaagatgcaggtgaacgctgaggaggtggtggtcggggacctggtggagatcaagggtggagaccgagtgccagctgacctgcggatcatctcagcccacggctgcaaggtggacaactcctccctgactggcgaatccgagccccagactcgctctcccgactgcackcacgacaaccccttggagactcggaacatcaccttcttttccaccaactgtgtggaaggcacggctcggggcgtggtggtggccacgggcgaccgcactgtcatgggccgtatcgccaccctggcatcagggctggaggtgggcaagacgcccatcgccatcgagattgagcacttcatccagctcatcaccggcgtggctgtcttcctgggtgtctccttcttcatcctctccctcattctcggatacacctggcttgaggctgtcatcttcctcatcggcatcatcgtggccaatgtcccagagggtctgctggccactgtcactgtgtgtctgacgctgaccgccaagcgcatggcccggaagaactgcctggtgaagaacctggaggctgtagaraccctgggctccacgtccaccatctgctcagataagacagggaccctcactcagaaccgcatgacagtcgcccacatgtggtttgacaaccagatccacgaggctgacaccactgaggaccagtcagggacctcatttgacaagagttcgcacacctgggtggccctgtctcacatcgctgggctctgcaatcgcgctgtcttcaagggtggtcaggacaacatccctgtgctcaagagggatgtggctggggatgcrtctgagtctgccctgctcaagtgcatcgagctgtcctctggctccgtgaagctgatgcgtgaacgmaacaagaaagtggctgagattcccttcaattccaccaacaaataccagctctccatccatgagaccgaggaccccaacgacaaccgatacctgctggtgatgaagggtgcccccgagcgcatcctggaccgctgctccaccatcctgctacagggcaaggagcagcctctggacgaggaaatgaaggaggccttccagaatgcctaccttgagctcggtggcctgggcgagcgcgtgcttggtttctgccattattacctgcccgaggagcagttccccaagggctttgccttcgactgtgatgacgtgaacttcaccacggacaacctctgctttgtgggcctcatgtccatgatcgrcccaccccgggcagccgtccctgacgcrgtgggcaagtgtcgcagcgcaggcatcaaggtcatcatggtcaccggcgatcaccccatcacggccaaggccattgccaagggtgtgggcatcatctctgagggcaacgagactgtggaggacatcgccgcccggctcaacattcccgtcagccaggttaacccccgggatgccaaggcctgcgtgatccacggcaccgacctcaaggacttcacctccgagcaaatcgacgagatcctgcagaatcacaccgagatcgtcttcgcccgcacatccccccagcagaagctcatcattgtggagggctgtcagagacagggtgcaattgtggctgtgaccggggatggtgtgaacgactcccccgctctgaagaaggccgacattggggtggccatgggcatcgctggctctgacgtctccaagcaggcagctgacatgatcctgctggacgacaactttgcctccatcgtcacaggggtggaggagggccgcctgatcttcgacaacctaaagaagtccattgcctacaccctgaccagcaayatcccggagatcacgcccttcctgctgttcatcatggccaacatcccgctgcccctgggcaccatcaccatcctctgcatcgatctgggcactgacatggtccctgccatctcactggcgtacgaggctgccgaaagcgacatcatgaagagacagcccaggaacccgcggacggacaaattggtcaatgagagactcatcagcatggcctacgggcagattggaatgatccaggctctcggtggcttcttctcttactttgtgatcctggcagaaaatggcttcttgccyggcaacctggtgggcatccggctgaactgggatgaccgcaccgtcaatgacctggaagacagttacgggcagcagtggacatacgagcagaggaaggtggtggagttcacctgccacacggccttctttgtgagcatcgttgtygtccagtgggccgatctgatcatctgcaagacccggaggaactcggtcttccagcagggcatgaagaacaagatcctgatcttcgggctgtttgaggagacggccctggctgccttcctgtcctactgccccggcatggacgtggccctgcgcatgtaccctctcaagcccagctggtggttctgtgccttcccctacagtttcctcatcttcgtctacgacgaaatccgcaaactcatcctgcgcaggaacccagggggttgggtggagaaggaaacctactactgacctcagccccaccacatcgcccatctcttccccgtcccscaggcccaggaccgcccctgtcagtccccccaattttgtattctggggggaggagccctctcttcctgtggccccaccttggcccccaccccctccactatctcctgccgcccccactctggctggcttctctcccctgccccaaacctctctcctctctcttttctgtgtcagtttctctccctctcctcacccctctatccattcctcccgccccagccacctccctgggctcttttttactccccttcagccccccggctgatgccatctctggttctggacaattatcaaatatatcagtggggagagagaa

SEQ ID NO: 4395 - DNA, 3442 bp, Homo sapiens
gagaagactggagaaagaatagagggctgagaccagaggtgaagcgggagggacaagaaagatgacaaggactcacccaagaagaacaagggcaaggagcgccgggacctggatgacctcaagaaggaggtggctatgacagarcacaagatgtcagtggaagaggtctgccggaaatacaacacagactgtgtgcagggtttgacccacagcaaagcccaggagatcctggcccgggatgggcctaacgcactcacgccaccgcctaccaccccagagtgggtcaagttttgccggcagctcttcgggggcttctccatcctgctgtggatcggggctatcctctgcttcctggcctacggtatccaggcgggcaccgaggacgacccctctggtgacaacctgtacctgggcatcgtgctggcggccgtggtgatcatcactggctgcttctcctactaccaggaggccaagagctccaagatcatggagtccttcaagaacatggtgccccagcaagccctggtgatccgggaaggtgagaagatgcaggtgaacgctgaggaggtggtggtcggggacctggtggagatcaagggtggagaccgagtgccagctgacctgcggatcatctcagcccacggctgcaaggtggacaactcctccctgactggcgaatccgagccccagactcgctctcccgactgcackcacgacaaccccttggagactcggaacatcaccttcttttccaccaactgtgtggaaggcacggctcggggcgtggtggtggccacgggcgaccgcactgtcatgggccgtatcgccaccctggcatcagggctggaggtgggcaagacgcccatcgccatcgagattgagcacttcatccagctcatcaccggcgtggctgtcttcctgggtgtctccttcttcatcctctccctcattctcggatacacctggcttgaggctgtcatcttcctcatcggcatcatcgtggccaatgtcccagagggtctgctggccactgtcactgtgtgtctgacgctgaccgccaagcgcatggcccggaagaactgcctggtgaagaacctggaggctgtagaraccctgggctccacgtccaccatctgctcagataagacagggaccctcactcagaaccgcatgacagtcgcccacatgtggtttgacaaccagatccacgaggctgacaccactgaggaccagtcagggacctcatttgacaagagttcgcacacctgggtggccctgtctcacatcgctgggctctgcaatcgcgctgtcttcaagggtggtcaggacaacatccctgtgctcaagagggatgtggctggggatgcrtctgagtctgccctgctcaagtgcatcgagctgtcctctggctccgtgaagctgatgcgtgaacgmaacaagaaagtggctgagattcccttcaattccaccaacaaataccagctctccatccatgagaccgaggaccccaacgacaaccgatacctgctggtgatgaagggtgcccccgagcgcatcctggaccgctgctccaccatcctgctacagggcaaggagcagcctctggacgaggaaatgaaggaggccttccagaatgcctaccttgagctcggtggcctgggcgagcgcgtgcttggtttctgccattattacctgcccgaggagcagttccccaagggctttgccttcgactgtgatgacgtgaacttcaccacggacaacctctgctttgtgggcctcatgtccatgatcgrcccaccccgggcagccgtccctgacgcrgtgggcaagtgtcgcagcgcaggcatcaaggtcatcatggtcaccggcgatcaccccatcacggccaaggccattgccaagggtgtgggcatcatctctgagggcaacgagactgtggaggacatcgccgcccggctcaacattcccgtcagccaggttaacccccgggatgccaaggcctgcgtgatccacggcaccgacctcaaggacttcacctccgagcaaatcgacgagatcctgcagaatcacaccgagatcgtcttcgcccgcacatccccccagcagaagctcatcattgtggagggctgtcagagacagggtgcaattgtggctgtgaccggggatggtgtgaacgactcccccgctctgaagaaggccgacattggggtggccatgggcatcgctggctctgacgtctccaagcaggcagctgacatgatcctgctggacgacaactttgcctccatcgtcacaggggtggaggagggccgcctgatcttcgacaacctaaagaagtccattgcctacaccctgaccagcaayatcccggagatcacgcccttcctgctgttcatcatggccaacatcccgctgcccctgggcaccatcaccatcctctgcatcgatctgggcactgacatggtccctgccatctcactggcgtacgaggctgccgaaagcgacatcatgaagagacagcccaggaacccgcggacggacaaattggtcaatgagagactcatcagcatggcctacgggcagattggaatgatccaggctctcggtggcttcttctcttactttgtgatcctggcagaaaatggcttcttgccyggcaacctggtgggcatccggctgaactgggatgaccgcaccgtcaatgacctggaagacagttacgggcagcagtggacatacgagcagaggaaggtggtggagttcacctgccacacggccttctttgtgagcatcgttgtygtccagtgggccgatctgatcatctgcaagacccggaggaactcggtcttccagcagggcatgaagaacaagatcctgatcttcgggctgtttgaggagacggccctggctgccttcctgtcctactgccccggcatggacgtggccctgcgcatgtaccctctcaagcccagctggtggttctgtgccttcccctacagtttcctcatcttcgtctacgacgaaatccgcaaactcatcctgcgcaggaacccagggggttgggtggagaaggaaacctactactgacctcagccccaccacatcgcccatctcttccccgtcccscaggcccaggaccgcccctgtcagtccccccaattttgtattctggggggaggagccctctcttcctgtggccccaccttggcccccaccccctccactatctcctgccgcccccactctggctggcttctctcccctgccccaaacctctctcctctctcttttctgtgtcagtttctctccctctcctcacccctctatccattcctcccgccccagccacctccctgggctcttttttactccccttcagccccccggctgatgccatctctggttctggacaattatcaaatatatcagtggggagagagaa

SEQ ID NO: 4396 - DNA, 3391 bp, Homo sapiens
gacaagaaagatgacaaggactcacccaagaagaacaagggcaaggagcgccgggacctggatgacctcaagaaggaggtggctatgacagarcacaagatgtcagtggaagaggtctgccggaaatacaacacagactgtgtgcagggtttgacccacagcaaagcccaggagatcctggcccgggatgggcctaacgcactcacgccaccgcctaccaccccagagtgggtcaagttttgccggcagctcttcgggggcttctccatcctgctgtggatcggggctatcctctgcttcctggcctacggtatccaggcgggcaccgaggacgacccctctggtgacaacctgtacctgggcatcgtgctggcggccgtggtgatcatcactggctgcttctcctactaccaggaggccaagagctccaagatcatggagtccttcaagaacatggtgccccagcaagccctggtgatccgggaaggtgagaagatgcaggtgaacgctgaggaggtggtggtcggggacctggtggagatcaagggtggagaccgagtgccagctgacctgcggatcatctcagcccacggctgcaaggtggacaactcctccctgactggcgaatccgagccccagactcgctctcccgactgcackcacgacaaccccttggagactcggaacatcaccttcttttccaccaactgtgtggaaggcacggctcggggcgtggtggtggccacgggcgaccgcactgtcatgggccgtatcgccaccctggcatcagggctggaggtgggcaagacgcccatcgccatcgagattgagcacttcatccagctcatcaccggcgtggctgtcttcctgggtgtctccttcttcatcctctccctcattctcggatacacctggcttgaggctgtcatcttcctcatcggcatcatcgtggccaatgtcccagagggtctgctggccactgtcactgtgtgtctgacgctgaccgccaagcgcatggcccggaagaactgcctggtgaagaacctggaggctgtagaraccctgggctccacgtccaccatctgctcagataagacagggaccctcactcagaaccgcatgacagtcgcccacatgtggtttgacaaccagatccacgaggctgacaccactgaggaccagtcagggacctcatttgacaagagttcgcacacctgggtggccctgtctcacatcgctgggctctgcaatcgcgctgtcttcaagggtggtcaggacaacatccctgtgctcaagagggatgtggctggggatgcrtctgagtctgccctgctcaagtgcatcgagctgtcctctggctccgtgaagctgatgcgtgaacgmaacaagaaagtggctgagattcccttcaattccaccaacaaataccagctctccatccatgagaccgaggaccccaacgacaaccgatacctgctggtgatgaagggtgcccccgagcgcatcctggaccgctgctccaccatcctgctacagggcaaggagcagcctctggacgaggaaatgaaggaggccttccagaatgcctaccttgagctcggtggcctgggcgagcgcgtgcttggtttctgccattattacctgcccgaggagcagttccccaagggctttgccttcgactgtgatgacgtgaacttcaccacggacaacctctgctttgtgggcctcatgtccatgatcgrcccaccccgggcagccgtccctgacgcrgtgggcaagtgtcgcagcgcaggcatcaaggtcatcatggtcaccggcgatcaccccatcacggccaaggccattgccaagggtgtgggcatcatctctgagggcaacgagactgtggaggacatcgccgcccggctcaacattcccgtcagccaggttaacccccgggatgccaaggcctgcgtgatccacggcaccgacctcaaggacttcacctccgagcaaatcgacgagatcctgcagaatcacaccgagatcgtcttcgcccgcacatccccccagcagaagctcatcattgtggagggctgtcagagacagggtgcaattgtggctgtgaccggggatggtgtgaacgactcccccgctctgaagaaggccgacattggggtggccatgggcatcgctggctctgacgtctccaagcaggcagctgacatgatcctgctggacgacaactttgcctccatcgtcacaggggtggaggagggccgcctgatcttcgacaacctaaagaagtccattgcctacaccctgaccagcaayatcccggagatcacgcccttcctgctgttcatcatggccaacatcccgctgcccctgggcaccatcaccatcctctgcatcgatctgggcactgacatggtccctgccatctcactggcgtacgaggctgccgaaagcgacatcatgaagagacagcccaggaacccgcggacggacaaattggtcaatgagagactcatcagcatggcctacgggcagattggaatgatccaggctctcggtggcttcttctcttactttgtgatcctggcagaaaatggcttcttgccyggcaacctggtgggcatccggctgaactgggatgaccgcaccgtcaatgacctggaagacagttacgggcagcagtggacatacgagcagaggaaggtggtggagttcacctgccacacggccttctttgtgagcatcgttgtygtccagtgggccgatctgatcatctgcaagacccggaggaactcggtcttccagcagggcatgaagaacaagatcctgatcttcgggctgtttgaggagacggccctggctgccttcctgtcctactgccccggcatggacgtggccctgcgcatgtaccctctcaagcccagctggtggttctgtgccttcccctacagtttcctcatcttcgtctacgacgaaatccgcaaactcatcctgcgcaggaacccagggggttgggtggagaaggaaacctactactgacctcagccccaccacatcgcccatctcttccccgtcccscaggcccaggaccgcccctgtcagtccccccaattttgtattctggggggaggagccctctcttcctgtggccccaccttggcccccaccccctccactatctcctgccgcccccactctggctggcttctctcccctgccccaaacctctctcctctctcttttctgtgtcagtttctctccctctcctcacccctctatccattcctcccgccccagccacctccctgggctcttttttactccccttcagccccccggctgatgccatctctggttctggacaattatcaaatatatcagtggggagagagaa

SEQ ID NO: 4397 - DNA, 837 bp, Homo sapiens
gaacatgaccaggacgtttagcagggagtgagccccccacctggtcccagagaagagggagatctgagaagacactgaggagctgcggcgccaagatgagtggagaggagaacccagccagcaagcccacgccggtgcaggacgtacagggcgacgggcgctggatgtccctgcaccatcggttcgtggctgacagcaaagataaggaacccgaagtcgtcttcatcggggactccttggtccagctcatgcaccagtgcgagatctggcgcgagctcttctctcctctgcatgcacttaactttggcattggtggtgacggcacacagcatgtactgtggcggctggagaatggggagctggaacacatccggcccaagattgtggtggtctgggtgggcaccaacaaccacggacacacagcagagcaggtgactggtggcatcaaggccattgtgcaactggtgaatgagcgacagccccaggcccgggttgtggtgctgggcctgcttccgcgaggccaacatcccaacccacttcgggagaagaaccgacaggtgaacgagctggtacgggcggcactggctggccaccctcgggcccacttcctagatgccgaccctggctttgtgcactcagatggcaccatcagccatcatgacatgtatgattacctgcatytgagccgcctgggctacacacctgtttgccgggctctgcactccctgcttctgsgtctgctggcccaagaccagggccaaggtgctcccctgctggagcccgcaccctaagcatcctgctgccttcccacaacattaaactctccttcctcagtgt

SEQ ID NO: 4398 - DNA, 1233 bp, Homo sapiens
gtaggtggtcccttccgcacatttcactctgtacagcaaatggtttcttcccatttgctagacagagggctagattttccccgcccactctcgactcttcaggtagttcgcccctccccgtgaccggtgggtggtttctccctcctccccgcctcgggagctggatggtctcgcctctccctccccccaccccgtgccgggtgcgcggcctgggagtcagcggcccgagcgggaagcgccgggcgagcccactgtgcggccgtcgtgggggaagcgaaggttcctgattccacctacctcctaagtgaaggcttccgtccctggagaggaggcggcgccctgtatcggccttcgtcctccgcgggtgtgctagcgttgggacggtcctttgttgccgcgaggggtaggagtgggcgtggcggagccagctcsgttcggaacactcccgggccgacccgactcgctcatcctgcaggagctgcggcgccaagatgagtggagaggagaacccagccagcaagcccacgccggtgcaggacgtacagggcgacgggcgctggatgtccctgcaccatcggttcgtggctgacagcaaagataaggaacccgaagtcgtcttcatcggggactccttggtccagctcatgcaccagtgcgagatctggcgcgagctcttctctcctctgcatgcacttaactttggcattggtggtgacggcacacagcatgtactgtggcggctggagaatggggagctggaacacatccggcccaagattgtggtggtctgggtgggcaccaacaaccacggacacacagcagagcaggtgactggtggcatcaaggccattgtgcaactggtgaatgagcgacagccccaggcccgggttgtggtgctgggcctgcttccgcgaggccaacatcccaacccacttcgggagaagaaccgacaggtgaacgagctggtacgggcggcactggctggccaccctcgggcccacttcctagatgccgaccctggctttgtgcactcagatggcaccatcagccatcatgacatgtatgattacctgcatytgagccgcctgggctacacacctgtttgccgggctctgcactccctgcttctgsgtctgctggcccaagaccagggccaaggtgctcccctgctggagcccgcaccctaagcatcctgctgccttcccacaacattaaactctccttcctcagtgt

SEQ ID NO: 4399 - DNA, 860 bp, Homo sapiens
gtaggtggtcccttccgcacatttcactctgtacagcaaatggtttcttcccatttgctagacagagggctagattttccccgcccactctcgactcttcaggagctgcggcgccaagatgagtggagaggagaacccagccagcaagcccacgccggtgcaggacgtacagggcgacgggcgctggatgtccctgcaccatcggttcgtggctgacagcaaagataaggaacccgaagtcgtcttcatcggggactccttggtccagctcatgcaccagtgcgagatctggcgcgagctcttctctcctctgcatgcacttaactttggcattggtggtgacggcacacagcatgtactgtggcggctggagaatggggagctggaacacatccggcccaagattgtggtggtctgggtgggcaccaacaaccacggacacacagcagagcaggtgactggtggcatcaaggccattgtgcaactggtgaatgagcgacagccccaggcccgggttgtggtgctgggcctgcttccgcgaggccaacatcccaacccacttcgggagaagaaccgacaggtgaacgagctggtacgggcggcactggctggccaccctcgggcccacttcctagatgccgaccctggctttgtgcactcagatggcaccatcagccatcatgacatgtatgattacctgcatytgagccgcctgggctacacacctgtttgccgggctctgcactccctgcttctgsgtctgctggcccaagaccagggccaaggtgctcccctgctggagcccgcaccctaagcatcctgctgccttcccacaacattaaactctccttcctcagtgt

SEQ ID NO: 4400 - DNA, 1037 bp, Homo sapiens
gtaggtggtcccttccgcacatttcactctgtacagcaaatggtttcttcccatttgctagacagagggctagattttccccgcccactctcgactcttcaggtagttcgcccctccccgtgaccggtgggtggtttctccctcctccccgcctcgggagctggatggtctcgcctctccctccccccaccccgtgccgggtgcgcggcctgggagtcagcggcccgagcgggaagcgccgggcgagcccactgtgcggccgtcgtgggggaagcgaaggagctgcggcgccaagatgagtggagaggagaacccagccagcaagcccacgccggtgcaggacgtacagggcgacgggcgctggatgtccctgcaccatcggttcgtggctgacagcaaagataaggaacccgaagtcgtcttcatcggggactccttggtccagctcatgcaccagtgcgagatctggcgcgagctcttctctcctctgcatgcacttaactttggcattggtggtgacggcacacagcatgtactgtggcggctggagaatggggagctggaacacatccggcccaagattgtggtggtctgggtgggcaccaacaaccacggacacacagcagagcaggtgactggtggcatcaaggccattgtgcaactggtgaatgagcgacagccccaggcccgggttgtggtgctgggcctgcttccgcgaggccaacatcccaacccacttcgggagaagaaccgacaggtgaacgagctggtacgggcggcactggctggccaccctcgggcccacttcctagatgccgaccctggctttgtgcactcagatggcaccatcagccatcatgacatgtatgattacctgcatytgagccgcctgggctacacacctgtttgccgggctctgcactccctgcttctgsgtctgctggcccaagaccagggccaaggtgctcccctgctggagcccgcaccctaagcatcctgctgccttcccacaacattaaactctccttcctcagtgt

SEQ ID NO: 4401 - DNA, 2071 bp, Homo sapiens
grccagggcsggcgagcgcagtgcagcgccgygcggtgcgggcggccgagtgggggcgtcatggaggatgagcgragcttttcggatatctgcggcggccgcctggcgctgcagcgccgctactactccccrtcctgccgggaattctgcctcagctgccctcggctctcgctgcgttcgctcaccgctgtcacctgcackgtgtggctggcggcctacggactcttcaccctctgcgagaacagcatgatcctctctgctgccatcttcatcaccctcttaggtctgcttggttatctccattttgtgaagattgatcaggagactctgttaatyattgattcccttggcattcagatgacttcatcttatgcttcaggcaaagaaagcactaccttcatagaaatgggcaaggtcaaggatattgtcatcaatgaggccatttacatgcagaaggtgatttactacctctgcatcttattgaaagatccagtggaaccacatgggatatcccaagtagtacccgtcttccagagtgccaagccccggctggactgcttgattgaagtatacaggagctgccaggagatcctggcacaccagaaagccacatcaacaagcccatgagccccagcgttcagaaggccagcattgtcttccatgggagatgactcttaagccataggggctggttttccgtactccaaaccatcaggtggacacagtcctaggaaccattatggatgtagtgcatcttagagccatagagcaggtgactggaaatctaactcagtatatttccgtgtattatagtgttttccttgtaaggttttgcctactttaccaaaggaggggagaccttaagaattttgacacagtatgtcaaaagtaatgtcagcaaagaacactttcggaaattgctaagcatgttcaggtttactttgttgatgtttgtgaagcaaaacaatgggaaactgacatcagatgtcttgagaaagctatattttccaatagtaccccttgtgtaaagttacgaaaaaaacaagcccttcagtactggttagcaggaagaaatgtcctacaaaagacgagtctgtcaacctagtgcctgtgttctgtacagggcttatttatttactgttaataaacagatcttccaaaacacacagttwcctggttcacagatagctgctttttattgacaaacaagatcatagtatttcagtcatggtgtcaagcacattaatacttttctgttactcagcatttttttwtatatcagttcaaaagctacttttgccaagaaggatgagacaaaaggccagacagaawttggactttggttttcagacatgggactctcatgttaacaaagaataaataagcaaatattgaatcctttgtttctaagttagtttcttctgtataagattaataaactaaagggttcctgaagggttggggaggagagagggtgggggaaatagattgaccccaaattcagtgtgaacacagctccattcttgtttactcttccttyggactcctacttttcttctaaactctctgggtagataatgttatccttattggccttagagatacccaagatattataaaaccagagctgttatgtctgtcaccagccctgcaggaattattcaggaacctgtggtacatgtgacttgttcgaggtagaaatgtctcagctagatccccaagttgtggggtgaaaagtgtgaacagaaatggctgtaaaactacttgccttgcaaagtcaagtacatttaaaagaggcagaaacttggatstgcttcttttttcatcatgcttgtcagtttacggggtgagagaggagaagcttacagcagctgaggtgttcagataaactagttctggcctcgcagtttttgctgtgcaaaagatacacacattgttggggttaaaggcttggttttgggtgctactgctaaatatacagttttcagcactttactgacatatagtaaggctgccttagagctaggaaataaaactcagtttcctagatgttggaaaatcagagtatgaa

SEQ ID NO: 4402 - DNA, 1344 bp, Homo sapiens
grccagggcsggcgagcgcagtgcagcgccgygcggtgcgggcggccgagtgggggcgtcatggaggatgagcgragcttttcggatatctgcggcggccgcctggcgctgcagcgccgctactactccccrtcctgccgggaattctgcctcagctgccctcggctctcgctgcgttcgctcaccgctgtcacctgcackgtgtggctggcggcctacggactcttcaccctctgcgagaacagcatgatcctctctgctgccatcttcatcaccctcttaggtctgcttggttatctccattttgtgaagattgatcaggagactctgttaatyattgattcccttggcattcagatgacttcatcttatgcttcaggcaaagaaagcactaccttcatagaaatgggcaaggtcaaggatattgtcatcaatgaggccatttacatgcagaaggtgatttactacctctgcatcttattgaaagatccagtggaaccacatgggatatcccaagtagtacccgtcttccagagtgccaagccccggctggactgcttgattgaagtatacaggagctgccaggagatcctggcacaccagaaagccacatcaacaagcccatgagccccagcgttcagaaggccagcattgtcttccatgggagatgactcttaagccataggggctggttttccgtactccaaaccatcaggtggacacagtcctaggaaccattatggatgtagtgcatcttagagccatagagcaggtgactggaaatctaactcagtatatttccgtgtattatagtgttttccttgtaaggttttgcctactttaccaaaggaggggagaccttaagaattttgacacagtatgtcaaaagtaatgtcagcaaagaacactttcggaaattgctaagcatgttcaggtttactttgttgatgtttgtgaagcaaaacaatgggaaactgacatcagatgtcttgagaaagctatattttccaatagtaccccttgtgtaaagttacgaaaaaaacaagcccttcagtactggttagcaggaagaaatgtcctacaaaagacgagtctgtcaacctagtgcctgtgttctgtacagggcttatttatttactgttaataaacagatcttccaaaacacacagttwcctggttcacagatagctgctttttattgacaaacaagatcatatatatcagttcaaaagctacttttgccaagaaggatgagacaaaaggccagacagaawttggactttggttttcagacatgggactctcatgttaacaaagaataaataagcaaatattgaatccttw

SEQ ID NO: 4403 - DNA, 2531 bp, Homo sapiens
atagtcggcgagcaacgctggagcatcccgctctggtgccgctgcagccggcagagatggttgagctcatgttcccgctgttgctcctccttctgcccttccttctgtatatggctgcgccccaaatcaggaaaatgctgtccagtggggtgtgtacatcaactgttcagcttcctgggaaagtagttgtggtcacaggagctaatacaggtatcgggaaggagacagccaaagagctggctcagagaggcaactcgagtatatttagcttgccgggatgtggaaaagggggaattggtggccaaagagatccagaccacgacagggaaccagcaggtgttggtgcggaaactggacctgtctgatactaagtctattcgagcttttgctaagggcttcttagctgaggaaaagcacctccacgttttgatcaacaatgcaggagtgatgatgtgtccgtactcgaagacagcagatggctttgagatgcacataggagtcaaccacttgggtcacttcctcctaacccatctgctgctagagaaactaaaggaatcagccccatcaaggatagtaaatgtgtcttccctcgcacatcacctgggaaggatccacttccataacctgcagggcgagaaattctacaatgcaggcctggcctactgtcacagcaagctagccaacatcctcttcacccaggaactggcccggagactaaaaggctctggcgttacgacgtattctgtacaccctggcacagtccaatctgaactggttcggcactcatctttcatgagatggatgtggtggcttttctcctttttcatcaagactcctcagcagggagcccagaccagcctgcactgtgccttaacagaaggtcttgagattctaagtgggaatcatttcagtgactgtcatgtggcatgggtctctgcccaagctcgtaatgagactatagcaaggcggctgtgggacgtcagttgtgacctgctgggcctcccaatagactaacaggcagtgccagttggacccaagagaagactgcagcagactacacagtacttcttgtcaaaatgattctccttcaaggttttcaaaacctttagcacaaarararcaaaaccttccagccttgcctgcttggtgtccagttaaaactcagtgtactgccagattcgtctaaatgtctgtcatgtccagatttactttgcttctgttactgccagagttactagagatatcataataggataagaagaccctcatatgacctgcacagctcattttccttctgaaagaaactactacctaggagaatctaagctatagcagggatgatttatgcaaatttgaactagcttctttgttcacaattcagttcctcccaaccaaccagtcttcacttcaagagggccacactgcaacctcagcttaacatgaataacaaagactggctcaggagcagggcttgcccaggcatggtggatcaccggaggtcagtagttcaagaccagcctggccaacatggtgaaaccccacctctactaaaaattgtgtatatctttgtgtgtcttcctgtttatgtgtgccaagggagtattttcacaaagttcaaaacagccacartaatcagagatggagcaaaccagtgccatccagtctttatgcaaatgaaatgctgcaaagggaagcagattctgtatatgttggtaactacccrccaagagcacatgggtagcagggaagaagtaaaaaaagagaaggagaatactggaagataatgcmcaaaatgaagggactagttaaggattaactagccctttaaggattaactagttaaggattaatagcaaaagayattaaatatgctaacatagctatggaggaattgagggcaagcacccaggactgatgaggtcttaacaaaaaccagtgtggcaaaaaaaaaaaaaaaaaaaaaaaaaaaaatcctaaaaacaaacaaacaaaaaaaacaattcttcattcagaaaaattatcttagggactgatattggtaattatggtcaatttaataatattttggggcatttccttacattgtcttgacaagattaaaatgtctgtgccaaaattttgtattttatttggagacttcttatcaaaagtaatgctgccaaaggaagtctaaggaattagtagtgttcccatcacttgtttggagtgtgctattctaaaagattttgatttcctggaatgacaattatattttaactttggtgggggaaagagttataggaccacagtcttcacttctgatacttgtaaattaatcttttattgcacttgttttgaccattaagctatatgtttagaaatggtcattttacggaaaaattagaaaaattctgataatagtgcagaataaatgaattaatgttttacttaatttatattgaactgtcaatgacaaataaaaattctttttgattattttttgttttcatttaccagaataaaaactaagaattaaaagtttgattacagtc

SEQ ID NO: 4404 - DNA, 2527 bp, Homo sapiens
atagtcggcgagcaacgctggagcatcccgctctggtgccgctgcagccggcagagatggttgagctcatgttcccgctgttgctcctccttctgcccttccttctgtatatggctgcgccccaaatcaggaaaatgctgtccagtggggtgtgtacatcaactgttcagcttcctgggaaagtagttgtggtcacaggagctaatacaggtatcgggaaggagacagccaaagagctggctcagagagctcgagtatatttagcttgccgggatgtggaaaagggggaattggtggccaaagagatccagaccacgacagggaaccagcaggtgttggtgcggaaactggacctgtctgatactaagtctattcgagcttttgctaagggcttcttagctgaggaaaagcacctccacgttttgatcaacaatgcaggagtgatgatgtgtccgtactcgaagacagcagatggctttgagatgcacataggagtcaaccacttgggtcacttcctcctaacccatctgctgctagagaaactaaaggaatcagccccatcaaggatagtaaatgtgtcttccctcgcacatcacctgggaaggatccacttccataacctgcagggcgagaaattctacaatgcaggcctggcctactgtcacagcaagctagccaacatcctcttcacccaggaactggcccggagactaaaaggctctggcgttacgacgtattctgtacaccctggcacagtccaatctgaactggttcggcactcatctttcatgagatggatgtggtggcttttctcctttttcatcaagactcctcagcagggagcccagaccagcctgcactgtgccttaacagaaggtcttgagattctaagtgggaatcatttcagtgactgtcatgtggcatgggtctctgcccaagctcgtaatgagactatagcaaggcggctgtgggacgtcagttgtgacctgctgggcctcccaatagactaacaggcagtgccagttggacccaagagaagactgcagcagactacacagtacttcttgtcaaaatgattctccttcaaggttttcaaaacctttagcacaaarararcaaaaccttccagccttgcctgcttggtgtccagttaaaactcagtgtactgccagattcgtctaaatgtctgtcatgtccagatttactttgcttctgttactgccagagttactagagatatcataataggataagaagaccctcatatgacctgcacagctcattttccttctgaaagaaactactacctaggagaatctaagctatagcagggatgatttatgcaaatttgaactagcttctttgttcacaattcagttcctcccaaccaaccagtcttcacttcaagagggccacactgcaacctcagcttaacatgaataacaaagactggctcaggagcagggcttgcccaggcatggtggatcaccggaggtcagtagttcaagaccagcctggccaacatggtgaaaccccacctctactaaaaattgtgtatatctttgtgtgtcttcctgtttatgtgtgccaagggagtattttcacaaagttcaaaacagccacartaatcagagatggagcaaaccagtgccatccagtctttatgcaaatgaaatgctgcaaagggaagcagattctgtatatgttggtaactacccrccaagagcacatgggtagcagggaagaagtaaaaaaagagaaggagaatactggaagataatgcmcaaaatgaagggactagttaaggattaactagccctttaaggattaactagttaaggattaatagcaaaagayattaaatatgctaacatagctatggaggaattgagggcaagcacccaggactgatgaggtcttaacaaaaaccagtgtggcaaaaaaaaaaaaaaaaaaaaaaaaaaaaatcctaaaaacaaacaaacaaaaaaaacaattcttcattcagaaaaattatcttagggactgatattggtaattatggtcaatttaataatattttggggcatttccttacattgtcttgacaagattaaaatgtctgtgccaaaattttgtattttatttggagacttcttatcaaaagtaatgctgccaaaggaagtctaaggaattagtagtgttcccatcacttgtttggagtgtgctattctaaaagattttgatttcctggaatgacaattatattttaactttggtgggggaaagagttataggaccacagtcttcacttctgatacttgtaaattaatcttttattgcacttgttttgaccattaagctatatgtttagaaatggtcattttacggaaaaattagaaaaattctgataatagtgcagaataaatgaattaatgttttacttaatttatattgaactgtcaatgacaaataaaaattctttttgattattttttgttttcatttaccagaataaaaactaagaattaaaagtttgattacagtc

SEQ ID NO: 4405 - DNA, 2476 bp, Homo sapiens
gcggtgcgcgcgcctcgacatccgggcaacgcctctgttctgtcctcccccttcgtcgcctgtgacaaccggaagcggaagtgaaaatgggtgtccctgctgcctcttagcaacaagaggggtcaagtgacacaaccagctgactcccgtagaggaagacactgtggaggccagttctggagctattgcagcctcggttgcccggccggggacccgagccgaaaagttatcgtcagaatgtcgggcaaagaccgaattgaaatctttccctcgcgaatggcacagaccatcatgaaggctcgtttaaagggagcacagacaggtcgaaacctcctgaagaaaaaatctgatgccttaactcttcgatttcgacagatcctaaagaagataatagagactaaaatgttgatgggcgaagtgatgagagaagctgccttttcactagctgaagccaagttcacagcaggtgacttcagcactacagttatccaaaatgtcaataaagckcaagtgaagattcgagcgaagaaagataatgtagcaggtgttactttgccagtatttgaacattaccatgaaggaactgacagttatgaactgactggtttagccagaggtggggaacagttggctaaattaaagaggaattatgccaaagcagtggaactactggtggaactagcttctctgcagacttcttttgttactttggatgaagctattaagataaccaacaggcgtgtaaatgccattgaacatgtcatcattccccggattgaacgtactcttgcttatatcatcacagagctggatgagagagagcgagaagagttctataggttaaagaaaatacaagagaagaaaaagattctaaaggaaaaatctgagaaggacttggagcaaaggagagcagctggagaggtgttggagcctgctaatcttctggctgaagagaaggacgaggatcttctatttgaataatctttcctgttctggttctttgagaaaccctaacactggcttcattttaattcacagtgtgtaggtttgatttgtgtggctattkattttttggcctaagaatttcactggttgtaaaatttacctagatgtctatttatgggattacttttgcagaatcataatttagcaaccatttatcatggatgaaagagatctgtaaaacctgcccaggaacttacagaatttactttgcagaagcgttatcatactccatttacatctgtgttacacgtgatctgcttaccaagcatattaggaaatacctcttaggaagcattagcggtctcaggccaattactgtggagcagctttcattcctacccacttgcaaaccttggcgctgttgtctgagattgctgcagccattcttgttaccatggtacttctcaaactttgtgaaaacctgcacttttccttgcatgacaggttcctgtcttgtctgtcatgggagccattctgccaatttaaatgcgactgtggtataaacagtaaaatgatttaaaagtaagtcattccgtttttattaatttactgttaagtcatgttctcatgctcagatcagtagtgtcagccagagctttctctgcagacatgtaggaagtgggtagctatttttcccactccatgtattagagttttacaaaaaggcttacttttgagacaactgttgcattttggggtactaataaatgattgccgatgagttatgagggcattataatacttccttatttgctaattaagaaaataactagttcctattttagagtaagaaataaggtaactttttactatttataagtgataaaaacttgctttcatatatgaagatgaagcatttgagtggccacatcaggtgtctgaggtttttagtactgtttgatttggcatgagccatccatggggactcagtctttctcrcatccatttccaggcatttttgacatgattagccatggaataatgtttagtwctgaaattgtgacactgtctttattaatactgtattttaatcaagtgacatcacagtccaggtagtttttctttcttttttttttttttgaaacagagtctcactcattctgtagcccaggctagagtgcagtggcagcaacatcagttcactgcaacgtccgcctcctcaattcaagagattctcctgcttcagtctcccgagtagctgggattacaggtttgcgccaccatgcccggctaatgtttatatttttagtggagatggggtttcaccatgttggccaggctggtcttgaactcctgacctcaagtaatctgcctgcctcggcctcccaaagtgctgggattacaggcataagccaccatgcccagccagtctaggcagttttaaagtactaaatgattttgcaagcatttaacatctcctataagatagcaggtcttagttatgtgccaggcactggtattaagtattttg

SEQ ID NO: 4406 - DNA, 2377 bp, Homo sapiens
gcggtgcgcgcgcctcgacatccgggcaacgcctctgttctgtcctcccccttcgtcgcctgtgacaaccggaagcggaagtgaaaatgggtgtccctgctgcctcttagcaacaagaggggtcaagtgacacaaccagctgactcccgtagaggaagacactgtggaggccagttctggagctattgcagcctcggttgcccggccggggacccgagccgaaaagttatcgtcagaatgtcgggcaaagaccgaattgaaatctttccctcgcgaatggcacagaccatcatgaaggctcgtttaaagggagcacagacaggtcgaaacctcctgaagaaaaaatctgatgccttaactcttcgatttcgacagatcctaaagaagataatagagactaaaatgttgatgggcgaagtgatgagagaagctgccttttcactagctgaagccaagttcacagcaggtgacttcagcactacagttatccaaaatgtcaataaagckcaagtgaagattcgagcgaagaaagataatgtagcaggtgttactttgccagtatttgaacattaccatgaaggaactgacagttatgaactgactggtttagccagaggtggggaacagttggctaaattaaagaggaattatgccaaagcagtggaactactggtggaactagcttctctgcagacttcttttgttactttggatgaagctattaagataaccaacaggcgtgtaaatgccattgaacatgtcatcattccccggattgaacgtactcttgcttatatcatcacagagctggatgagagagagcgagaagagttctataggttaaagaaaatacaagagaagaaaaagattctaaaggaaaaatctgagaaggacttggagcaaaggagagcagctggagaggtgttggagcctgctaatcttctggctgaagagaaggacgaggatcttctatttgaataatctttcctgttctggttctttgagaaaccctaacactggcttcattttaattcacagtgtgtaggtttgatttgtgtggctattkattttttggcctaagaatttcactggttgtaaaatttacctagatgtctatttatgggattacttttgcagaatcataatttagcaaccatttatcatggatgaaagagatctgtaaaacctgcccaggaacttacagaatttactttgcagaagcgttatcatactccatttacatctgtgttacacgtgatctgcttaccaagcatattaggaaatacctcttaggaagcattagcggtctcaggccaattactgtggagcagctttcattcctacccacttgcaaaccttggcgctgttgtctgagattgctgcagccattcttgttaccatggtacttctcaaactttgtgaaaacctgcacttttccttgcatgacaggttcctgtcttgtctgtcatgggagccattctgccaatttaaatgcgactgtggtataaacagtaaaatgatttaaaagtaagtcattccgtttttattaatttactgttaagtcatgttctcatgctcagatcagtagtgtcagccagagctttctctgcagacatgtaggaagtgggtagctatttttcccactccatgtattagagttttacaaaaaggcttacttttgagacaactgttgcattttggggtactaataaatgattgccgatgagttatgagggcattataatacttccttatttgctaattaagaaaataactagttcctattttagagtaagaaataaggtaactttttactatttataagtgataaaaacttgctttcatatatgaagatgaagcatttgagtggccacatcaggtgtctgaggtttttagtactgtttgatttggcatgagccatccatggggactcagtctttctcrcatccatttccaggcatttttgacatgattagccatggaataatgtttagtwctgaaattgtgacactgtctttattaatactgtattttaatcaagtgacatcacagtccaggtagtttttctttcttttttttttttttgaaacagagtctcactcattctgtagcccaggctagagtgcagtggcagcaacatcagttcactgcaacgtccgcctcctcaattcaagagattctcctgcttcagtctcccgagtagctgggattacagcctgctgaactgtaaattctaccatctccactttgcagatgaggaaattgagactttgacaagtcaaagagcacagctggaatgcaagtcaaatatgtacaaggatatccacaacactgttcgcagctacaagctgaggtacaaggtgcctcaaaagcttga

SEQ ID NO: 4407 - DNA, 5461 bp, Homo sapiens
gcggccgcaggggccggtctcgcgcggtctagaagtggagttgctggcggctgcggcggtgacggcggcgacggaggaggcaggcggtggggcgggggcggggactaaggattctgaggtggggagtcgggagtttctggattctttatccggaatttcaagggccgccggagggctgtcgcttctgcagtgcgtaggagcggccggggcgggaggctccgcggagccgaggcgtggagaataagaaagccttgagttttgtgaaaaaccggagaagagaaactaaaaggacagtagaaaaggcttttccagtttgcataatataaccatgacaacatcccatatgaatgggcatgttacagaggaatcagacagcgaagtaaaaaatgttgatcttgcatcaccagaggaacatcagaagcaccgagagatggctgttgactgccctggagatttgggcaccaggatgatgccaatacgtcgaagtgcacagttggagcgtattcggcaacaacaggaggacatgaggcgtaggagagaggaagaagggaaaaagcaagaacttgaccttaattcttccatgagacttaagaaactagcccaaattcctccaaagaccggaatagataaccctatgtttgatacagaggaaggaattgtcttagaaagtcctcattatgctgtgaaaatattagaaatagaagacttgttttcttcacttaaacatatccaacatactttggtagattmtcagagccaggaggatatttcactgcttttacaacttgttcaaaataaggatttccagaatgcatttaagatacacaatgccatcacagtacacatgaacaaggccagtcctccatttcctcttatctccaacgcacaagatcttgctcaagaggtacaaactgttttgaagccagttcatcataaggaaggacaagaactaactgctttgctgaatactccacatattcaggcacttttactggcccacgataaggttgctgagcaggaaatgcagctagagcccattacagatgagagagtttatgaaagtattggccagtatggaggagaaactgtaaaaatagttcgtatagaaaaggctcgtgatattccgttgggtgctacagttcgtaatgaaatggactctgtcatcattagccggatagtmaaagggggtgctgcagagaaaagtggtctgttgcatgaaggagatgaagttctagagattaatggcattgaaattcgggggaaagatgtcaatgaggtttttgacttgttgtctgatatgcatggtactttgacttttgtcctgattcccagtcaacagatcaagccgcctcctgccaaggaaacagtaatccatgtaaaagctcattttgactatgacccctcagatgacccttatgttccatgtcgagagttaggtctgtcttttcaaaaaggtgatatacttcatgtgatcagtcaagaagatccaaactggtggcaggcctacagggaaggggacgaagataatcaacctctagccgggcttgttccagggaaaagctttcagcagcaaagggaagccatgaaacaaaccatagaagaagataaggagccagaaaaatcaggaaaactgtggtgtgcaaagaagaataaaaagaagaggaaaaaggttttatataatgccaataaaaatgatgattatgacaacgaggagatcttaacctatgaggaaatgtcactttatcatcagccagcaaataggaagagacctatcatcttgattggtccacagaactgtggccagaatgaattgcgtcagaggctcatgaacaaagaaaaggaccgctttgcatctgcagttcctcatacaacccggagtaggcgagaccaagaagtagccggtagagattaccactttgtttcgcggcaagcattcgaggcagacatagcagctggaaagttcattgagcatggtgaatttgagaagaatttgtatggaactagcatagattctgtacggcaagtgatcaactctggcaaaatatgtcttttaagtcttcgtacacagtcattgaagactctccggaattcagatttgaaaccatatattatcttcattgcacccccttcacaagaaagacttcgggcattattggccaaagaaggcaagaatccaaagcctgaagagttgagagaaatcattgagaagacaagagagatggagcagaacaatggccactactttgatacggcaattgtgaattccgatcttgataaagcctatcaggaattgcttaggttaattaacaaacttgatactgaacctcagtgggtaccatccacttggctgaggtgaaagaaacatccattctgtggcatgttggacttgatctggcaaaaactgccaataggaggactgcccgacactgcagcaagattgaggataagatggaaggcagcagtataagctgtagatctgttcttagatctcttgaattagtgagacgacagttcccttaggcagtttgtgcatggcatcctttattctctatacatggctttagcggttcttgcctcattttgggattctaaatggaagctttcaacagagcattccattttgtcctgttaaaaccttttgttttcacctaaaccctttctgcttagttgtatctctgtgaaaaacttgtatacacaagcgtccatgtctcacacaaatattgatgtgattattcttaagtgttaaatcattaacacttaaatgacttcattgggaatattgagcagagggactgtgcttctatgcactgggcaaggcagtatttgcttaggaaactaatktagtcatcagagatactttcctaaaaaggaaaaataaaaaacaaaatggtgccactttgggttgaagctactttgttaggctygaattcatttatatgtcttttgattcttaaaaaaacaaaaaacattccattagaagcaccagtttttttgctcaractttgtggatcagactctacactcaacacactctaatctacttaaaggtatacaaaatatgctgatcttttttaaattatgatttcctgaatttttttcttaagtcgtctcaactgatttactcacttagcttcccttccctcatcagcatagtataatagaatgtatgttacatttttatgaatggcaggtgttcattataatctgtattgacktaaaaagtttcttcctcatgatgctaatagttttttgtatacatgggaggatagcacatttgacagtttttgcatttttatgtatgagcacagtatcctatgactgtgctacgtatatataggtaataaactggaattctgttgatgaatatagctgctgtactgtatattaatatttaatagatcaacaaatggtcattgaaaacacttgtttagcattagaataaaattatatatgtccttgggaaatattatgacagttgactttaagatcaaaaggaarggaagacctgaaagtcatttgaacattttaggaaaagaatattggagagaaaaaggtattaaatatatagaaataggtttttaacctaacaaggtctgcctcttatgacgagaatgcaacagcttggtaaatcataaaagaaacatttaagctaataggattttcgtactgtctctatagctgtagctttaaaattcaacgtatataattggcatggaaacttaatttgcagtcttttcaagcctttaggatagtgtgatgtgtaacaaacaacctcaaatgtgaatgccttgattttatttttatggtgactttagctacagcatttcctatacccagagctaaacactggaataatactgacatcatttaatttaacataagcaattatgtttaaggagtaatttgtgtcatgtacatatttrattgattttttttcttctacataattttatttgaacaaatgtagacagtttatatgtcgcctttttctgttcaaatttgcatggcctattaagttggctggagagtgttttatgtggaaatattttcaagataatgttccttaggaagaaaataacattcttgggttgagggaaggaatgccatacactactgtctcttcagatctgaaatactccagtttagagccaggaaatttcacaggtcacaccgatttttagcattaaaaactaaggaatatacttagcacttacttaatcttttcagttttccagtttacgtctcaggaatgaagtgtagtctatggttgacaatggagttttgtgatcctgcttattgtaactgacaactgttttcaactccaagagctaaactattggcagttcatgttaagttagagtgagggtgtaggtagtgtcagtgagtggctcttgtgccygctgtagacattaggcctgcactagggccatgtgctgtcaagattcaggaacatggctttaacaagcagatcttgtatcaaggcagaggtgatgccatgccatacttttaggaagtctgagatgataaatatttcaaggtcagtgaagtctatcaatcattctccccttcctcatcagcaatggtagatagaaatgtcctaaacttttctaaatcctagtgatgaggatgtgctgatattcaacatagtccttaaagtgaaaactgagttgttgctgacctccacaaaagaatatggaaaaaagccttgctgtacacctagttgtacagccactctggccaattccatttcctgtccctctgtggttctgactggagaccccagtgtgggggaggtcttaccatttaatatagaaatgatatcaataactaatgctatgtacttggaaaatccaaataaggaagttttaggttggtgcataactttgtttctcaaattttcgttgtcagaacaaatggaaggagaatattatttagactaatccagatttgctttctatgaaaatctaatgtctggattatcttccttttctcatggcctaagaaataaggatcaataaggaatgatttgaatgtaattttgtgaatgtgtggaaaatataaagcagggatttagccttaataaaggtaaccttctgacatctgttgttaatccccctttgtactcttttcctgtatctgcactgttattttgagatgtcatactgtacactgtattgtaaaaataaaaagtaaaattatatttcaaattttaaaagccactaagcaatttctcttgctatttgctcggccactcaaggtttccacacatgtaaagaccaccctcctcttcaagtttttgccaaaagcaagaccattggatcctccagctacaacacaaaatactttttgatttgttctttacagagggatagtgccccctgttggcacaggtataggtaggtcctgtttccttaattattaaaaccaacaactaagtgtattaaagatggacaacgcaagg

SEQ ID NO: 4408 - DNA, 4766 bp, Homo sapiens
aaatagaagacttgttttcttcacttaaacatatccaacatactttggtagattmtcagagccaggaggatatttcactgcttttacaacttgttcaaaataaggatttccagaatgcatttaagatacacaatgccatcacagtacacatgaacaaggccagtcctccatttcctcttatctccaacgcacaagatcttgctcaagaggtacaaactgttttgaagccagttcatcataaggaaggacaagaactaactgctttgctgaatactccacatattcaggcacttttactggcccacgataaggttgctgagcaggaaatgcagctagagcccattacagatgagagagtttatgaaagtattggccagtatggaggagaaactgtaaaaatagttcgtatagaaaaggctcgtgatattccgttgggtgctacagttcgtaatgaaatggactctgtcatcattagccggatagtmaaagggggtgctgcagagaaaagtggtctgttgcatgaaggagatgaagttctagagattaatggcattgaaattcgggggaaagatgtcaatgaggtttttgacttgttgtctgatatgcatggtactttgacttttgtcctgattcccagtcaacagatcaagccgcctcctgccaaggaaacagtaatccatgtaaaagctcattttgactatgacccctcagatgacccttatgttccatgtcgagagttaggtctgtcttttcaaaaaggtgatatacttcatgtgatcagtcaagaagatccaaactggtggcaggcctacagggaaggggacgaagataatcaacctctagccgggcttgttccagggaaaagctttcagcagcaaagggaagccatgaaacaaaccatagaagaagataaggagccagaaaaatcaggaaaactgtggtgtgcaaagaagaataaaaagaagaggaaaaaggttttatataatgccaataaaaatgatgattatgacaacgaggagatcttaacctatgaggaaatgtcactttatcatcagccagcaaataggaagagacctatcatcttgattggtccacagaactgtggccagaatgaattgcgtcagaggctcatgaacaaagaaaaggaccgctttgcatctgcagttcctcatacaacccggagtaggcgagaccaagaagtagccggtagagattaccactttgtttcgcggcaagcattcgaggcagacatagcagctggaaagttcattgagcatggtgaatttgagaagaatttgtatggaactagcatagattctgtacggcaagtgatcaactctggcaaaatatgtcttttaagtcttcgtacacagtcattgaagactctccggaattcagatttgaaaccatatattatcttcattgcacccccttcacaagaaagacttcgggcattattggccaaagaaggcaagaatccaaagcctgaagagttgagagaaatcattgagaagacaagagagatggagcagaacaatggccactactttgatacggcaattgtgaattccgatcttgataaagcctatcaggaattgcttaggttaattaacaaacttgatactgaacctcagtgggtaccatccacttggctgaggtgaaagaaacatccattctgtggcatgttggacttgatctggcaaaaactgccaataggaggactgcccgacactgcagcaagattgaggataagatggaaggcagcagtataagctgtagatctgttcttagatctcttgaattagtgagacgacagttcccttaggcagtttgtgcatggcatcctttattctctatacatggctttagcggttcttgcctcattttgggattctaaatggaagctttcaacagagcattccattttgtcctgttaaaaccttttgttttcacctaaaccctttctgcttagttgtatctctgtgaaaaacttgtatacacaagcgtccatgtctcacacaaatattgatgtgattattcttaagtgttaaatcattaacacttaaatgacttcattgggaatattgagcagagggactgtgcttctatgcactgggcaaggcagtatttgcttaggaaactaatktagtcatcagagatactttcctaaaaaggaaaaataaaaaacaaaatggtgccactttgggttgaagctactttgttaggctygaattcatttatatgtcttttgattcttaaaaaaacaaaaaacattccattagaagcaccagtttttttgctcaractttgtggatcagactctacactcaacacactctaatctacttaaaggtatacaaaatatgctgatcttttttaaattatgatttcctgaatttttttcttaagtcgtctcaactgatttactcacttagcttcccttccctcatcagcatagtataatagaatgtatgttacatttttatgaatggcaggtgttcattataatctgtattgacktaaaaagtttcttcctcatgatgctaatagttttttgtatacatgggaggatagcacatttgacagtttttgcatttttatgtatgagcacagtatcctatgactgtgctacgtatatataggtaataaactggaattctgttgatgaatatagctgctgtactgtatattaatatttaatagatcaacaaatggtcattgaaaacacttgtttagcattagaataaaattatatatgtccttgggaaatattatgacagttgactttaagatcaaaaggaarggaagacctgaaagtcatttgaacattttaggaaaagaatattggagagaaaaaggtattaaatatatagaaataggtttttaacctaacaaggtctgcctcttatgacgagaatgcaacagcttggtaaatcataaaagaaacatttaagctaataggattttcgtactgtctctatagctgtagctttaaaattcaacgtatataattggcatggaaacttaatttgcagtcttttcaagcctttaggatagtgtgatgtgtaacaaacaacctcaaatgtgaatgccttgattttatttttatggtgactttagctacagcatttcctatacccagagctaaacactggaataatactgacatcatttaatttaacataagcaattatgtttaaggagtaatttgtgtcatgtacatatttrattgattttttttcttctacataattttatttgaacaaatgtagacagtttatatgtcgcctttttctgttcaaatttgcatggcctattaagttggctggagagtgttttatgtggaaatattttcaagataatgttccttaggaagaaaataacattcttgggttgagggaaggaatgccatacactactgtctcttcagatctgaaatactccagtttagagccaggaaatttcacaggtcacaccgatttttagcattaaaaactaaggaatatacttagcacttacttaatcttttcagttttccagtttacgtctcaggaatgaagtgtagtctatggttgacaatggagttttgtgatcctgcttattgtaactgacaactgttttcaactccaagagctaaactattggcagttcatgttaagttagagtgagggtgtaggtagtgtcagtgagtggctcttgtgccygctgtagacattaggcctgcactagggccatgtgctgtcaagattcaggaacatggctttaacaagcagatcttgtatcaaggcagaggtgatgccatgccatacttttaggaagtctgagatgataaatatttcaaggtcagtgaagtctatcaatcattctccccttcctcatcagcaatggtagatagaaatgtcctaaacttttctaaatcctagtgatgaggatgtgctgatattcaacatagtccttaaagtgaaaactgagttgttgctgacctccacaaaagaatatggaaaaaagccttgctgtacacctagttgtacagccactctggccaattccatttcctgtccctctgtggttctgactggagaccccagtgtgggggaggtcttaccatttaatatagaaatgatatcaataactaatgctatgtacttggaaaatccaaataaggaagttttaggttggtgcataactttgtttctcaaattttcgttgtcagaacaaatggaaggagaatattatttagactaatccagatttgctttctatgaaaatctaatgtctggattatcttccttttctcatggcctaagaaataaggatcaataaggaatgatttgaatgtaattttgtgaatgtgtggaaaatataaagcagggatttagccttaataaaggtaaccttctgacatctgttgttaatccccctttgtactcttttcctgtatctgcactgttattttgagatgtcatactgtacactgtattgtaaaaataaaaagtaaaattatatttcaaattttaaaagccactaagcaatttctcttgctatttgctcggccactcaaggtttccacacatgtaaagaccaccctcctcttcaagtttttgccaaaagcaagaccattggatcctccagctacaacacaaaatactttttgatttgttctttacagagggatagtgccccctgttggcacaggtataggtaggtcctgtttccttaattattaaaaccaacaactaagtgtattaaagatggacaacgcaagg

SEQ ID NO: 4409 - DNA, 5048 bp, Homo sapiens
ggcggcagcccgggactccggcgagagcgacgcaaggtcggctgcggcggcggcccgagggcgcccgtgtgcccagtgcgcggcggggacggccgcgagctcgctggagggctccccagaataatccagaagtcgattccatcatggcagaactcaaggtggaggcgccggccagcgtagactggcagaaacgctgcctgaccctggaaactcagcttttccggttccgcctacaggccagcaagataagggagctgctggctgacaagatgcaggagctggagcagaggctgctggaggcagagcagagagcagagaaygctgagacccaggtgggtgtcatggaagagaaggtaaaactatccartctgaagaatgtggactctgaggggagcctgcaccggarataccaagaattgctgaaagccataaagggcaaagatgagctcatcagccagctagaggctcagctggagaagcwgaagcagatgagggcagaggaagcaaaaactgttcaagaaaaagctgcaaagatcaaggaatgggtgacactcaagttggcaaagcttgagatggagaatcagcatctgaaaagccataatcagcgcctggtggagcaggtgggatcccttcaagatgcgctagaagctattcagatagctccttcacggaagctgctggtgcccccctacggagctgcagagcaggattctgtcccttcagagccgggaatccagcctatgggccaggacagtggctcccaggcccagggtctgaaggcagctgtgcttgcaccttccccaggtgccctgcagagcaaggactctgtttctgaagcagcaagccccttggaggattctagttccagcacggtccattctggggaaacagtagaggccaagccccttcaacctcatctgggaagagagagccctccccaccagccatgcatgaagcttcttaccttcagatgtagttcagcttcctggggtgagggtctggttactgctcagagagggatgctccctgggacaaagacctctgccagggaaggtggtcctggcagcagtctgaccctaccaaaggtgcgggctcctggcaccccgcrggacagcatccagttggccaaaaggcaccacagccagccccaggtgggccatgggcactttggccgtgtggtraacattgagactgaggccttctcagccctccacccctctggccttcctgagctggagtcccgagctaggtcccgggaggaaccagagaagatggagatggaggagccacccccagcagggaagaatgaggaaagagagagcccaaaggcccttggagctgagctggaggaagtggagctgggtaacaagccacctacacccccgctgcaccagttttcatcctgggagagccggatctatgctgtggccrcatcgggcatgcggctctcagatrtgtctcccagaagtaatactgcatgctgcgcttcaagccctcctgcccttgtttcccctgggtctttctctggcctggtctacaagaatgtcactgtgcctgtctacacagcactgaaggggagagctacacagatcagcaacatgccctttatggacgagtcctctgggtctgacgatgactgcagctctcaggsgagtttccgaatctcggtcccctcctctgagtccaggaagaccagyggactaggcagcccccgggccatcaagagaggcgtctccatgtcctcactgagctccgagggtgactacgccatccccccggacgcctgctcactggacagtgactactcagagcctgagcacaaactgcagcgcacctcatcctactccaccgacgggctgggcctgggcggggagtcactggagaagtcgggctacctgctgaaaatggggagccaggtgaagacgtggaagaggcgctggtttgtcctgagacagggacagattatgtactacaagtccccgagtgatgtcatccggaaacctcaaggccaagtggatctgaactcccgctgccaaattgttcgaggggagggttcacagacgtttcagctcatctctgagaagaaaacctactacctgacggccgattcacccagcctgctggaggagtggatccgagtactccagagcctgctgaaggtgcaggccaccrggcctccagctctgcttcggggtggcaccaagcccaccgtgaagggctggctgaccaaggtaaagcatggccactccaaggtggtctggtgcgctcttgttgggaaaatcttctactactatcggagccatgaggacaagcgacccctgggctgcctgcctgtgcgggatgcgcrcatagaggaagtagatcgatcctgtgactcagacgaggactatgaggctggaggaaccagacggttgctttcctcccactgcaccctggtgatccaccccacagagcacagccccacctacctcctcattggcaccaagcatgaaaaggatacgtggctctaccacctcacagtggctgcaggtggcagcagtgccaaggtgggcactgcctatgarcagctcattggaaaactgatggatggtgaaggagatccagattcgccgctctggaggcaccccatgctgtgctacagcaaagacggcctatacgcctccctcaccaccctgccctctgaggccttgcagacggaggccctcaagctcttcaagtcctgccagctcttcatcaacgtgccggtggaagctgcctcggtggactaccatgtgtccctggcccagaccgcactgcaggtctgcctggttcaccccgagctgcagagtgagatctactgccaactcatgaagcagaccagctgccgcccacctcagaagtactccctcatgcagtgctggcagctcctcgctctgtgtgctccacttttcctgcctcagcatcacttcctctggtatgtcaagcagcagctccaacgccatgcagatcccagaagtgaaactggccagtatgccacctactgccagcgggcagtggagcggaccctgcggaccggggagcgggaagccaggccatcrcgcatggaagtggtgtccatcctgctgcgtaaccccttccaccactccttgcccttcagcatccccgtgcactttaccaacgggacttaccatgtggttggttttgacggctcttccacggttgatgagttcctccagcggctgaaccaggagataggcatgagaaagccatcccactctggctttgccctcttcacggacgatccctcgggcagggacctggagcactgcctgcagggaagtgtcaagatctgtgatgccatctccaagtgggaacaagccatgaaggagctgcaccccggaaagtctgagggtgggacacgcgtcgtgaagctgatgtacaagaacaggctgtactttcgcagtcaagtcaaaggggagacggaccgagaacggctgctccttgcctctcaaaccagtagagagatagtggcagggaggtttcctatcaacaaggaattggctcttgagatggctgccctgatggcccaggtagaatatggggacttggagaagcctgccctgycaggccctggaggcacatcccctgccaaggctcagcatcttctccagcaggtcctagacaggttccaccccaggcgctatagacatggggcccccgctgaacagctgaggcacctggcagatatgttgaccacaaaatgggcaacattgcaaggatgctcccctcctgagtgcatccgcatctacctgaccgtggccaggaaatggcctttctttggtgctaaactttttgctgctcagcctgcccagctgtcttccaaggagaacgctctggtgtggattgctgtgaatgaggatggcgtcagcatcctggaccacaacactatgcaagtgcacatcacttacccctactcttcagtgacaacgtttggtggctgcagggatgacttcatgcttgtgattagatctatcccagacaagagctctggaaaaagccacattgagaagttgatcttccggatggctgctcccaagattgcagaagcyaccttcatcatggccagctatatgaaccattgcactacaactgtgaacccccccaccaacccacccggagcctgccagctgtgggaactggatggacgacagttcttttcttctgtttcctgtgctaccaaggggccaacgttgctgtgaatatttctcctacccgattccccaccaccactagtgcctctggatttagagatatatatcctaggcaaaaactgcgaggccagaactagtttatctgaacacctcagctgctgtaagcttctcctctctcaccccgtaaactgacaagcatgatgaaaaaagaagcasatccaagtttctgcctcttttaaatgtacttgactttgcaaggcaagtagttttacagccatttctgttcacacttttcaccccacaacttggggatctagctgagacatttctacctcgaacaagtcacatgtaccacaggttcctgaataattcctgcagggctggtgacagacataacagctctggttttataatatcttgggtatctctaaggccaataaggataacattatctacccagagagtttagaagaaaagtaggagtccraaggaagagtaaacaagaatggagctgtgttcacactgaatttggggtcaatctatttcccccaccctctctcctccccaacccttcaggaaccctttagtttattaatcttatacagaagaaactaacttagaaacaaaggattcaatatttgcttatttattctttgttaacatgagagtcccatgtctgaaaaccaaagtccaawttctgtctggccttttgtctcatccttcttggcaaaagtagcttttgaactgatatawaaaaaaatgctgagtaacagaaaagtattaatgtgcttgacaccatgactgaaatactatgatcttgtttgtcaataaaaagcagctatctgtgaaccaggwaac

SEQ ID NO: 4410 - DNA, 2808 bp, Homo sapiens
ggcgctagggacgggagcgcgcgcgggagctagagagcagtggtctcggcgctsgtccggcccgcagcttcgggtcctcaggcggctgttgctccggaacgggtggttggggaggggggggtggggggactctagacagctgaggcgcgaaagcgatgagtcctcggctcttcctcctccttctccgggacccgctctctgcctccctctccaacgcccggatgatctgagccgcgagggcgccgacagccgggggcccggacgcagcccggctcctcccctcctccgccccttccccagcctgacctggcccgccgctgcagcggtgacccctcccccggctgccgccgctgccgccgccgccgcctcggccgaccagggacctgcccgcctgcggctgctccggacctagaggatcaagacataatgggagcatttttagacaagccaaagatggaaaagcataatgcccaggggcagggtaatgggttgcgatatgggctaagcagcatgcaaggctggcgtgttgaaatggaggatgcacatacggctgtgatcggtttgccaagtggacttgaatcgtggtcattctttgctgtgtatgatgggcatgctggttctcaggttgccaaatactgctgtgagcatttgttagatcacatcaccaataaccaggattttaaagggtctgcaggagcaccttctgtggaaaatgtaaagaatggaatcagaacaggttttctggagattgatgaacacatgagagttatgtcagagaagaaacatggtgcagatagaagtgggtcaacagctgtaggtgtcttaatttctccccaacatacttatttcattaactgtggagactcaagaggtttactttgtaggaacaggaaagttcatttcttcacacaagatcacaaaccaagtaatccgctggagaaagaacgaattcagaatgcaggtggctctgtaatgattcagcgtgtgaatggctctctggctgtatcgagggcccttggggattttgattacaaatgtgtccatggaaaaggtcctactgagcagcttgtctcaccagagcctgaagtccatgatattgaaagatctgaagaagatgatcagttcattatccttgcatgtgatggtatctgggatgttatgggaaatgaagagctctgtgattttgtaagatccagacttgaagtcactgatgaccttgagaaagtttgcaatgaagtagtcgacacctgtttgtataagggaagtcgagacaacatgagtgtgattttgatctgttttccaaatgcacccaaagtatcgccagaagcagtgaagaaggaggcagagttggacaagtacctggaatgcagagtagaagaaatcataaagaagcagggggaaggcgtccccgacttagtccatgtgatgcgcacattagcgagtgagaacatccccagcctcccaccagggggtgaattggcaagcaagaggaatgttattgaagccgtttacaatagactgaatccttacaaaaatgacgacactgactctacatcaacagatgatatgtggtaaaactgctcatctagccatggagtttaccttcacctccaaaggagagtacagctcaactttgttgaaacttttaacatccatcctcaactttaaggaaggggatatgacatgggtgagaatgattacatcagagaacttcagcagtacaacagctagcccagaactgatttttttttttttttttgtaaatttgagacttatgtaagcgtgatttcaaaccataattcgtgttgtaaatcagactccagcaatttttgttgtatgattttgtttttttgtaaagtgtaattgtccttgtacaaaatgctcatatttaattatgaactgctttaaatcactatcaaagttacaagaaatgtttggcttattgtgtgatgcaacagatatrtagccctttcaagtcatgttgtgtttggacttggggttggaacagggagagcagcagccatgtcagctacacgctcaaatgtgcagatgattatggaaaataacctcaaaatcttacaaagctgaacatccaaggagtyattgaaaactatcttaaatgttcttggtaggggagttggcattgttgataaagccagtcccttcatttaactgtctttcaggatgttccttcgttgtttccatgagtattgcaggtaataatacagtgtattcataagaatctcaatcttggggctaaatgccttgtttctttgcacctcttttcaagtccttacatttaattactaattgataagcagcagcttcctacatatagtaggaaactgccacatttttgctatcatgattggctgggcctgctgctgttcctagtaagatattytgaattccattttatcaataaagcttgatttaacaaacaagaaacttaatcatgtatgtgtaattcctcttttaccctggccttttaaaacactgtgccgttgtaatgagacgtttctcatagggaaagatgttagtctcttttaattggacaacactgtcactcaaggcatagatgaaactttccttccattagaaagactaaaagatttaattcttggttgtaccttaatctattttttaaataggtttctttcaggctgcttatttttcattaagatgtgtatcagcttggatttgcctactgtttaattaaaatatttattgtcaaagtttgacaatctaacactctatggtaggggtgtgtgtgtgtgtgtttgtgagtgtgtgtttgcctgtgatttt

SEQ ID NO: 4411 - DNA, 1971 bp, Homo sapiens
ggcgctagggacgggagcgcgcgcgggagctagagagcagtggtctcggcgctsgtccggcccgcagcttcgggtcctcaggcggctgttgctccggaacgggtggttggggaggggggggtggggggactctagacagctgaggcgcgaaagcgatgagtcctcggctcttcctcctccttctccgggacccgctctctgcctccctctccaacgcccggatgatctgagccgcgagggcgccgacagccgggggcccggacgcagcccggctcctcccctcctccgccccttccccagcctgacctggcccgccgctgcagcggtgacccctcccccggctgccgccgctgccgccgccgccgcctcggccgaccagggacctgcccgcctgcggctgctccggacctagaggatcaagacataatgggagcatttttagacaagccaaagatggaaaagcataatgcccaggggcagggtaatgggttgcgatatgggctaagcagcatgcaaggctggcgtgttgaaatggaggatgcacatacggctgtgatcggtttgccaagtggacttgaatcgtggtcattctttgctgtgtatgatgggcatgctggttctcaggttgccaaatactgctgtgagcatttgttagatcacatcaccaataaccaggattttaaagggtctgcaggagcaccttctgtggaaaatgtaaagaatggaatcagaacaggttttctggagattgatgaacacatgagagttatgtcagagaagaaacatggtgcagatagaagtgggtcaacagctgtaggtgtcttaatttctccccaacatacttatttcattaactgtggagactcaagaggtttactttgtaggaacaggaaagttcatttcttcacacaagatcacaaaccaagtaatccgctggagaaagaacgaattcagaatgcaggtggctctgtaatgattcagcgtgtgaatggctctctggctgtatcgagggcccttggggattttgattacaaatgtgtccatggaaaaggtcctactgagcagcttgtctcaccagagcctgaagtccatgatattgaaagatctgaagaagatgatcagttcattatccttgcatgtgatggtatctgggatgttatgggaaatgaagagctctgtgattttgtaagatccagacttgaagtcactgatgaccttgagaaagtttgcaatgaagtagtcgacacctgtttgtataagggaagtcgagacaacatgagtgtgattttgatctgttttccaaatgcacccaaagtatcgccagaagcagtgaagaaggaggcagagttggacaagtacctggaatgcagagtagaagaaatcataaagaagcagggggaaggcgtccccgacttagtccatgtgatgcgcacattagcgagtgagaacatccccagcctcccaccagggggtgaattggcaagcaagaggaatgttattgaagccgtttacaatagactgaatccttacaaaaatgacgacactgactctacatcaacagatgatatgtggtaaaactgctcatctagccatggagtttaccttcacctccaaaggagagtacagctcaactttgttgaaacttttaacatccatcctcaactttaaggaaggggatatgacatgggtgagaatgattacatcagagaacttcagcagtacaacagctagcccagaactgatttttttttttttttttgtttaaatcactatcaaagttacaagaaatgtttggcttattgtgtgatgcaacagatatrtagccctttcaagtcatgttgtgtttggacttggggttggaacagggagagcagcagccatgtcagctacacgctcaaatgtgcagatgattatggaaaataacctcaaaatcttacaaagctgaacatccaaggagtyattgaaaactat

SEQ ID NO: 4412 - DNA, 1395 bp, Homo sapiens
ggcgctagggacgggagcgcgcgcgggagctagagagcagtggtctcggcgctsgtccggcccgcagcttcgggtcctcaggcggctgttgctccggaacgggtggttggggaggggggggtggggggactctagacagctgaggcgcgaaagcgatgagtcctcggctcttcctcctccttctccgggacccgctctctgcctccctctccaacgcccggatgatctgagccgcgagggcgccgacagccgggggcccggacgcagcccggctcctcccctcctccgccccttccccagcctgacctggcccgccgctgcagcggtgacccctcccccggctgccgccgctgccgccgccgccgcctcggccgaccagggacctgcccgcctgcggctgctccggacctagaggatcaagacataatgggagcatttttagacaagccaaagatggaaaagcataatgcccaggggcagggtaatgggttgcgatatgggctaagcagcatgcaaggctggcgtgttgaaatggaggatgcacatacggctgtgatcggtttgccaagtggacttgaatcgtggtcattctttgctgtgtatgatgggcatgctggttctcaggttgccaaatactgctgtgagcatttgttagatcacatcaccaataaccaggattttaaagggtctgcaggagcaccttctgtggaaaatgtaaagaatggaatcagaacaggttttctggagattgatgaacacatgagagttatgtcagagaagaaacatggtgcagatagaagtgggtcaacagctgtaggtgtcttaatttctccccaacatacttatttcattaactgtggagactcaagaggtttactttgtaggaacaggaaagttcatttcttcacacaagatcacaaaccaagtaatccgctggagaaagaacgaattcagaatgcaggtggctctgtaatgattcagcgtgtgaatggctctctggctgtatcgagggcccttggggattttgattacaaatgtgtccatggaaaaggtcctactgagcagcttgtctcaccagagcctgaagtccatgatattgaaagatctgaagaagatgatcagttcattatccttgcatgtgatggtatctgggatgttatgggaaatgaagagctctgtgattttgtaagatccagacttgaagtcactgatgaccttgagaaagtttgcaatgaagtagtcgacacctgtttgtataagggaagtcgagacaacatgagtgtgattttgatctgttttccaaatgcacccaaagtatcgccagaagcagtgaagaaggaggcagagttggacaagtacctggaatgcagagtagaaggtggatcatttaacaaa

SEQ ID NO: 4413 - DNA, 1398 bp, Homo sapiens
ggcgctagggacgggagcgcgcgcgggagctagagagcagtggtctcggcgctsgtccggcccgcagcttcgggtcctcaggcggctgttgctccggaacgggtggttggggaggggggggtggggggactctagacagctgaggcgcgaaagcgatgagtcctcggctcttcctcctccttctccgggacccgctctctgcctccctctccaacgcccggatgatctgagccgcgagggcgccgacagccgggggcccggacgcagcccggctcctcccctcctccgccccttccccagcctgacctggcccgccgctgcagcggtgacccctcccccggctgccgccgctgccgccgccgccgcctcggccgaccagggacctgcccgcctgcggctgctccggacctagaggatcaagacataatgggagcatttttagacaagccaaagatggaaaagcataatgcccaggggcagggtaatgggttgcgatatgggctaagcagcatgcaaggctggcgtgttgaaatggaggatgcacatacggctgtgatcggtttgccaagtggacttgaatcgtggtcattctttgctgtgtatgatgggcatgctggttctcaggttgccaaatactgctgtgagcatttgttagatcacatcaccaataaccaggattttaaagggtctgcaggagcaccttctgtggaaaatgtaaagaatggaatcagaacaggttttctggagattgatgaacacatgagagttatgtcagagaagaaacatggtgcagatagaagtgggtcaacagctgtaggtgtcttaatttctccccaacatacttatttcattaactgtggagactcaagaggtttactttgtaggaacaggaaagttcatttcttcacacaagatcacaaaccaagtaatccgctggagaaagaacgaattcagaatgcaggtggctctgtaatgattcagcgtgtgaatggctctctggctgtatcgagggcccttggggattttgattacaaatgtgtccatggaaaaggtcctactgagcagcttgtctcaccagagcctgaagtccatgatattgaaagatctgaagaagatgatcagttcattatccttgcatgtgatggtatctgggatgttatgggaaatgaagagctctgtgattttgtaagatccagacttgaagtcactgatgaccttgagaaagtttgcaatgaagtagtcgacacctgtttgtataagggaagtcgagacaacatgagtgtgattttgatctgttttccaaatgcacccaaagtatcgccagaagcagtgaagaaggaggcagagttggacaagtacctggaatgcagagtagaaggtggatcatttaacaaaaaa

SEQ ID NO: 4414 - DNA, 2841 bp, Homo sapiens
ggtggcggcgctagggacgggagcgcgcgcgggagctagagagcagtggtctcggcgctsgtccggcccgcagcttcgggtcctcaggcggctgttgctccggaacgggtggttggggaggggggggtggggggactctagacagctgaggcgcgaaagcgatgagtcctcggctcttcctcctccttctccgggacccgctctctgcctccctctccaacgcccggatgatctgagccgcgagggcgccgacagccgggggcccggacgcagcccggctcctcccctcctccgccccttccccagcctgacctggcccgccgctgcagcggtgacccctcccccggctgccgccgtcgccgccgcggtgaccccctccccggctgccgccgccgccgcctcggccgaccagggacctgcccgcctgcggctgctccggacctagaggatcaagacataatgggagcatttttagacaagccaaagatggaaaagcataatgcccaggggcagggtaatgggttgcgatatgggctaagcagcatgcaaggctggcgtgttgaaatggaggatgcacatacggctgtgatcggtttgccaagtggacttgaatcgtggtcattctttgctgtgtatgatgggcatgctggttctcaggttgccaaatactgctgtgagcatttgttagatcacatcaccaataaccaggattttaaagggtctgcaggagcaccttctgtggaaaatgtaaagaatggaatcagaacaggttttctggagattgatgaacacatgagagttatgtcagagaagaaacatggtgcagatagaagtgggtcaacagctgtaggtgtcttaatttctccccaacatacttatttcattaactgtggagactcaagaggtttactttgtaggaacaggaaagttcatttcttcacacaagatcacaaaccaagtaatccgctggagaaagaacgaattcagaatgcaggtggctctgtaatgattcagcgtgtgaatggctctctggctgtatcgagggcccttggggattttgattacaaatgtgtccatggaaaaggtcctactgagcagcttgtctcaccagagcctgaagtccatgatattgaaagatctgaagaagatgatcagttcattatccttgcatgtgatggtatctgggatgttatgggaaatgaagagctctgtgattttgtaagatccagacttgaagtcactgatgaccttgagaaagtttgcaatgaagtagtcgacacctgtttgtataagggaagtcgagacaacatgagtgtgattttgatctgttttccaaatgcacccaaagtatcgccagaagcagtgaagaaggaggcagagttggacaagtacctggaatgcagagtagaagaaatcataaagaagcagggggaaggcgtccccgacttagtccatgtgatgcgcacattagcgagtgagaacatccccagcctcccaccagggggtgaattggcaagcaagaggaatgttattgaagccgtttacaatagactgaatccttacaaaaatgacgacactgactctacatcaacagatgatatgtggtaaaactgctcatctagccatggagtttaccttcacctccaaaggagagtacagctcaactttgttgaaacttttaacatccatcctcaactttaaggaaggggatatgacatgggtgagaatgattacatcagagaacttcagcagtacaacagctagcccagaactgatttttttttttttttttgtaaatttgagacttatgtaagcgtgatttcaaaccataattcgtgttgtaaatcagactccagcaatttttgttgtatgattttgtttttttgtaaagtgtaattgtccttgtacaaaatgctcatatttaattatgaactgctttaaatcactatcaaagttacaagaaatgtttggcttattgtgtgatgcaacagatatrtagccctttcaagtcatgttgtgtttggacttggggttggaacagggagagcagcagccatgtcagctacacgctcaaatgtgcagatgattatggaaaataacctcaaaatcttacaaagctgaacatccaaggagtyattgaaaactatcttaaatgttcttggtaggggagttggcattgttgataaagccagtcccttcatttaactgtctttcaggatgttccttcgttgtttccatgagtattgcaggtaataatacagtgtattcataagaatctcaatcttggggctaaatgccttgtttctttgcacctcttttcaagtccttacatttaattactaattgataagcagcagcttcctacatatagtaggaaactgccacatttttgctatcatgattggctgggcctgctgctgttcctagtaagatattytgaattccattttatcaataaagcttgatttaacaaacaagaaacttaatcatgtatgtgtaattcctcttttaccctggccttttaaaacactgtgccgttgtaatgagacgtttctcatagggaaagatgttagtctcttttaattggacaacactgtcactcaaggcatagatgaaactttccttccattagaaagactaaaagatttaattcttggttgtaccttaatctattttttaaataggtttctttcaggctgcttatttttcattaagatgtgtatcagcttggatttgcctactgtttaattaaaatatttattgtcaaagtttgacaatctaacactctatggtaggggtgtgtgtgtgtgtgtttgtgagtgtgtgtttgcctgtgatttt

SEQ ID NO: 4415 - DNA, 2969 bp, Homo sapiens
aggaaggcaggggccaaagaggaagttgtcccctcttgggggccctggggctcccggggtcaggattttgatactctgaagcaggaaactttgattcccatggcaaaccctgttcctgttcagaggagccacctccagggccccattctcaggctgcgcyacatggtgaagcagttggagaatggggagataaacattgaggagctgaagaaaaatctggagtacacagcwtctctgctggaagccgtctacatagatgagacacggcaaatcttggacacggaggacgagctgcaggagctgcggtcagatgccgtgccttcggaggtgcgggactggctggcctccaccttcacccagcaggcccgggccaaaggccgccgagcagaggagaagcccaagttccgaagcattgtgcacgctgtgcaggctgggatcttcgtggaacggatgttccggagaacatacacctctgtgggccccacttactctactgcggttctcaactgtctcaagaacctggatctctggtgctttgatgtcttttccttgaaccaggcagcagatgaccatgccctgaggaccattgtttttgagttgctgactcggcataacctcatcagccgcttcaagattcccactgtgtttttgatgagtttcctggatgccttggagacaggctatgggaagtacaagaatccttaccacaaccagatccacgcagccgatgttacccagacagtccattgcttcttgctccgcacagggatggtgcactgcctgtcggagattgagctcctggccatcatctttgctgcagctatccatgattatgagcacacgggcactaccaacagcttccacatccagaccaagtcagaatgtgccatcgtgtacaatgatcgttcagtgctggagaatcaccacatcagctctgttttccgattgatgcaggatgatgagatgaacattttcatcaacctcaccaaggatgagtttgtagaactccgagccctggtcattgagatggtgttggccacagacatgtcctgccatttccagcaagtgaagaccatgaagacagccttgcaacagctggagaggattgacaagcccaaggccctgtctctactgctccatgctgctgacatcagccacccaaccaagcagtggttggtccacagccgttggaccaaggccctcatggaggaattcttccgtcagggtgacaaggaggcagagttgggcctgcccttttctccactctgtgaccgcacttccactctagtggcacagtctcagatagggttcatcgacttcattgtggagcccacattctctgtgctgactgacgtggcagagaagagtgttcagcccctggcggatgaggactccaagtctaaaaaccagcccagctttcagtggcgccagccctctctggatgtggaagtgggagaccccaaccctgatgtggtcagctttcgttccacctgggtcaagcgcattcaggagaayaagcagaaatggaaggaacgggcagcaagtggcatcaccaaccagatgtccattgacgagctgtccccctgtgaagaagaggcccccccatcccctgccgaagatgaacacaaccagaatgggaatctggattagccctggggctggcccaggtcttcattgagtccaaagtgtttgatgtcatcagcaccatccatcaggactggctcccccatctgctccaagggagcgtggtcgtggaagaaacaacccacctgaaggccaaatgccagagatttggggttggggaaagggcccctccccacctgacacccactggggtgcactttaatgttccggcagcaagactggggaacttcaggctcccagtggtcactgtgcccatccctcagcctctggattctcttcatggccaggtggctgccagggagcggggagcttcctggaggcttcccagggccttggggaagggtcagagatgccagccccctgggacctcccccatcctttttgcctccaagtttctaagcaatacattttgggggttccctcagccccccaccccagatcttagctggcaggtctgggtgccccttttcctcccctgggaagggctggaataggatagaaagctgggggttttcagagccctatgtgtggggaggggagtggattccttcagggcatggtacctttctaggacctgggaatggggtggagaggacatcctcttcaccccagaattgcgctgcttcagccccatctccagcctgatcctctgaatcttccttccctccctttctgatayagtgactggggcttgtcgcctgccctgagtccggagccctttgcctccttcctctcccctggggctgggaggctccatccgaccaatgtctgtaaagtgctttgaggatctccccagcaaagcaccttcagaatgtatcgacaccagctgggttagggtcaagggtgcctggggagggtgagtaatcctgcattgctaaaagagagggtctgtcccctcctytccacgtcccagaactggcccagctgcaggcactaaraagctcctcccctgagacaagtgaggggtagtcggtgaaaggcagatggacaaggggctcagggctgctgccttcctgtcctctggagagaacccagccaggcgcggtgccccttcctctcctcaggctcctccttgcccccaccttgccccaggaaaggccaaagtccaggtgactgccctccttctttcttgtaaataccaaccrtgcatttgtacagtgggccctgttcatgcgaaatccacatccatggtctcctagacctgctaccctggtacttccaccctaccccaccccgagaagggcagagacgcatgtgactcacccctgcccttggtttcccagacccctgctayagccagagaacaataaagaagggagaccagg

SEQ ID NO: 4416 - DNA, 2872 bp, Homo sapiens
ttccgtagaccgtggctgagcatggagctgtccccccgcagtcctccggagatgctggaggagtcggattgcccgtcacccctggagctgaagtcagcccccagcaagaagatgtggattaagcttcggtctctgctgcgcyacatggtgaagcagttggagaatggggagataaacattgaggagctgaagaaaaatctggagtacacagcwtctctgctggaagccgtctacatagatgagacacggcaaatcttggacacggaggacgagctgcaggagctgcggtcagatgccgtgccttcggaggtgcgggactggctggcctccaccttcacccagcaggcccgggccaaaggccgccgagcagaggagaagcccaagttccgaagcattgtgcacgctgtgcaggctgggatcttcgtggaacggatgttccggagaacatacacctctgtgggccccacttactctactgcggttctcaactgtctcaagaacctggatctctggtgctttgatgtcttttccttgaaccaggcagcagatgaccatgccctgaggaccattgtttttgagttgctgactcggcataacctcatcagccgcttcaagattcccactgtgtttttgatgagtttcctggatgccttggagacaggctatgggaagtacaagaatccttaccacaaccagatccacgcagccgatgttacccagacagtccattgcttcttgctccgcacagggatggtgcactgcctgtcggagattgagctcctggccatcatctttgctgcagctatccatgattatgagcacacgggcactaccaacagcttccacatccagaccaagtcagaatgtgccatcgtgtacaatgatcgttcagtgctggagaatcaccacatcagctctgttttccgattgatgcaggatgatgagatgaacattttcatcaacctcaccaaggatgagtttgtagaactccgagccctggtcattgagatggtgttggccacagacatgtcctgccatttccagcaagtgaagaccatgaagacagccttgcaacagctggagaggattgacaagcccaaggccctgtctctactgctccatgctgctgacatcagccacccaaccaagcagtggttggtccacagccgttggaccaaggccctcatggaggaattcttccgtcagggtgacaaggaggcagagttgggcctgcccttttctccactctgtgaccgcacttccactctagtggcacagtctcagatagggttcatcgacttcattgtggagcccacattctctgtgctgactgacgtggcagagaagagtgttcagcccctggcggatgaggactccaagtctaaaaaccagcccagctttcagtggcgccagccctctctggatgtggaagtgggagaccccaaccctgatgtggtcagctttcgttccacctgggtcaagcgcattcaggagaayaagcagaaatggaaggaacgggcagcaagtggcatcaccaaccagatgtccattgacgagctgtccccctgtgaagaagaggcccccccatcccctgccgaagatgaacacaaccagaatgggaatctggattagccctggggctggcccaggtcttcattgagtccaaagtgtttgatgtcatcagcaccatccatcaggactggctcccccatctgctccaagggagcgtggtcgtggaagaaacaacccacctgaaggccaaatgccagagatttggggttggggaaagggcccctccccacctgacacccactggggtgcactttaatgttccggcagcaagactggggaacttcaggctcccagtggtcactgtgcccatccctcagcctctggattctcttcatggccaggtggctgccagggagcggggagcttcctggaggcttcccagggccttggggaagggtcagagatgccagccccctgggacctcccccatcctttttgcctccaagtttctaagcaatacattttgggggttccctcagccccccaccccagatcttagctggcaggtctgggtgccccttttcctcccctgggaagggctggaataggatagaaagctgggggttttcagagccctatgtgtggggaggggagtggattccttcagggcatggtacctttctaggacctgggaatggggtggagaggacatcctcttcaccccagaattgcgctgcttcagccccatctccagcctgatcctctgaatcttccttccctccctttctgatayagtgactggggcaaaaggagccattgtgaccaggggctgcgggaggcctttcctgggaccttccttgggactggtctgggcccctggggcttgtcgcctgccctgagtccggagccctttgcctccttcctctcccctggggctgggaggctccatccgaccaatgtctgtaaagtgctttgaggatctccccagcaaagcaccttcagaatgtatcgacaccagctgggttagggtcaagggtgcctggggagggtgagtaatcctgcattgctaaaagagagggtctgtcccctcctytccacgtcccagaactggcccagctgcaggcactaaraagctcctcccctgagacaagtgaggggtagtcggtgaaaggcagatggacaaggggctcagggctgctgccttcctgtcctctggagagaacccagccaggcgcggtgccccttcctctcctcaggctcctccttgcccccaccttgccccaggaaaggccaaagtccaggtgactgccctccttctttcttgtaaataccaaccrtgcatttgtacagtgggccctgt

SEQ ID NO: 4417 - DNA, 3100 bp, Homo sapiens
cggcggtagcggcagcagcagcggcggtgcggagagcttggactgggagcccaaagctcggctgggcagcgggagaggaggagccgcaggagctgcagctctgccagcttgggccgagcctagagacaccggcctggctggtccacgccagccgcagaccgtggctgagcatggagctgtccccccgcagtcctccggagatgctggaggagtcggattgcccgtcacccctggagctgaagtcagcccccagcaagaagatgtggattaagcttcggtctctgctgcgcyacatggtgaagcagttggagaatggggagataaacattgaggagctgaagaaaaatctggagtacacagcwtctctgctggaagccgtctacatagatgagacacggcaaatcttggacacggaggacgagctgcaggagctgcggtcagatgccgtgccttcggaggtgcgggactggctggcctccaccttcacccagcaggcccgggccaaaggccgccgagcagaggagaagcccaagttccgaagcattgtgcacgctgtgcaggctgggatcttcgtggaacggatgttccggagaacatacacctctgtgggccccacttactctactgcggttctcaactgtctcaagaacctggatctctggtgctttgatgtcttttccttgaaccaggcagcagatgaccatgccctgaggaccattgtttttgagttgctgactcggcataacctcatcagccgcttcaagattcccactgtgtttttgatgagtttcctggatgccttggagacaggctatgggaagtacaagaatccttaccacaaccagatccacgcagccgatgttacccagacagtccattgcttcttgctccgcacagggatggtgcactgcctgtcggagattgagctcctggccatcatctttgctgcagctatccatgattatgagcacacgggcactaccaacagcttccacatccagaccaagtcagaatgtgccatcgtgtacaatgatcgttcagtgctggagaatcaccacatcagctctgttttccgattgatgcaggatgatgagatgaacattttcatcaacctcaccaaggatgagtttgtagaactccgagccctggtcattgagatggtgttggccacagacatgtcctgccatttccagcaagtgaagaccatgaagacagccttgcaacagctggagaggattgacaagcccaaggccctgtctctactgctccatgctgctgacatcagccacccaaccaagcagtggttggtccacagccgttggaccaaggccctcatggaggaattcttccgtcagggtgacaaggaggcagagttgggcctgcccttttctccactctgtgaccgcacttccactctagtggcacagtctcagatagggttcatcgacttcattgtggagcccacattctctgtgctgactgacgtggcagagaagagtgttcagcccctggcggatgaggactccaagtctaaaaaccagcccagctttcagtggcgccagccctctctggatgtggaagtgggagaccccaaccctgatgtggtcagctttcgttccacctgggtcaagcgcattcaggagaayaagcagaaatggaaggaacgggcagcaagtggcatcaccaaccagatgtccattgacgagctgtccccctgtgaagaagaggcccccccatcccctgccgaagatgaacacaaccagaatgggaatctggattagccctggggctggcccaggtcttcattgagtccaaagtgtttgatgtcatcagcaccatccatcaggactggctcccccatctgctccaagggagcgtggtcgtggaagaaacaacccacctgaaggccaaatgccagagatttggggttggggaaagggcccctccccacctgacacccactggggtgcactttaatgttccggcagcaagactggggaacttcaggctcccagtggtcactgtgcccatccctcagcctctggattctcttcatggccaggtggctgccagggagcggggagcttcctggaggcttcccagggccttggggaagggtcagagatgccagccccctgggacctcccccatcctttttgcctccaagtttctaagcaatacattttgggggttccctcagccccccaccccagatcttagctggcaggtctgggtgccccttttcctcccctgggaagggctggaataggatagaaagctgggggttttcagagccctatgtgtggggaggggagtggattccttcagggcatggtacctttctaggacctgggaatggggtggagaggacatcctcttcaccccagaattgcgctgcttcagccccatctccagcctgatcctctgaatcttccttccctccctttctgatayagtgactggggcttgtcgcctgccctgagtccggagccctttgcctccttcctctcccctggggctgggaggctccatccgaccaatgtctgtaaagtgctttgaggatctccccagcaaagcaccttcagaatgtatcgacaccagctgggttagggtcaagggtgcctggggagggtgagtaatcctgcattgctaaaagagagggtctgtcccctcctytccacgtcccagaactggcccagctgcaggcactaaraagctcctcccctgagacaagtgaggggtagtcggtgaaaggcagatggacaaggggctcagggctgctgccttcctgtcctctggagagaacccagccaggcgcggtgccccttcctctcctcaggctcctccttgcccccaccttgccccaggaaaggccaaagtccaggtgactgccctccttctttcttgtaaataccaaccrtgcatttgtacagtgggccctgttcatgcgaaatccacatccatggtctcctagacctgctaccctggtacttccaccctaccccaccccgagaagggcagagacgcatgtgactcacccctgcccttggtttcccagacccctgctayagccagagaacaataaagaagggagaccagg

SEQ ID NO: 4418 - DNA, 3062 bp, Homo sapiens
gagcccaaagctcggctgggcagcgggagaggaggagccgcaggagctgcagctctgccagcttgggccgagcctagagacaccggcctggctggtccacgccagccgcagttccgtagaccgtggctgagcatggagctgtccccccgcagtcctccggagatgctggaggagtcggattgcccgtcacccctggagctgaagtcagcccccagcaagaagatgtggattaagcttcggtctctgctgcgcyacatggtgaagcagttggagaatggggagataaacattgaggagctgaagaaaaatctggagtacacagcwtctctgctggaagccgtctacatagatgagacacggcaaatcttggacacggaggacgagctgcaggagctgcggtcagatgccgtgccttcggaggtgcgggactggctggcctccaccttcacccagcaggcccgggccaaaggccgccgagcagaggagaagcccaagttccgaagcattgtgcacgctgtgcaggctgggatcttcgtggaacggatgttccggagaacatacacctctgtgggccccacttactctactgcggttctcaactgtctcaagaacctggatctctggtgctttgatgtcttttccttgaaccaggcagcagatgaccatgccctgaggaccattgtttttgagttgctgactcggcataacctcatcagccgcttcaagattcccactgtgtttttgatgagtttcctggatgccttggagacaggctatgggaagtacaagaatccttaccacaaccagatccacgcagccgatgttacccagacagtccattgcttcttgctccgcacagggatggtgcactgcctgtcggagattgagctcctggccatcatctttgctgcagctatccatgattatgagcacacgggcactaccaacagcttccacatccagaccaagtcagaatgtgccatcgtgtacaatgatcgttcagtgctggagaatcaccacatcagctctgttttccgattgatgcaggatgatgagatgaacattttcatcaacctcaccaaggatgagtttgtagaactccgagccctggtcattgagatggtgttggccacagacatgtcctgccatttccagcaagtgaagaccatgaagacagccttgcaacagctggagaggattgacaagcccaaggccctgtctctactgctccatgctgctgacatcagccacccaaccaagcagtggttggtccacagccgttggaccaaggccctcatggaggaattcttccgtcagggtgacaaggaggcagagttgggcctgcccttttctccactctgtgaccgcacttccactctagtggcacagtctcagatagggttcatcgacttcattgtggagcccacattctctgtgctgactgacgtggcagagaagagtgttcagcccctggcggatgaggactccaagtctaaaaaccagcccagctttcagtggcgccagccctctctggatgtggaagtgggagaccccaaccctgatgtggtcagctttcgttccacctgggtcaagcgcattcaggagaayaagcagaaatggaaggaacgggcagcaagtggcatcaccaaccagatgtccattgacgagctgtccccctgtgaagaagaggcccccccatcccctgccgaagatgaacacaaccagaatgggaatctggattagccctggggctggcccaggtcttcattgagtccaaagtgtttgatgtcatcagcaccatccatcaggactggctcccccatctgctccaagggagcgtggtcgtggaagaaacaacccacctgaaggccaaatgccagagatttggggttggggaaagggcccctccccacctgacacccactggggtgcactttaatgttccggcagcaagactggggaacttcaggctcccagtggtcactgtgcccatccctcagcctctggattctcttcatggccaggtggctgccagggagcggggagcttcctggaggcttcccagggccttggggaagggtcagagatgccagccccctgggacctcccccatcctttttgcctccaagtttctaagcaatacattttgggggttccctcagccccccaccccagatcttagctggcaggtctgggtgccccttttcctcccctgggaagggctggaataggatagaaagctgggggttttcagagccctatgtgtggggaggggagtggattccttcagggcatggtacctttctaggacctgggaatggggtggagaggacatcctcttcaccccagaattgcgctgcttcagccccatctccagcctgatcctctgaatcttccttccctccctttctgatayagtgactggggcttgtcgcctgccctgagtccggagccctttgcctccttcctctcccctggggctgggaggctccatccgaccaatgtctgtaaagtgctttgaggatctccccagcaaagcaccttcagaatgtatcgacaccagctgggttagggtcaagggtgcctggggagggtgagtaatcctgcattgctaaaagagagggtctgtcccctcctytccacgtcccagaactggcccagctgcaggcactaaraagctcctcccctgagacaagtgaggggtagtcggtgaaaggcagatggacaaggggctcagggctgctgccttcctgtcctctggagagaacccagccaggcgcggtgccccttcctctcctcaggctcctccttgcccccaccttgccccaggaaaggccaaagtccaggtgactgccctccttctttcttgtaaataccaaccrtgcatttgtacagtgggccctgttcatgcgaaatccacatccatggtctcctagacctgctaccctggtacttccaccctaccccaccccgagaagggcagagacgcatgtgactcacccctgcccttggtttcccagacccctgctayagccagagaacaataaagaagggagaccagg

SEQ ID NO: 4419 - DNA, 2983 bp, Homo sapiens
gagcccaaagctcggctgggcagcgggagaggaggagccgcaggagctgcagctctgccagcttgggccgagcctagagacaccggcctggctggtccacgccagccgcagttccgtagaccgtggctgagcatggagctgtccccccgcagtcctccggagatgctggaggagtcggattgcccgtcacccctggagctgaagtcagcccccagcaagaagatgtggattaagcttcggtctctgctgcgcyacatggtgaagcagttggagaatggggagataaacattgaggagctgaagaaaaatctggagtacacagcwtctctgctggaagccgtctacatagatgagacacggcaaatcttggacacggaggacgagctgcaggagctgcggtcagatgccgtgccttcggaggtgcgggactggctggcctccaccttcacccagcaggcccgggccaaaggccgccgagcagaggagaagcccaagttccgaagcattgtgcacgctgtgcaggctgggatcttcgtggaacggatgttccggagaacatacacctctgtgggccccacttactctactgcggttctcaactgtctcaagaacctggatctctggtgctttgatgtcttttccttgaaccaggcagcagatgaccatgccctgaggaccattgtttttgagttgctgactcggcataacctcatcagccgcttcaagattcccactgtgtttttgatgagtttcctggatgccttggagacaggctatgggaagtacaagaatccttaccacaaccagatccacgcagccgatgttacccagacagtccattgcttcttgctccgcacagggatggtgcactgcctgtcggagattgagctcctggccatcatctttgctgcagctatccatgattatgagcacacgggcactaccaacagcttccacatccagaccaagtcagaatgtgccatcgtgtacaatgatcgttcagtgctggagaatcaccacatcagctctgttttccgattgatgcaggatgatgagatgaacattttcatcaacctcaccaaggatgagtttgtagaactccgagccctggtcattgagatggtgttggccacagacatgtcctgccatttccagcaagtgaagaccatgaagacagccttgcaacagctggagaggattgacaagcccaaggccctgtctctactgctccatgctgctgacatcagccacccaaccaagcagtggttggtccacagccgttggaccaaggccctcatggaggaattcttccgtcagggtgacaaggaggcagagttgggcctgcccttttctccactctgtgaccgcacttccactctagtggcacagtctcagatagggttcatcgacttcattgtggagcccacattctctgtgctgactgacgtggcagagaagagtgttcagcccctggcggatgaggactccaagtctaaaaaccagcccagctttcagtggcgccagccctctctggatgtggaagtgggagaccccaaccctgatgtggtcagctttcgttccacctgggtcaagcgcattcaggagaayaagcagaaatggaaggaacgggcagcaagtggcatcaccaaccagatgtccattgacgagctgtccccctgtgaagaagaggcccccccatcccctgccgaagatgaacacaaccagaatgggaatctggattagccctggggctggcccaggtcttcattgagtccaaagtgtttgatgtcatcagcaccatccatcaggactggctcccccatctgctccaagggagcgtggtcgtggaagaaacaacccacctgaaggccaaatgccagagatttggggttggggaaagggcccctccccacctgacacccactggggtgcactttaatgttccggcagcaagactggggaacttcaggctcccagtggtcactgtgcccatccctcagcctctggattctcttcatggccaggtggctgccagggagcggggagcttcctggaggcttcccagggccttggggaagggtcagagatgccagccccctgggacctcccccatcctttttgcctccaagtttctaagcaatacattttgggggttccctcagccccccaccccagatcttagctggcaggtctgggtgccccttttcctcccctgggaagggctggaataggatagaaagctgggggttttcagagccctatgtgtggggaggggagtggattccttcagggcatggtacctttctaggacctgggaatggggtggagaggacatcctcttcaccccagaattgcgctgcttcagccccatctccagcctgatcctctgaatcttccttccctccctttctgatayagtgactggggcaaaaggagccattgtgaccaggggctgcgggaggcctttcctgggaccttccttgggactggtctgggcccctggggcttgtcgcctgccctgagtccggagccctttgcctccttcctctcccctggggctgggaggctccatccgaccaatgtctgtaaagtgctttgaggatctccccagcaaagcaccttcagaatgtatcgacaccagctgggttagggtcaagggtgcctggggagggtgagtaatcctgcattgctaaaagagagggtctgtcccctcctytccacgtcccagaactggcccagctgcaggcactaaraagctcctcccctgagacaagtgaggggtagtcggtgaaaggcagatggacaaggggctcagggctgctgccttcctgtcctctggagagaacccagccaggcgcggtgccccttcctctcctcaggctcctccttgcccccaccttgccccaggaaaggccaaagtccaggtgactgccctccttctttcttgtaaataccaaccrtgcatttgtacagtgggccctgt

SEQ ID NO: 4420 - DNA, 1236 bp, Homo sapiens
actgcagtctccattggtgaggtcgtcccggagcctcgcccagctcccgcgcgctagagccgcctgctggtctcacccagccgggaccgctgacctggcgctttgtgcggctccaggcctccgagtggactccagaaagcctgaaaagctatcatggcagcaaggcccaagctccactatcccaacggaagaggccggatggagtccgtgagatgggttttagctgccgccggagtcgagtttgatgaagaatttctggaaacaaaagaacagttgtacaagttgcaggatggtaaccacctgctgttccaacaagtgcccatggttgaaattgacgggatgaagttggtacagacccgaagcattctccactacatagcagacaagcacaatctctttggcaagaacctcaaggagagaaccctgattgacatgtacgtggaggggacactggatctgctggaactgcttatcatgcatcctttcttaaaaccagatgatcarcaaaaggaagtggttaacatggcccagaaggctataattagatactttcctgtgtttgaaaagattttaaggggtcacggacaaagctttcttgttggtaatcagctgagccttgcagatgtgattttactccaaaccattttagctctagaagagaaaattcctaatatcctgtctgcatttcctttcctccaggaatacacagtgaaactaagtaatatccctacaattaagagattccttgaacctggcagcaagaagaagcctccccctgatgaaatttatgtgagaaccgtctacaacatctttaggccataaaacaacacatccatgtgtgagtgacagtgtgttcctagagatggtattgtctacagtcatgtcttaatggatcccagctctgtcatggtgctatctatgtattaagttggtaggggatctttattggaaaacttttttggagaggctggtatttaagttagatctgattgggctactcatgtcctgtagccagttcatcctcataataagaatgggcaggatctcttgttctctcctgagtgtctttctactctcctgagcgtctttctgctctccttatcctgttctcttatccttatcccctccagtctctgcctaatttttagtgtttaataacaaccgaatgtctartaaatgactctcctctgagctgtaataaataaaatggtagtaatgaatgcaatcagtrttagc

SEQ ID NO: 4421 - DNA, 1170 bp, Homo sapiens
cttgagtgagggaaaatgcagcaacaaaaataaagaacagtttcccgtgccaaaatcctgaatattcatttcgcccctgagcactgggttgaagacgcgaaattgggactgttggtctgcgacgagctgctgcatttgtatttcagaaagcctgaaaagctatcatggcagcaaggcccaagctccactatcccaacggaagaggccggatggagtccgtgagatgggttttagctgccgccggagtcgaggattgacatgtacgtggaggggacactggatctgctggaactgcttatcatgcatcctttcttaaaaccagatgatcarcaaaaggaagtggttaacatggcccagaaggctataattagatactttcctgtgtttgaaaagattttaaggggtcacggacaaagctttcttgttggtaatcagctgagccttgcagatgtgattttactccaaaccattttagctctagaagagaaaattcctaatatcctgtctgcatttcctttcctccaggaatacacagtgaaactaagtaatatccctacaattaagagattccttgaacctggcagcaagaagaagcctccccctgatgaaatttatgtgagaaccgtctacaacatctttaggccataaaacaacacatccatgtgtgagtgacagtgtgttcctagagatggtattgtctacagtcatgtcttaatggatcccagctctgtcatggtgctatctatgtattaagttgggtcctaagttgggtcttttgtgtcaamgagatcatctcttctagaaatatcaaccttttttgtccagtaaataattgttaggggatctttattggaaaacttttttggagaggctggtatttaagttagatctgattgggctactcatgtcctgtagccagttcatcctcataataagaatgggcaggatctcttgttctctcctgagtgtctttctactctcctgagcgtctttctgctctccttatcctgttctcttatccttatcccctccagtctctgcctaatttttagtgtttaataacaaccgaatgtctartaaatgactctcctctgagctgtaataaataaaatggtagtaatgaatgcaatcagtrttagccaaaataaagaatttatgagtcattgctca

SEQ ID NO: 4422 - DNA, 1344 bp, Homo sapiens
actgcagtctccattggtgaggtcgtcccggagcctcgcccagctcccgcgcgctagagccgcctgctggtctcacccagccgggaccgctgacctggcgctttgtgcggctccaggcctccgagtggactccagaaagcctgaaaagctatcatggcagcaaggcccaagctccactatcccaacggaagaggccggatggagtccgtgagatgggttttagctgccgccggagtcgagtttgatgaagaatttctggaaacaaaagaacagttgtacaagttgcaggatggtaaccacctgctgttccaacaagtgcccatggttgaaattgacgggatgaagttggtacagacccgaagcattctccactacatagcagacaagcacaatctctttggcaagaacctcaaggagagaaccctgattgacatgtacgtggaggggacactggatctgctggaactgcttatcatgcatcctttcttaaaaccagatgatcarcaaaaggaagtggttaacatggcccagaaggctataattagatactttcctgtgtttgaaaagattttaaggggtcacggacaaagctttcttgttggtaatcagctgagccttgcagatgtgattttactccaaaccattttagctctagaagagaaaattcctaatatcctgtctgcatttcctttcctccaggaatacacagtgaaactaagtaatatccctacaattaagagattccttgaacctggcagcaagaagaagcctccccctgatgaaatttatgtgagaaccgtctacaacatctttaggccataaaacaacacatccatgtgtgagtgacagtgtgttcctagagatggtattgtctacagtcatgtcttaatggatcccagctctgtcatggtgctatctatgtattaagttgggtcctaagttgggtcttttgtgtcaamgagatcatctcttctagaaatatcaaccttttttgtccagtaaataattgttaggggatctttattggaaaacttttttggagaggctggtatttaagttagatctgattgggctactcatgtcctgtagccagttcatcctcataataagaatgggcaggatctcttgttctctcctgagtgtctttctactctcctgagcgtctttctgctctccttatcctgttctcttatccttatcccctccagtctctgcctaatttttagtgtttaataacaaccgaatgtctartaaatgactctcctctgagctgtaataaataaaatggtagtaatgaatgcaatcagtrttagccaaaataaagaatttatgagtcattgctca

SEQ ID NO: 4423 - DNA, 1211 bp, Homo sapiens
actgcagtctccattggtgaggtcgtcccggagcctcgcccagctcccgcgcgctagagccgcctgctggtctcacccagccgggaccgctgacctggcgctttgtgcggctccaggcctccgagtggactccagaaagcctgaaaagctatcatggcagcaaggcccaagctccactatcccaacggaagaggccggatggagtccgtgagatgggttttagctgccgccggagtcgagtttgatgaagaatttctggaaacaaaagaacagttgtacaagttgcaggatggattgacatgtacgtggaggggacactggatctgctggaactgcttatcatgcatcctttcttaaaaccagatgatcarcaaaaggaagtggttaacatggcccagaaggctataattagatactttcctgtgtttgaaaagattttaaggggtcacggacaaagctttcttgttggtaatcagctgagccttgcagatgtgattttactccaaaccattttagctctagaagagaaaattcctaatatcctgtctgcatttcctttcctccaggaatacacagtgaaactaagtaatatccctacaattaagagattccttgaacctggcagcaagaagaagcctccccctgatgaaatttatgtgagaaccgtctacaacatctttaggccataaaacaacacatccatgtgtgagtgacagtgtgttcctagagatggtattgtctacagtcatgtcttaatggatcccagctctgtcatggtgctatctatgtattaagttgggtcctaagttgggtcttttgtgtcaamgagatcatctcttctagaaatatcaaccttttttgtccagtaaataattgttaggggatctttattggaaaacttttttggagaggctggtatttaagttagatctgattgggctactcatgtcctgtagccagttcatcctcataataagaatgggcaggatctcttgttctctcctgagtgtctttctactctcctgagcgtctttctgctctccttatcctgttctcttatccttatcccctccagtctctgcctaatttttagtgtttaataacaaccgaatgtctartaaatgactctcctctgagctgtaataaataaaatggtagtaatgaatgcaatcagtrttagccaaaataaagaatttatgagtcattgctca

SEQ ID NO: 4424 - DNA, 1267 bp, Homo sapiens
actgcagtctccattggtgaggtcgtcccggagcctcgcccagctcccgcgcgctagagccgcctgctggtctcacccagccgggaccgctgacctggcgctttgtgcggctccaggcctccgagtggactccagaaagcctgaaaagctatcatggcagcaaggcccaagctccactatcccaacggaagaggccggatggagtccgtgagatgggttttagctgccgccggagtcgagtttgatgaagaatttctggaaacaaaagaacagttgtacaagttgcaggatggtaaccacctgctgttccaacaagtgcccatggttgaaattgacgggatgaagttggattgacatgtacgtggaggggacactggatctgctggaactgcttatcatgcatcctttcttaaaaccagatgatcarcaaaaggaagtggttaacatggcccagaaggctataattagatactttcctgtgtttgaaaagattttaaggggtcacggacaaagctttcttgttggtaatcagctgagccttgcagatgtgattttactccaaaccattttagctctagaagagaaaattcctaatatcctgtctgcatttcctttcctccaggaatacacagtgaaactaagtaatatccctacaattaagagattccttgaacctggcagcaagaagaagcctccccctgatgaaatttatgtgagaaccgtctacaacatctttaggccataaaacaacacatccatgtgtgagtgacagtgtgttcctagagatggtattgtctacagtcatgtcttaatggatcccagctctgtcatggtgctatctatgtattaagttgggtcctaagttgggtcttttgtgtcaamgagatcatctcttctagaaatatcaaccttttttgtccagtaaataattgttaggggatctttattggaaaacttttttggagaggctggtatttaagttagatctgattgggctactcatgtcctgtagccagttcatcctcataataagaatgggcaggatctcttgttctctcctgagtgtctttctactctcctgagcgtctttctgctctccttatcctgttctcttatccttatcccctccagtctctgcctaatttttagtgtttaataacaaccgaatgtctartaaatgactctcctctgagctgtaataaataaaatggtagtaatgaatgcaatcagtrttagccaaaataaagaatttatgagtcattgctca

SEQ ID NO: 4425 - DNA, 3767 bp, Homo sapiens
gacgcaaagactgggcatgctccgcggcggcgcaggttttggtcacaagtaggaagaagccagtgcaccagaccggcaaagagaagcgggagccgccgcggcagcgcggccgtggggtccgccgccgccgcatcggagcgggaggaggagcagcggggagggcgaggccgccgggccgagagccgtcccgcctgctctcggtcttctgccttcgcctccgcgcggtgcgtcggacccagggtctgtcacctgggcgccaggggccgccgccggggagccggagcgggcaggaccctccctccgccgactgcggcccgagagcgcccccgcggggtggagcggcagccgccttctgcgggcggctgagtgtccgtctcgcgcccggagcgggcgaccgccgtcagcccggaggaggaggaggaggaggagggggcggccatggggctgctgtcccagggctcgccgctgagctgggaggaaaccaagcgccatgccgaccacgtgcggcggcacgggatcctccagttcctgcacatctaccacgccgtcaaggaccggcacaaggacgttctcaagtggggcgatgaggtggaatacatgtyggtatcttttgatcatgaaaataaaaaagtccggttggtcctgtctggggagaaagttcttgaaactctkcaagagaagggggaaaggacaaacccaaaccatcctaccctttggagaccagagtatgggagttacatgattgaagggacaccaggacagccctacggaggaacaatgtccgagttcaatacagttgaggccaacatgcgaaaacgccggaaggaggctacttctatattagaagaaaatcaggctctttgcacaataacttcatttcccagattaggctgtcctgggttcacactgcccgaggtcaaacccaacccagtggaaggaggagcttccaagtccctcttctttccrgatgaagcaataaacaagcaccctcgcttcagtaccttaacaagaaatatccgacataggagaggagaaaaggttgtcatcaatgtaccaatatttaaggacaagaatacaccatctccatttatagaaacatttactgaggatgatgaagcttcaagggcttctaagccggatcatatttacatggatgccatgggatttggaatgggcaattgctgtctccaggtgacattccaagcctgcagtatatctgaggccagatacctttatgatcagttggctactatctgtccaattgttatggctttgagtgctgcatctcccttttaccgaggctatgtgtcagacattgattgtcgctggggagtgatttctgcatctgtagatgatagaactcgggaggagcgaggactggagccattgaagaacaataactataggatcagtaaatcccgatatgactcaatagacagctatttatctaagtgtggtgagaaatataatgacatcgacttgacgatagataaagagatctacgaacagctgttgcaggaaggcattgatcatctcctggcccagcatgttgctcatctctttattagagacccactgacactgtttgaagagaaaatacacctggatgatgctaatgagtctgaccattttgagaatattcagtccacaaattggcagacaatgagatttaagccccytcctccaaactcagacattggatggagagtagaatttcgacccatggaggtgcaattaacagactttgagaactctgcctatgtggtgtttgtggtactgctcaccagagtgatcctttcctacaaattggattttctcattycactgtcaaaggttgatgagaacatgaaggtagcacagaaaagagatgctgtcttgcagggaatgttttatttcaggaaagatatttgcaaaggtggcaatgcagtggtggatggttgtggcaaggcccagaacagcacrgagctcgctgcagaggagtacaccctcatgagcatagayaccatcatcaatgggaaggaaggtgtgtttcctggactgatcccaattctgaactcttaccttgaaaacatggaagtggatgtggacaccagatgtagtattctgaactacctaaagctaattaagaagagagcatctggagaactaatgacagttgccagatggatgagggagtttatcgcaaaccatcctgactacaagcaagacagtgtcataactgatgaaatgaattatagccttattttgaagtgtaaccaaattgcaaatgaattatgtgaatgcccagagttacttggatcagcatttaggaaagtaaaatatagtggaagtaaaactgactcatccaactagacattctacagaaagaaaaatgcattattgacgaactggctacagtaccatgcctctcagccagcccgtgtgtataatatgaagaccaaatgatagaactgtactgttttctgggccagtgagccagaaattgattaaggctttctttggtaggtaaatctagagtttatacagtgtacatgtacatagtaaagtatttttgattaacaatgtattttaataacatatctaaagtcatcatgaactggcttgtacatttttaaattcttactctggagcaacctactgtctaagcagttttgtaaatgtactggtaattgtacaatacttgcattccagagttaaaatgtttactgtaaatttttgttcttttaaagactacctgggacctgatttattgaaatttttctctttaaaaacattttctctcgttaattttcctttgtcatttcctttgttgtctacattaaatcacttgaatccattgaaagtgcttcaagggtaatcttgggtttctagcaccttatctatgatgtttcttttgcaattggaataatcacttggtcaccttgccccaagctttcccctctgaataaatacccattgaactctgatggctgttatcaaaggaacttttctttgtttaaatttgctgatgcaggaattaagtttaaacacaactctatagaaagaaaggagattattacccagaattcacatgtagtgattattaaggacaatttttttttttaactaaaaaagttggyggcaggggtggggggtggcaatcatttttcttcctatacatacaaaggatattgtcaaaaatggcgttcttctcttgtggcctgttattctgattgctgctgtatacagttttgtcactctttagtttttagttaagcatactgatagactttcctctaaaagccattcactccagattttacctggggaatattctacatactgcttactttctctataaaactcatcaataaatcatgaaaggcactgagttttgtaaatcaggaccctaaatgtttaattgtaaataagtttcagataattattatagctttgcgttgaagtttgttgttttttttctcaactagttaagtcaactgcttctgaaataactctgtattgtagattatgcagatctttacaggcataaatatttaaactgtaatatgctaacttgaagagattgcaataaagctgcttcagctaaccctgtttatgtttaaatactagggtttgttctatattttatacatgcattttggatgattaaagaatgcctggttttcgtttgcaatttgcttgtgtaaatcaggttgtaaaaaggcagataaattgaaatgtttgtggtatgaggaaataaaagaatggaattagctttcattcagaaa

SEQ ID NO: 4426 - DNA, 3048 bp, Homo sapiens
gacgcaaagactgggcatgctccgcggcggcgcaggttttggtcacaagtaggaagaagccagtgcaccagaccggcaaagagaagcgggagccgccgcggcagcgcggccgtggggtccgccgccgccgcatcggagcgggaggaggagcagcggggagggcgaggccgccgggccgagagccgtcccgcctgctctcggtcttctgccttcgcctccgcgcggtgcgtcggacccagggtctgtcacctgggcgccaggggccgccgccggggagccggagcgggcaggaccctccctccgccgactgcggcccgagagcgcccccgcggggtggagcggcagccgccttctgcgggcggctgagtgtccgtctcgcgcccggagcgggcgaccgccgtcagcccggaggaggaggaggaggaggagggggcggccatggggctgctgtcccagggctcgccgctgagctgggaggaaaccaagcgccatgccgaccacgtgcggcggcacgggatcctccagttcctgcacatctaccacgccgtcaaggaccggcacaaggacgttctcaagtggggcgatgaggtggaatacatgtyggtatcttttgatcatgaaaataaaaaagtccggttggtcctgtctggggagaaagttcttgaaactctkcaagagaagggggaaaggacaaacccaaaccatcctaccctttggagaccagagtatgggagttacatgattgaagggacaccaggacagccctacggaggaacaatgtccgagttcaatacagttgaggccaacatgcgaaaacgccggaaggaggctacttctatattagaagaaaatcaggctctttgcacaataacttcatttcccagattaggctgtcctgggttcacactgcccgaggtcaaacccaacccagtggaaggaggagcttccaagtccctcttctttccrgatgaagcaataaacaagcaccctcgcttcagtaccttaacaagaaatatccgacataggagaggagaaaaggttgtcatcaatgtaccaatatttaaggacaagaatacaccatctccatttatagaaacatttactgaggatgatgaagcttcaagggcttctaagccggatcatatttacatggatgccatgggatttggaatgggcaattgctgtctccaggtgacattccaagcctgcagtatatctgaggccagatacctttatgatcagttggctactatctgtccaattgttatggctttgagtgctgcatctcccttttaccgaggctatgtgtcagacattgattgtcgctggggagtgatttctgcatctgtagatgatagaactcgggaggagcgaggactggagccattgaagaacaataactataggatcagtaaatcccgatatgactcaatagacagctatttatctaagtgtggtgagaaatataatgacatcgacttgacgatagataaagagatctacgaacagctgttgcaggaaggcattgatcatctcctggcccagcatgttgctcatctctttattagagacccactgacactgtttgaagagaaaatacacctggatgatgctaatgagtctgaccattttgagaatattcagtccacaaattggcagacaatgagatttaagccccytcctccaaactcagacattggatggagagtagaatttcgacccatggaggtgcaattaacagactttgagaactctgcctatgtggtgtttgtggtactgctcaccagagtgatcctttcctacaaattggattttctcattycactgtcaaaggttgatgagaacatgaaggtagcacagaaaagagatgctgtcttgcagggaatgttttatttcaggaaagatatttgcaaaggtggcaatgcagtggtggatggttgtggcaaggcccagaacagcacrgagctcgctgcagaggagtacaccctcatgagcatagayaccatcatcaatgggaaggaaggtgtgtttcctggactgatcccaattctgaactcttaccttgaaaacatggaagtggatgtggacaccagatgtagtattctgaactacctaaagctaattaagaagagagcatctggagaactaatgacagttgccagatggatgagggagtttatcgcaaaccatcctgactacaagcaagacagtgtcataactgatgaaatgaattatagccttattttgaagtgtaaccaaattgcaaatgaattatgtgaatgcccagagttacttggatcagcatttaggaaagtaaaatatagtggaagtaaaactgactcatccaactagacattctacagaaagaaaaatatgaagaccaaatgatagaactgtactgttttctgggccagtgagccagaaattgattaaggctttctttggtaggtaaatctagagtttatacagtgtacatgtacatagtaaagtatttttgattaacaatgtattttaataacatatctaaagtcatcatgaactggcttgtacatttttaaattcttactctggagcaacctactgtctaagcagttttgtaaatgtactggtaattgtacaatacttgcattccagagttaaaatgtttactgtaaatttttgttcttttaaagactacctgggacctgatttattgaaatttttctctttaaaaacattttctctcgttaattttcctttgtcatttcctttgttgtctacattaaatcacttgaatccattgaaagtgcttcaagggtaatcttgggtttctagcaccttatctatgatgtttcttttgcaattggaataatcacttggtcaccttgccccaagctttcccctctgaataaatacccattgaactctgatggctgttatcaaaggaacttttctttgtttaaatttgctgatgcaggaattaagtttaaacacaactctatagaaagaaaggagattattacccagaattcacatgtagtgattattaaggacaatttttttttttaa

SEQ ID NO: 4427 - DNA, 922 bp, Homo sapiens
acatacacatcaggaggtggccttgagaagctgagcggagaccggctagactttactcaaagaaaccaagagactgttaccatggcagggaagcccaagcttcactacttcaatggayggggcagaatggagcccatccggtggctcttggctgcagctggagtggagtttgaagagaaatttataggatctgcagaagatttgggaaagttaagaaatgatgggagtttgatgttccagcaagtaccaatggttgagattgatgggatgaagttggtacagaccagagccmttctcaactacattgccagcaaatacaacctctacgggaaagacataaaggagagagccctaattgatatgtatacagaaggtatggcagatttgaatgaaatgatccttcttctgcccttatgtcgacctgaggaaaaagatgccaagattgccttgatcaaagagaaaacaaaaagtcgctatttccctgccttcgaaaaagtgttacagagccatggacaagactaccttgttggcaacaagctgagccgggctgacattagcctggtggaacttctctactatgtggaagagcttgactccagccttatctccaacttccctctgctgaaggccctgaaaaccagaatcagcaacctgcccacggtgaagaagtttctacagcctggcagcccaaggaagcctcccgcagatgcaaaagctttagaagaagccagaaagattttcaggttttaataaagcagccatggaggctaagaacatgcaagaccaatattctaaagttttgcaacaatgaagtgctttacttaagtgttgattgtgcctgttgtaaagctaatgaaccctttccaattatatgctaattaaataataaaaactcctatttgctaacttagttaaaatttaa

SEQ ID NO: 4428 - DNA, 814 bp, Homo sapiens
acatacacatcaggaggtggccttgagaagctgagcggagaccggctagactttactcaatttgaagagaaatttataggatctgcagaagatttgggaaagttaagaaatgatgggagtttgatgttccagcaagtaccaatggttgagattgatgggatgaagttggtacagaccagagccmttctcaactacattgccagcaaatacaacctctacgggaaagacataaaggagagagccctaattgatatgtatacagaaggtatggcagatttgaatgaaatgatccttcttctgcccttatgtcgacctgaggaaaaagatgccaagattgccttgatcaaagagaaaacaaaaagtcgctatttccctgccttcgaaaaagtgttacagagccatggacaagactaccttgttggcaacaagctgagccgggctgacattagcctggtggaacttctctactatgtggaagagcttgactccagccttatctccaacttccctctgctgaaggccctgaaaaccagaatcagcaacctgcccacggtgaagaagtttctacagcctggcagcccaaggaagcctcccgcagatgcaaaagctttagaagaagccagaaagattttcaggttttaataaagcagccatggaggctaagaacatgcaagaccaatattctaaagttttgcaacaatgaagtgctttacttaagtgttgattgtgcctgttgtaaagctaatgaaccctttccaattatatgctaattaaataataaaaactcctatttgctaacttagttaaaatttaa

SEQ ID NO: 4429 - DNA, 2684 bp, Homo sapiens
cggggcgcgaagccgggggcgggggccacgcgtggggcaggcggtgctcggctcggctgacgtcggcccgccggcgccccaccagctccgcgcgggcccgggttggccaccgccgggcccccgcccctcccccggccgtgtcccggccggaaccgatcgtggctggtttgagctggtgcgtctccatggcgacccgccggtgctataagtagggagcggcgtgccgtggggctttgtcagtccctcctgtagccgccgccgccgccgcccgccgcccctctgccagcagctccggcgccacctcgggccggcgtctccggcgggcgggagccaggcgctgacgggcgcggcgggggcggccgagcgctcctgcggctgcgactcaggctccggcgtctgcgcttccccatggggctggcctgcggcgcctgggcgctctgagattgtcactgctgttccaagggcacacgcagagggatttggaattcctggagagttgcctttgtgagaagctggaaatakttctttcrrttccatctcttagttttccataggaacatcaaraaatcatgaacaactttggtaatgaagagtttgactgccacttcctcgatgaaggttttactgccaaggacattctggaccagaaaattaatgaagtttcttcttctgatgataaggatgccttctatgtggcagacctgggagacattctaaagaaacatctgaggtggttaaaagctctccctcgtgtcacccccttttatgcagtcaaatgtaatgatagcaaagccatcgtgaagacccttgctgctaccgggacaggatttgactgtgctagcaagactgaaatacagttggtgcagagtctgggggtgcctccagagaggattatctatgcaaatccttgtaaacaagtatctcaaattaagtatgctgctaataatggagtccagatgatgacttttgatagtgaagttgagttgatgaaagttgccagagcacatcccaaagcaaagttggttttgcggattgccactgatgattccaaagcagtctgtcgtctcagtgtgaaattcggtgccacgctcagaaccagcargctccttttggaacgggcgaaagagctaaatatcgatgttgttggtgtcagcttccatgtaggaagcggctgtaccgatcctgagaccttcgtgcaggcaatctctgatgcccgctgtgtttttgacatgggggctgaggttggtttcagcatgtatctgcttgatattggcggtggctttcctggatctgaggatgtgaaacttaaatttgaagagatcaccggcgtaatcaacccagcgttggacaaatactttccgtcagactctrgagtgagaatcatagctgagcccggcagatactatgttgcatcagctttcacrcttgcagttaatatcattgccaagaaaattgtattaaaggaacagacgggctctgatgacgaagatgagtcgagtgagcagacctttatgtattatgtgaatgatggcgtctatggatcatttaattgcatactctatgaccacgcacatgtaaagccccttctgcaaaagagacctaaaccagatgagaagtattattcatccagcatatggggaccaacatgtgatggcctcgatcggattgttgagcgctgtgacctgccygaaatgcatgtgggtgattggatgctctttgaaaacatgggcgcttacactgttgctgctgcctctacgttcaatggcttccagaggccgacgatctactatgtgatgtcagggcctgcgtggcaactcatgcagcaattccagaacccygacttcccacccgaagtagaggaacaggatgccagcaccctgcctgtgtcttgtgcctgggagagtgggatgaaacgccacagagcagcctgtgcttcggctagtattaatgtgtagatagcactctggtagctgttaactgcaagtttagcttgaattaagggatttggggggaccatgtaacttaattactgctagttttgaaatgtctttgtaagagtagggtcgccatgatgcagccatatggaagactaggatatgggtcacacttatctgtgttcctatggaaactatttgaatatttgttttatatggatttttattcactcttcagacacgctactcaagagtgcccctcagctgctgaacaagcatttgtagcttgtacaatggcagaaygggccaaaagcttagtgttgtgacctgtttttaaaataaagtatcttgaaataattaggcattgggacgtttttatggtgtgttcattccagacagttcacgaatcccgtatagctcgctctgattctcagagaacaatgagtgggtccacccacacacaggtaggaggacaggtgagacggaagccccatcctcccatgtggacggtgcacatctgctcagcccaccccacatgtccagagttggctgcaaactccttgtccagagcctctggtggtgggacctacttaagtctgacggacctgtcctgtccaggccagtgcccagggaaggtgtgggaggccctttgagcctggcctgcagagaccatccgtgtcccctcccaccttcatgcctgtgagaagttaggaatgtatacggtaccacatttggcagtcagcttatttt

SEQ ID NO: 4430 - DNA, 2418 bp, Homo sapiens
ggccggggagccgttggggaggccctggcggccgcgcagcaggtgcaggggcgcagagccygggctcgccttggtacagacgagcgggccccggccttggcgccttcagtttccttccagtttttattttcgctgtgtctacagagcagatgacaccaatttggaaacccgcgagaattgtcactgctgttccaagggcacacgcagagggatttggaattcctggagagttgcctttgtgagaagctggaaatakttctttcrrttccatctcttagttttccataggaacatcaaraaatcatgaacaactttggtaatgaagagtttgactgccacttcctcgatgaaggttttactgccaaggacattctggaccagaaaattaatgaagtttcttcttctgatgataaggatgccttctatgtggcagacctgggagacattctaaagaaacatctgaggtggttaaaagctctccctcgtgtcacccccttttatgcagtcaaatgtaatgatagcaaagccatcgtgaagacccttgctgctaccgggacaggatttgactgtgctagcaagactgaaatacagttggtgcagagtctgggggtgcctccagagaggattatctatgcaaatccttgtaaacaagtatctcaaattaagtatgctgctaataatggagtccagatgatgacttttgatagtgaagttgagttgatgaaagttgccagagcacatcccaaagcaaagttggttttgcggattgccactgatgattccaaagcagtctgtcgtctcagtgtgaaattcggtgccacgctcagaaccagcargctccttttggaacgggcgaaagagctaaatatcgatgttgttggtgtcagcttccatgtaggaagcggctgtaccgatcctgagaccttcgtgcaggcaatctctgatgcccgctgtgtttttgacatgggggctgaggttggtttcagcatgtatctgcttgatattggcggtggctttcctggatctgaggatgtgaaacttaaatttgaagagatcaccggcgtaatcaacccagcgttggacaaatactttccgtcagactctrgagtgagaatcatagctgagcccggcagatactatgttgcatcagctttcacrcttgcagttaatatcattgccaagaaaattgtattaaaggaacagacgggctctgatgacgaagatgagtcgagtgagcagacctttatgtattatgtgaatgatggcgtctatggatcatttaattgcatactctatgaccacgcacatgtaaagccccttctgcaaaagagacctaaaccagatgagaagtattattcatccagcatatggggaccaacatgtgatggcctcgatcggattgttgagcgctgtgacctgccygaaatgcatgtgggtgattggatgctctttgaaaacatgggcgcttacactgttgctgctgcctctacgttcaatggcttccagaggccgacgatctactatgtgatgtcagggcctgcgtggcaactcatgcagcaattccagaacccygacttcccacccgaagtagaggaacaggatgccagcaccctgcctgtgtcttgtgcctgggagagtgggatgaaacgccacagagcagcctgtgcttcggctagtattaatgtgtagatagcactctggtagctgttaactgcaagtttagcttgaattaagggatttggggggaccatgtaacttaattactgctagttttgaaatgtctttgtaagagtagggtcgccatgatgcagccatatggaagactaggatatgggtcacacttatctgtgttcctatggaaactatttgaatatttgttttatatggatttttattcactcttcagacacgctactcaagagtgcccctcagctgctgaacaagcatttgtagcttgtacaatggcagaaygggccaaaagcttagtgttgtgacctgtttttaaaataaagtatcttgaaataattaggcattgggacgtttttatggtgtgttcattccagacagttcacgaatcccgtatagctcgctctgattctcagagaacaatgagtgggtccacccacacacaggtaggaggacaggtgagacggaagccccatcctcccatgtggacggtgcacatctgctcagcccaccccacatgtccagagttggctgcaaactccttgtccagagcctctggtggtgggacctacttaagtctgacggacctgtcctgtccaggccagtgcccagggaaggtgtgggaggccctttgagcctggcctgcagagaccatccgtgtcccctcccaccttcatgcctgtgagaagttaggaatgtatacggtaccacatttggcagtcagcttatttt

SEQ ID NO: 4431 - DNA, 1414 bp, Homo sapiens
cccggccccacccccgagcccccgcagccctagagccgcccaagggatggcgatggcgtacttggcttggagactggcgcggcgttcgtgtccgagttctctgcaggtcactagtttcccggtagttcagctgcacatgaatagaacagcaatgagagccagtcagaaggactttgaaaattcaatraatcaagtgaaactcttgaaaaaggatccaggaaacgaagtgaagctaaaactctacgcgctatataagcaggccactgaaggaccttgtaacatgcccaaaccaggtgtatttgacttgatcaacaaggccaaatgggacgcatggaatgcccttggcagcctgcccaaggaagctgccaggcagaactatgtggatttggtgtccagtttgagtccttcattggaatcctctagtcaggtggagcctggaacagacaggaaatcaactgggtttgaaactctggtggtgacctccgaagatggcatcacaaagatcatgttcaaccggcccaaaaagaaaaatgccataaacactgagatgtatcatgaaattatgcgtgcacttaaagctgccagcaaggatgactcaatcatcactgttttaacaggaaatggtgactattacagtagtgggaatgatctgactaacttcactgatattccccctggtggagtagaggagaaagctaaaaataatgccgttttactgagggaatttgtgggctgttttatagattttcctaagcctctgattgcagtggtcaatggtccagctgtgggcatctccgtcaccctccttgggctattcgatgccgtgtatgcatctgacagggcaacatttcatacaccatttagtcacctaggccaaagtccggaaggatgctcctcttacacttttccgaagataatgagcccagccaaggcaacagagatgcttatttttggaaagaagttaacagcrggagaggcatgtgctcaaggacttgttactgaagttttcyctgatagcacttttcagaaagaagtctggaccaggctgaaggcatttgcaaagcttcccccaaaygycttgagaatttcaaaagaggtaatcaggaaaagagagagagaaaaactacacgctgttaatgctgaagaatgcaatgtccttcagggaagatggctatcagatgaatgcacaaatgctgtggtgaacttcttatccagaaaatcaaaactgtgatgaccactacagcagagtaaagcatgtccaaggaaggatgtgctgttacctctgatttcyagtactggaactaaataagcttcattgtgccttttgtagtgctagaatatcaattacaatgatgatatttcactacagctctgatgaataaaaagttttgtaaaacaagcttaagaattcaca

SEQ ID NO: 4432 - DNA, 936 bp, Homo sapiens
atgggaaaatggaattcctcagaatatagtagcctgcaagctggaagacataagaaactcaggactgagagtttttcatggagacggcagggtgaaagagggaatgatgatgaggacctccctgagctactgcatgaagctgccagcatctcaacagcaggctacattctggaagttacagggctgggcacagagaaggaactcagcaaacaagaactggtgaggagaccagggccagaagccagggttagcacagctgtacctgtgcttgttgggcgtgtcagcatcccagttcctggagtgactaatagtgacaaacccagggacctagtgaatatggagaaagaagtgaagatttctgcattccggggtgtatgtgtggaggactttgcaggggatatgcatgatggctccccactcaaccccagcaccctgctggctgaagtctgcgtggagcagtgcaccctcatggactccaagatgaagcccctgtggatcatgtacagcaatgaggaggcaggcagtggcgtcgttgaggtgctactccacccagacaccatcgccaacatccaactcaacaaccgcaacatggatggaggcaacgaagagttcaccctctcctgtgctggctactgtgtggccacgtacgtgctgggcatcggtgatcggcacagcgacaacatcatgatccgagcgaggcctaacaccatcctgcggcgccacgggcttctcttcctccacctctttgccctgatgcaggcagcaggcctgcctgagctcagctgctccaaagacatccggtatctcaaggactccctggcaccggggaaaacagaggaggcgctgaagcacttccgagtgaagtttaamgaagcacttccgactggaaaccgagtgaactggctggcccacaacgtgtccgaagataaccggcag

SEQ ID NO: 4433 - DNA, 2323 bp, Homo sapiens
tcccgaagagccagatcgcggccggcgccagcgccaccgtccggtccacccgccagcccgcacagccgcgccgccgccgagcgtttcgtgagcggcgctccgaggatcaggaatggggcttcgggcgctgggcgcgctccgaacccggcgcacgtaagagcctgggagcgcccgagccgcccggctgcccggagccccatcgcctaggaccgggagatgctggaaatgcaaccgcctgttccccgaggagccgctgccccsgggaccccctggcactgtgcgcaccctggtcagcagcccccggagaagacggcgcccccaacgcccgacccgcgtggccgtggcagcgccacgcgagccctctaggcgaccgcagggccacagcagctcagccgccggtgccccctcggaaaccatgacccccggcgcgggcccatggagccatggcctatagggtcctgggccgcgcggggccacctcagccgcggagggcgcgcaggctgctcttcgccttcacgctctcgctctcctgcacttacctgtgttacagcttcctgtgctgctgcgacgacctgggtcggagccgcctcctcggcgcgcctcgctgcctccgcggccccagcgcgggcggccagaaacttctccagaagtcccgcccctgtgatccctccgggccgacgcccagcgagcccagcgctcccagcgcgcccgccgccgccgtgcccgcccctcgcctctccggttccaaccactccggctcacccaagctgggtaccaagcggttgccccaagccctcattgtgggcgtgaagaaggggggcacccgggccgtrctggagtttatccgagtrcacccggacgtgcgggccttgggcacggaaccccacttctttgacaggaactacggccgcgggctggattggtacaggagcctgatgcccaggaccctcgagagccagatcacgctggagaagacgcccagctactttgtcactcaagaggctcctcgacgcatcttcaacatgtcccgagacaccaagctgatcgtggttgtgcggaaccctgtgacccgtgccatctctgattacacgcagacactctccaagaagcccgacatcccgacctttgagggcctctccttccgcaaccgcaccctgggcctggtggacgtgtcrtggaacgccatccgcatcggcatgtacgtgctgcacctggagagctggctgcagtacttcccgctagctcagattcacttcgtcagtggcgagcgactcatcactgacccggccggcgagatggggcgagtccaggacttcctgggcattaagagattcatcacggacaagcacttctatttcaacaagaccaaaggattcccttgcttgaaaaaaacagaatcgagcctcctgcctcgatgcttgggcaaatcaaaagggagaactcatgtacagattgatcctgaagtgatagaccagctccgagaattttatagaccgtataatatcaaattttatgaaaccgttgggcaggacttcaggtgggaataagcccacgaaaggaaagggctctcaagggctcttctgctcatctcttccgtgagatttgctcccagaccctctkatctccctccaacaaaccctggctccagccccctttcccaacttgagttgcatcatcttggaaccaggaagcccagctaaagccaagagaccagagagtccctgccactagttttcatcagtctgttcaagcaaagttgatctgctcctggcacgtccagtaaattccagaatcattctcctttctgcccataaagggccttggagaattgctttaagaagagtgaatgttccaatgatgatagatattataagcgaygatggttctgttgctatgaacacagcagtcggtccctgtcattgtccacccaggagtggccttgttaattccaagtggcatgtatcttccctctgagcttcatttcttcaagatgctctgggtggtgggatgggagaccatcctcagccctcctcagaccttatcaattcattgagagattgcaaagctgaaagcacctccggccactcctgggagacagaccctttggtgatgaaataaaccagtgacttcagagcctatggtctcaactgtgcttgaaaaacactgtctctgaaaacaactttgtgattctccctgctccctgtggacaaaagcacataattctgctgttacgggtactttgctcatacgagctttcatgttcagcatgcaatggaatcatgcttgtccatgtgaaataaatatggctctctcgtgtccttaa

SEQ ID NO: 4434 - DNA, 1945 bp, Homo sapiens
cgcttctctcccagtgcgcagtggcctggtgggtcagccggcggcggctggagcgcggggccggccctgcgcacgaatgaatgggcgcccgggggacgcgcgcgctcggggctgaagggcattaggaccgtgaggatcgctccgcgatcctgtctctccctatcacccccccgcccccccacctctctcctttttctgctctgcaggactgagcagctaggcgcgagcgaaaacaaacagctggggctgcgagcgcccccgccccggccccgagagcacgccggcccagtcccccacctggggcgcccgtctgcccaccatgaggaagatccgcgccaatgccatcgccatcctgaccgtagcctggatcctgggcactttctactacttatggcaggacaaccgagcccacgcagcatcctccggcggccggggcgcgcagagggcaggcaggaggtcggagcagctccgcgaggaccgcaccatcccgctcattgtgacaggaactccctcgaaaggctttgatgagaaggcctacctgtcggccaagcagctgaaggctggagaggacccctacagacagcacgccttcaaccagctggagagtgacaagctgagcccagaccggcccatccgggacacccgccattacagctgcccatctgtgtcctactcctcggacctgccagccaccagcgtcatcatcaccttccacaatgaggcccgttccaccctgctgcgcacagtgaagagtgtcctgaaccgaactcctgccaacttgatccaggagatcattttagtggatgacttcagctcagatccggaagactgtctactcctgaccaggatccccaaggtcaagtgcctgcgcaatgatcggcgggaagggctgatccggtcccgagtgcrtggggcggacrtggctgcagctaccgttctcacctttctggatagccactgcgaagtgaacaccgagtggctgccgcccatkctgcagcgggtgaaggaggaccacacccgcgtggtgagtcccatcattgatgtcatcagtctggataattttgcctaccttgcagcatctgctgaccttcgtggagggttygactggagcctgcatttcaagtgggagcagatccctcttgagcagaagatgacccggacagaccccaccaggcccataaggacgcctgtcatagctggaggaatcttcgtgatcgacaagtcctggtttaaccacttgggaaagtatgatgcccagatggacatctgggggggagagaattttgagctctccttcagggtgtggatgtgtggtggcagtctggagatcgtcccctgcagccgggtgggccatgtcttcaggaaacggcacccctacaacttccctgagggtaatgccctcacctacatcaggaatactaagcgcactgcagaagtgtggatggatgaatacaagcaatactactatgaggcccggccctcggccatcgggaaggccttcggcagtgtggctacgcggatagagcagaggaagaagatgaactgcaagtccttccgctggtacctggagaacgtctacccagagctcacggtccccgtgaaggaagcactccccggcatcattaagcagggggtgaactgcttagaatctcagggccagaacacagctggtgacttcctgcttggaatggggatctgcagagggtctgccaagaacccgcagcccgcccaggcatggctgttcagtgaccacctcatccagcagcaggggaagtgcctggctgccacctccaccttaatgtcctccyctggatccccagtcatactgcagatgtgcaaccctagagaaggcaagcaggtgagtctccttgcctctggcccagaggcccagcagcccgaggggccatgcctcagggtggcagaccttggcaggagagcccctgat

SEQ ID NO: 4435 - DNA, 3133 bp, Homo sapiens
cgcttctctcccagtgcgcagtggcctggtgggtcagccggcggcggctggagcgcggggccggccctgcgcacgaatgaatgggcgcccgggggacgcgcgcgctcggggctgaagggcattaggaccgtgaggatcgctccgcgatcctgtctctccctatcacccccccgcccccccacctctctcctttttctgctctgcaggactgagcagctaggcgcgagcgaaaacaaacagctggggctgcgagcgcccccgccccggccccgagagcacgccggcccagtcccccacctggggcgcccgtctgcccaccatgaggaagatccgcgccaatgccatcgccatcctgaccgtagcctggatcctgggcactttctactacttatggcaggacaaccgagcccacgcagcatcctccggcggccggggcgcgcagagggcaggcaggaggtcggagcagctccgcgaggaccgcaccatcccgctcattgtgacaggaactccctcgaaaggctttgatgagaaggcctacctgtcggccaagcagctgaaggctggagaggacccctacagacagcacgccttcaaccagctggagagtgacaagctgagcccagaccggcccatccgggacacccgccattacagctgcccatctgtgtcctactcctcggacctgccagccaccagcgtcatcatcaccttccacaatgaggcccgttccaccctgctgcgcacagtgaagagtgtcctgaaccgaactcctgccaacttgatccaggagatcattttagtggatgacttcagctcagatccggaagactgtctactcctgaccaggatccccaaggtcaagtgcctgcgcaatgatcggcgggaagggctgatccggtcccgagtgcrtggggcggacrtggctgcagctaccgttctcacctttctggatagccactgcgaagtgaacaccgagtggctgccgcccatkctgcagcgggtgaaggaggaccacacccgcgtggtgagtcccatcattgatgtcatcagtctggataattttgcctaccttgcagcatctgctgaccttcgtggagggttygactggagcctgcatttcaagtgggagcagatccctcttgagcagaagatgacccggacagaccccaccaggcccataaggacgcctgtcatagctggaggaatcttcgtgatcgacaagtcctggtttaaccacttgggaaagtatgatgcccagatggacatctgggggggagagaattttgagctctccttcagggtgtggatgtgtggtggcagtctggagatcgtcccctgcagccgggtgggccatgtcttcaggaaacggcacccctacaacttccctgagggtaatgccctcacctacatcaggaatactaagcgcactgcagaagtgtggatggatgaatacaagcaatactactatgaggcccggccctcggccatcgggaaggccttcggcagtgtggctacgcggatagagcagaggaagaagatgaactgcaagtccttccgctggtacctggagaacgtctacccagagctcacggtccccgtgaaggaagcactccccggcatcattaagcagggggtgaactgcttagaatctcagggccagaacacagctggtgacttcctgcttggaatggggatctgcagagggtctgccaagaacccgcagcccgcccaggcatggctgttcagtgaccacctcatccagcagcaggggaagtgcctggctgccacctccaccttaatgtcctccyctggatccccagtcatactgcagatgtgcaaccctagagaaggcaagcagaaatggaggagaaaaggatctttcatccagcattcagtcagtggcctctgcctggagacaaagcctgcccagctggtgaccagcaagtgtcaggctgacgcccaggcccagcagtggcagctgttgccacacacatgacgggattttcttgaagggtcagctattgcactgtgctgggaggctggctgtggctcctgtttgtgaagagaactcccagttccttttcacagccgctgagaacacatccacacatctaccccacggccttgtcttggaactgctcctgctatccccacaccctgcttcctcaccccactggctcttgggcaaatgactgttggtaccaggaccctgggggtctcccctacaaagcagaccagcctggggcagatatacctaccacaggagccccctgtctttcataggccaaggatccacatacccatagagttcatggattctagagggtctaggaatctcttgaaattgtccctaaaatactgcatgtgtgtgcatacatgcattttcctggggaaaaagtccatggcttctaaaagaggtccctgatccccaaagggcctgaacctctgctctggattgaagccactgtctgcccaagctgccaccccctaatcttcctccctggcgtgctcaaactgccatcgcctgctccctccacacggcccttggggtcagcagccaagtgtctgtggtccgcagcacctgctctggagggctctccagcagtttcgcctcctgactctcaccagcgtcctctcggcagcactcccgtgcccaagygcacccctctggacttgccagcgcaggccccttcgctcccagggccatgctttgcctgtcctctgtcgtgatgtttcttccgcagccaggtgcagcctcagatcccctgttcatctgggaagcctcctgccacagcttaggacagaactgggcccagggcaaaggcctctccccagaggatggactagaaggcctgggccacactcgggcatggacctttggggctggggagcmggggctgcgcctgttgaatgtaagaggactgctgaccagagggccttcaagagggtctctctgtcctttgctgtggtcagatcaggctctgcacttatcagccggtcctttgtggcaacgcagccctgttctgtttttgcttttcctcttcttgaccaaagcatgtgccactagctgtccttgaggacctcgtctttatgaaacacacacctggaataaaaccacttcttacatgtccac

SEQ ID NO: 4436 - DNA, 1539 bp, Homo sapiens
agaccccgccccccggacgtggcwggttagcgtcccgccctcctcccgcggagtcagtgggtragggtcgggcttgaagccatagctgcgggaccgtactcgtctcccccgacgcagaccatggagagcgcgctggcggtgccccggctgcccccgcatgatccagggacgccggtgctgtcggtggtggacatgcacacgggcggcgarcccttgcgtatcgtgctggcggggtgtccggaggygtctgggcccaccctgctggccaagcggcgctacatgcgccagcaccttgaccacgtgcggcgacggctcatgttcgagccccgagggcaccgggacatgtacggggcggtcctagtcccgagcgagctgccggacgcgcatctgggcgtcctgttcctgcacaacgagggctacagctccatgtgcggccacgcagtgctggcgctgggccgcttcgckttggacttcgggcktgtgccggcgcccyctgcgggcacccgcgaggcccgcgtcaatatccactgcccctgcgggctggtgaccgccttcgtggcatgcgaggacggccgcagccacggaccggtgcgcttccacagcgtcccggccttcgtgctggccacagatctcatggtggatgttcctggacatggaaaggtgatggtggacattgcatatggcggtgcattttatgcatttgttactgctgaaaagttaggactagacatttgttctgcaaagaccagggaccttgtggatgcagcgagtgcagtgacakaggcagtgaaagctcagtttaaaattaatcatcctgatagtgaakaccttgcctttttatatggaactatattaacagatggaaaagatgcttataccaaggaaccaaccaccaacatttgtgtttttgcagatgaacaggttgacagaagtcccactggctcaggagtgacagcccgaattgccttacagtatcacaaagggcttctggaactgaaccagatgagagccttcaaaagcagtgcaactggctcagtattcacagggaaagctgtgagggaagygaaatgtggtgattttaaagctgttatagtggaagtatmaggacaagcccattacacgggtacagcaagctttatartagaagatgacgacccattgagggatggatttcttctcaagtgacwtcttccatgattttaagggctttctttttaaagtaatcattatccttaaggactgttttctctaaattatatgaaaacaaataaattatacatataaactaactctcattctttgtaaaatactaccctgtggctaaatataaagtcattatacctcgtatttgcaactgtatttgtataaatatcacttatgtctagcatacaaaatgccagaaattcagagtctttttytagtgattaacgtatcaggtaaaattaaaacagtagttacttttaaaatattgctctatagtaattactattaatatcatattttgtattaaaggctcttcgaataatatgtggaatttaa

SEQ ID NO: 4437 - DNA, 2841 bp, Homo sapiens
gttgaaagctgctggcgcggcggggcggactccacccctgcccggcagcccagcgcctccggccgcacttccagctctctgcgcagcccgccgcgcagcccgccgccccagccatggcgaagcccctgacrgaccaggagaagcggcggcagatcagcatccgcggcatcgtgggcgtggagaacgtggcagagctgaagaagagyttcaaccggcacctgcacttcacgctggtcaaggaccgcaacgtggccaccacccgcgactactacttcgcgctggcgcacacggtgcgsgaccacctggtggggcgctggatccgcacgcagcagcactactacgacaagtgccccaagagggtatattacctctctctggaattttacatgggccgaacattacagaacaccatgatcaacctcggtctgcaaaatgcctgtgatgaggccatttaccagcttggattggatatagaagagttagaagaaattgaagaagatgctggacttggcaatggtggtcttgggagacttgctgcctgcttcttggattccatggcaaccctgggacttgcagcctatggatacggcattcggtatgaatatgggattttcaatcagaagatccgagatggatggcaggtagaagaagcagatgattggctcagatatggaaacccttgggagaagtcccgcccagaattcatgctgcctgtgcacttctrtggaaaagtagaacacaccaacaccgggaccaagtggattgacactcaagtgrtcctggctctgccatatgacacccccgwgcccggctacatgaataacactgtcaacaccatgcgcctctggtctgctcgggcaccaaatgactttaacctcagagactttaatgttggagactacattcaggctgtgctggaccgaaacctggccgagaacatctcccgggtcctctatcccaatgacaatttttttgaagggaaggagctaagattgaagcaggaatactttgtggtggctgcaaccttgcaagatatcatcygccgtttcaaagcctccaagtttggctccacccrtggtgcaggaactgtgtttgatgccttcccggatcaggcaagtggccatccagctgartgayactcaccctgcactcgcgatccctgagctgatgaggatttttgtggatattgaaaaactgccctggtccaaggcatgggagctcacccagaagaccttcgcctacaccaaccacacagtgctcccggaagccctggagcgctggcccgtggacctggtggagaagctgctccctcgacatttggaaatcatttatgagataaatcagaagcatttagatagaattgtggccttgtttcctaaagatgtggaccgtctgagaaggatgtctctgatagaagaggaaggaagcaaaaggatcaacatggcccatctctgcattgtcggttcccatgctgtgaatggcgtggctaaaatccactcagacatcgtgaagactaaagtattcaaggacttcagtgagctagaacctgacaagtttcagaataaaaccaatgggatcactccaaggcgctggctcctactctgcaacccaggacttgcagagctcatagcagagaaaattggagaagactatgtgaaagacctgagccagctgacgaagctccacagcttcctgggtgatgatgtcttcctccgggaactcgccaaggtgaagcaggagaataagctgaagttttctcagttcctggagacggagtacaaagtgaagatcaacccatcctccatgtttgatgtccaggtgaagaggatacatgagtacaagcgacagctcttgaactgtctgcatgtgatcacgatgtacaaccgcattaagaaagaccctaagaagttattcgtgccaaggacagttatcattggtggtaaagctgccccaggatatcacatggccaaaatgatcataaagctgatcacttcagtggcagatgtggtgaacaatsaccctatggttggaagcaagttgaaagtcatcttcttggagaactacagagtatctcttgctgaaaaagtcattccagccacagatctgtcagagcagatttccactgcaggcacygaagcctcggggacaggcaatatgaagttcatgctaaatggggccctaactatcgggaccatggatggggccaatgkggaaatggcagaagaagcyggggaagagaacctgttcatctttggcatgagsatagatgatgtggctgctttggacaagaaagggtacgaggcaaaagaatactatgaggcacttccagagctgaagctggtcattgatcaaattgacaatggctttttttctcccaagcagcctgacctcttcaaagatatcatcaacatgctattttatcatgacaggtttaaagtctttgcagactacgaagcctatgtcaagtgtcaagataaagtgagtcagctgtacatgaatccaaaggcctggaacacaatggtactcaaaaacwtagctgcctcggggaaattctccagtgaccgaacaattaaagaatatgcccaaaacatctggaacgtggaaccttcagatctaaagatttctctatccaatgaatctaacaaagtcaatggaaattgaactctasaattgtctctagaaaacatagcttcttactgaacttgaacatttttacaacattcactggtttttgttttgttagctaataatctataatagttgagtatctctgggaatggggagggaaattatatgtaatagagcttaaaaataaagtgtcaatttccaagggctacatga

SEQ ID NO: 4438 - DNA, 2846 bp, Homo sapiens
gttgaaagctgctggcgcggcggggcggactccacccctgcccggcagcccagcgcctccggccgcacttccagctctctgcgcagcccgccgcgcagcccgccgccccagccatggcgaagcccctgacrgaccaggagaagcggcggcagatcagcatccgcggcatcgtgggcgtggagaacgtggcagagctgaagaagagyttcaaccggcacctgcacttcacgctggtcaaggaccgcaacgtggccaccacccgcgactactacttcgcgctggcgcacacggtgcgsgaccacctggtggggcgctggatccgcacgcagcagcactactacgacaagtgccccaagagggtatattacctctctctggaattttacatgggccgaacattacagaacaccatgatcaacctcggtctgcaaaatgcctgtgatgaggccatttaccagcttggattggatatagaagagttagaagaaattgaagaagatgctggacttggcaatggtggtcttgggagacttgctgcctgcttcttggattccatggcaaccctgggacttgcagcctatggatacggcattcggtatgaatatgggattttcaatcagaagatccgagatggatggcaggtagaagaagcagatgattggctcagatatggaaacccttgggagaagtcccgcccagaattcatgctgcctgtgcacttctrtggaaaagtagaacacaccaacaccgggaccaagtggattgacactcaagtgrtcctggctctgccatatgacacccccgwgcccggctacatgaataacactgtcaacaccatgcgcctctggtctgctcgggcaccaaatgactttaacctcagagactttaatgttggagactacattcaggctgtgctggaccgaaacctggccgagaacatctcccgggtcctctatcccaatgacaatttttttgaagggaaggagctaagattgaagcaggaatactttgtggtggctgcaaccttgcaagatatcatcygccgtttcaaagcctccaagtttggctccaccraccctgagccatccgttgccttcatgttgatgtctttccccacccaggtggccatccagctgartgayactcaccctgcactcgcgatccctgagctgatgaggatttttgtggatattgaaaaactgccctggtccaaggcatgggagctcacccagaagaccttcgcctacaccaaccacacagtgctcccggaagccctggagcgctggcccgtggacctggtggagaagctgctccctcgacatttggaaatcatttatgagataaatcagaagcatttagatagaattgtggccttgtttcctaaagatgtggaccgtctgagaaggatgtctctgatagaagaggaaggaagcaaaaggatcaacatggcccatctctgcattgtcggttcccatgctgtgaatggcgtggctaaaatccactcagacatcgtgaagactaaagtattcaaggacttcagtgagctagaacctgacaagtttcagaataaaaccaatgggatcactccaaggcgctggctcctactctgcaacccaggacttgcagagctcatagcagagaaaattggagaagactatgtgaaagacctgagccagctgacgaagctccacagcttcctgggtgatgatgtcttcctccgggaactcgccaaggtgaagcaggagaataagctgaagttttctcagttcctggagacggagtacaaagtgaagatcaacccatcctccatgtttgatgtccaggtgaagaggatacatgagtacaagcgacagctcttgaactgtctgcatgtgatcacgatgtacaaccgcattaagaaagaccctaagaagttattcgtgccaaggacagttatcattggtggtaaagctgccccaggatatcacatggccaaaatgatcataaagctgatcacttcagtggcagatgtggtgaacaatsaccctatggttggaagcaagttgaaagtcatcttcttggagaactacagagtatctcttgctgaaaaagtcattccagccacagatctgtcagagcagatttccactgcaggcacygaagcctcggggacaggcaatatgaagttcatgctaaatggggccctaactatcgggaccatggatggggccaatgkggaaatggcagaagaagcyggggaagagaacctgttcatctttggcatgagsatagatgatgtggctgctttggacaagaaagggtacgaggcaaaagaatactatgaggcacttccagagctgaagctggtcattgatcaaattgacaatggctttttttctcccaagcagcctgacctcttcaaagatatcatcaacatgctattttatcatgacaggtttaaagtctttgcagactacgaagcctatgtcaagtgtcaagataaagtgagtcagctgtacatgaatccaaaggcctggaacacaatggtactcaaaaacwtagctgcctcggggaaattctccagtgaccgaacaattaaagaatatgcccaaaacatctggaacgtggaaccttcagatctaaagatttctctatccaatgaatctaacaaagtcaatggaaattgaactctasaattgtctctagaaaacatagcttcttactgaacttgaacatttttacaacattcactggtttttgttttgttagctaataatctataatagttgagtatctctgggaatggggagggaaattatatgtaatagagcttaaaaataaagtgtcaatttccaagggctacatga

SEQ ID NO: 4439 - DNA, 2837 bp, Homo sapiens
gttgaaagctgctggcgcggcggggcggactccacccctgcccggcagcccagcgcctccggccgcacttccagctctctgcgcagcccgccgcgcagcccgccgccccagccatggcgaagcccctgacrgaccaggagaagcggcggcagatcagcatccgcggcatcgtgggcgtggagaacgtggcagagctgaagaagagyttcaaccggcacctgcacttcacgctggtcaaggaccgcaacgtggccaccacccgcgactactacttcgcgctggcgcacacggtgcgsgaccacctggtggggcgctggatccgcacgcagcagcactactacgacaagtgccccaagagggtatattacctctctctggaattttacatgggccgaacattacagaacaccatgatcaacctcggtctgcaaaatgcctgtgatgaggccatttaccagcttggattggatatagaagagttagaagaaattgaagaagatgctggacttggcaatggtggtcttgggagacttgctgcctgcttcttggattccatggcaaccctgggacttgcagcctatggatacggcattcggtatgaatatgggattttcaatcagaagatccgagatggatggcaggtagaagaagcagatgattggctcagatatggaaacccttgggagaagtcccgcccagaattcatgctgcctgtgcacttctrtggaaaagtagaacacaccaacaccgggaccaagtggattgacactcaagtgrtcctggctctgccatatgacacccccgwgcccggctacatgaataacactgtcaacaccatgcgcctctggtctgctcgggcaccaaatgactttaacctcagagactttaatgttggagactacattcaggctgtgctggaccgaaacctggccgagaacatctcccgggtcctctatcccaatgacaatttttttgaagggaaggagctaagattgaagcaggaatactttgtggtggctgcaaccttgcaagatatcatcygccgtttcaaagcctccaagtttggctccacccrtggtgcaggaactgtgtttgatgccttcccggatcaggtggccatccagctgartgayactcaccctgcactcgcgatccctgagctgatgaggatttttgtggatattgaaaaactgccctggtccaaggcatgggagctcacccagaagaccttcgcctacaccaaccacacagtgctcccggaagccctggagcgctggcccgtggacctggtggagaagctgctccctcgacatttggaaatcatttatgagataaatcagaagcatttagatagaattgtggccttgtttcctaaagatgtggaccgtctgagaaggatgtctctgatagaagaggaaggaagcaaaaggatcaacatggcccatctctgcattgtcggttcccatgctgtgaatggcgtggctaaaatccactcagacatcgtgaagactaaagtattcaaggacttcagtgagctagaacctgacaagtttcagaataaaaccaatgggatcactccaaggcgctggctcctactctgcaacccaggacttgcagagctcatagcagagaaaattggagaagactatgtgaaagacctgagccagctgacgaagctccacagcttcctgggtgatgatgtcttcctccgggaactcgccaaggtgaagcaggagaataagctgaagttttctcagttcctggagacggagtacaaagtgaagatcaacccatcctccatgtttgatgtccaggtgaagaggatacatgagtacaagcgacagctcttgaactgtctgcatgtgatcacgatgtacaaccgcattaagaaagaccctaagaagttattcgtgccaaggacagttatcattggtggtaaagctgccccaggatatcacatggccaaaatgatcataaagctgatcacttcagtggcagatgtggtgaacaatsaccctatggttggaagcaagttgaaagtcatcttcttggagaactacagagtatctcttgctgaaaaagtcattccagccacagatctgtcagagcagatttccactgcaggcacygaagcctcggggacaggcaatatgaagttcatgctaaatggggccctaactatcgggaccatggatggggccaatgkggaaatggcagaagaagcyggggaagagaacctgttcatctttggcatgagsatagatgatgtggctgctttggacaagaaagggtacgaggcaaaagaatactatgaggcacttccagagctgaagctggtcattgatcaaattgacaatggctttttttctcccaagcagcctgacctcttcaaagatatcatcaacatgctattttatcatgacaggtttaaagtctttgcagactacgaagcctatgtcaagtgtcaagataaagtgagtcagctgtacatgaatccaaaggcctggaacacaatggtactcaaaaacwtagctgcctcggggaaattctccagtgaccgaacaattaaagaatatgcccaaaacatctggaacgtggaaccttcagatctaaagatttctctatccaatgaatctaacaaagtcaatggaaattgaactctasaattgtctctagaaaacatagcttcttactgaacttgaacatttttacaacattcactggtttttgttttgttagctaataatctataatagttgagtatctctgggaatggggagggaaattatatgtaatagagcttaaaaataaagtgtcaatttccaagggctacatga

SEQ ID NO: 4440 - DNA, 2140 bp, Homo sapiens
tgagagtcctctagacaggcgctcctcgcagcaccgtagtgcgcttgcgctgagcagcccgcgagggcggaagtgggagctgcgaccgcgctccctgtgaggtgggcaagcggcgaaatggcgccctccgggagtcttgcagttcccctggcagtcctggtgctgttgctttggggtgctccctggacgcacgggcggcggagcaacgttcgcgtcatcacggacgagaactggagagaactgctggaaggagactggatgatagaattttatgccccgtggtgccctgcttgtcaaaatcttcamccggaatgggaaagttttgctgaatggggagaagatcttgaggttaatattgcgaaagtagatgtcacagagcagccaggactgagtggacggtttatcataactgctcttcctactatttatcattgtaaagatggtgaatttaggcgctatcagggtccaaggactaagaaggacttcataaactttataagtgataaagagtggaagagtattgagcccgtttcatcatggtttggtccaggttctgttctgatgagtagtatgtcagcactctttcagctatctatgtggatcaggacktgccataactactttattgaagaccttggattgccagtgtggggatcatatactgtttttgctttagcaactctgttttccggactgttattaggactctgtatgatatttgtggcagattgcctttgtccttcaaaaaggcgcagaccacagccrtacccatacccttcaaaaaaattattatcagaatctgcacaacctttgaaaaaagtggaggaggaacaagaggcggatgaagaagatgtttcagaagaagaagctgaaagtaaagaaggaacaaacaaagactttccacagaatgccataagacaacgctctctgggtccatcattggccacagataaatcctagttaaattttatagttatcttaatattatgattttgataaaaacagaagattgatcattttgtttggtttgaagtgaactgtgacttttttgaatattgcagggttcagtctagattgtcattaaattgaagagtctacattcagaacataaaagcactaggtatacaagtttgaaatatgatttaagcacagtatgatggtttaaatagttctctaatttttgaaaaatcgtgccaagcaataagatttatgtatatttgtttaataataacctatttcaagtctgagttttgaaaatttacatttcccaagtattgcattattgaggtatttaagaagattattttagagaaaaatatttctcatttgatataatttttctctgtttcactgtgtgaaaaaaagaagatatttcccataaatgggaagtttgcccattgtctcaagaaatgtgtatttcagtgacaatttcgtggtctttttagaggtatattccaaaatttccttgtatttttaggttatgcaactaataaaaactaccttacattaattaattacagttttctacacatggtaatacaggatatgctactgatttaggaagtttttaagttcatggtattctcttgattccaacaaagtttgattttctcttgtatttttcttacttactatgggttacattttttatttttcaaattggatgataatttcttggaaacattttttatgttttagtaaacagtatttttttgttgtttcaaactgaagtttactgagagatccatcaaattgaacaatctgttgtaatttaaaattttggccacttttttcagattttacatcattcttgctgaacttcaacttgaaattgkttttttttttttttytttttggatgtgaaggtgaacattcctgatttttgtctgatgtgaaaaagccttggtattttacattttgaaaattcaaagaagcttaatataaaagtttgcattctactcaggaaaaagcatcttcttgtatatgtcttaaatgtatttttgtcctcatatacagaaagttcttaattgattttacagtctgtaatgcttgatgttttaaaataataacayttttatattttttaaaagacaaacttcatattatcctgtgttctttcctgactggtaatattgtgtgg

SEQ ID NO: 4441 - DNA, 1806 bp, Homo sapiens
tgagagtcctctagacaggcgctcctcgcagcaccgtagtgcgcttgcgctgagcagcccgcgagggcggaagtgggagctgcgaccgcgctccctgtgaggtgggcaagcggcgaaatggcgccctccgggagtcttgcagttcccctggcagtcctggtgctgttgctttggggtgctccctggacgcacgggcggcggagcaacgttcgcgtcatcacggacgagaactggagagaactgctggaaggagactggatgatagaattttatgccccgtggtgccctgcttgtcaaaatcttcamccggaatgggaaagttttgctgaatggggagaagatcttgaggttaatattgcgaaagtagatgtcacagagcagccaggactgagtggacggtttatcataactgctcttcctactatttatcattgtaaagatggtgaatttaggcgctatcagggtccaaggactaagaaggacttcataaactttataagtgataaagagtggaagagtattgagcccgtttcatcatggtttggtccaggttctgttctgatgagtagtatgtcagcactctttcagctatctatgtggatcaggacktgccataactactttattgaagaccttggattgccagtgtggggatcatatactgtttttgctttagcaactctgttttccggactgttattaggactctgtatgatatttgtggcagattgcctttgtccttcaaaaaggcgcagaccacagccrtacccatacccttcaaaaaaattattatcagaatctgcacaacctttgaaaaaagtggaggaggaacaagaggcggatgaagaagatgtttcagaagaagaagctgaaagtaaagaaggaacaaacaaagactttccacagaatgccataagacaacgctctctgggtccatcattggccacagataaatcctagttaaagagtctacattcagaacataaaagcactaggtatacaagtttgaaatatgatttaagcacagtatgatggtttaaatagttctctaatttttgaaaaatcgtgccaagcaataagatttatgtatatttgtttaataataacctatttcaagtctgagttttgaaaatttacatttcccaagtattgcattattgaggtatttaagaagattattttagagaaaaatatttctcatttgatataatttttctctgtttcactgtgtgaaaaaaagaagatatttcccataaatgggaagtttgcccattgtctcaagaaatgtgtatttcagtgacaatttcgtggtctttttagaggtatattccaaaatttccttgtatttttaggttatgcaactaataaaaactaccttacattaattaattacagttttctacacatggtaatacaggatatgctactgatttaggaagtttttaagttcatggtattctcttgattccaacaaagtttgattttctcttgtatttttcttacttactatgggttacattttttatttttcaaattggatgataatttcttggaaacattttttatgttttagtaaacagtatttttttgttgtttcaaactgaagtttactgagagatccatcaaattgaacaatctgttgtaatttaaaattttggccacttttttcagattttacatcattcttgctgaacttcaacttgaaattgkttttttttttttttytttttggatgtgaaggtgaacattcctgatttttgtctgatgtgaaaaagccttggtattttacattttgaaaattcaaag

SEQ ID NO: 4442 - DNA, 1177 bp, Homo sapiens
cgaatgaatatattcgcgcgctctttgcagctgcctgaattcttccttccccagcatccccctccgcccggtcacccagacggccttctccagccttgccgagcttaagacccgtccctgctcctgaccatcaccgtcactggggtcactgtgctcgtgttggtcctgaagagcatgaactccaggaggagagagccaatcaccttacaggaccctgmagccaagtacycgctgcccttgattgagaaagagaaaatcagccacaacacccggaggttccgctttggactgccttcgccggaccatgtcttagggcttcctgtaggtaactatgtccagctcttggcaaaaatcgataatgaattggtggtcagggcttacacccctgtctccagtgatgatgacagaggctttrtggacctaattataaagatctacttcaaaaatgtacacccccaatatcctgaaggtgggaagatgactcagtatttggagaacatgaaaatcggggagaccatcttttttcgagggccaaggggacgcttgttttaccatgggccagggaatcttggaatcagaccagaccagacgagtgagcctaaaaaaacactggccgatcacctgggaatgatwgctgggggcacaggcatcacacccatgtkgcagctcattcgccacatcaccaaggaccccagtgacaggaccaggatgtccctcatctttgccaaccaggctggaagtacagctcaggcttcgttactgccgacatgatcaaggagcaccttcctcctccagcgaagtccacgctcatcctggtgtgtggcccgccaccactratccagacggcggctcaccctaacctggagaagctgggttatacccaggacatgattttcacctactmacacctccaygtgctcagcaawtttgcatgtcccttttcatctgtttcagagtaagttcaatttcaccacggtaaactgggatgttttcaaaagtgccttgccatgtaccttsrcgcacacactggttctcctcttttgggtgtgggcctaacaaaaagggctcaaggggctggagactggctgctggggcctccttgcttggaggctggmaagagctccatttcagtatctttctccgtggttttgtgaaataaactcaagtacaaagcaga

SEQ ID NO: 4443 - DNA, 1520 bp, Homo sapiens
ccatgtgaagaaggatgtgttcacttcccctttygccatgattttataagtttcctgaggcctccccagccaagctgaactgtcctgaggcaagaatttgcctttgcctgtaatcaagggcgagccgggcagccaaggttccgaaacgcaccgtgaagaccctctaactgtgcctactattctgctcccctccgatcggcgcggggctcttgtccttcctctctccacccagcgaatgaatgaacgcaggagcgctcggagtacacgtcttcaactcggcgacgcccctgcttcggccccaccccgcaaacacccgccccggaccaggcccagggtaggcgcccatgaggacccgtccctgctcctgaccatcaccgtcactggggtcactgtgctcgtgttggtcctgaagagcatgaactccaggaggagagagccaatcaccttacaggaccctgmagccaagtacycgctgcccttgattgagaaagagaaaatcagccacaacacccggaggttccgctttggactgccttcgccggaccatgtcttagggcttcctgtaggtaactatgtccagctcttggcaaaaatcgataatgaattggtggtcagggcttacacccctgtctccagtgatgatgacagaggctttrtggacctaattataaagatctacttcaaaaatgtacacccccaatatcctgaaggtgggaagatgactcagtatttggagaacatgaaaatcggggagaccatcttttttcgagggccaaggggacgcttgttttaccatgggccagggaatcttggaatcagaccagaccagacgagtgagcctaaaaaaacactggccgatcacctgggaatgatwgctgggggcacaggcatcacacccatgtkgcagctcattcgccacatcaccaaggaccccagtgacaggaccaggatgtccctcatctttgccaaccagacagaggaggatatcttggtcagaaaagagcttgaagaaattgccaggactcacccagaccagttcracctgtggtacaccctggacaggcctcccattggctggaagtacagctcaggcttcgttactgccgacatgatcaaggagcaccttcctcctccagcgaagtccacgctcatcctggtgtgtggcccgccaccactratccagacggcggctcaccctaacctggagaagctgggttatacccaggacatgattttcacctactmacacctccaygtgctcagcaawtttgcatgtcccttttcatctgtttcagagtaagttcaatttcaccacggtaaactgggatgttttcaaaagtgccttgccatgtaccttsrcgcacacactggttctcctcttttgggtgtgggcctaacaaaaagggctcaaggggctggagactggctgctggggcctccttgcttggaggctggmaagagctccatttcagtatctttctccgtggttttgtgaaataaactcaagtacaaagcagaca

SEQ ID NO: 4444 - DNA, 1126 bp, Homo sapiens
ccatgtgaagaaggatgtgttcacttcccctttygccatgattttataagtttcctgaggcctccccagccaagctgaactgtcctgaggcaagaatttgcctttgcctgtaatcaagggcgagccgggcagccaaggttccgaaacgcaccgtgaagaccctctaactgtgcctactattctgctcccctccgatcggcgcggggctcttgtccttcctctctccacccagcgaatgaatgaacgcaggagcgctcggagtacacgtcttcaactcggcgacgcccctgcttcggccccaccccgcaaacacccgccccggaccaggcccagggtaggcgcccatgaggacccgtccctgctcctgaccatcaccgtcactggggtcactgtgctcgtgttggtcctgaagagcatgaactccaggaggagagagccaatcaccttacaggaccctgmagccaagtacycgctgcccttgattgagaaagagaaaatcagccacaacacccggaggttccgctttggactgccttcgccggaccatgtcttagggcttcctgtaggtaactatgtccagctcttggcaaaaatcgataatgaattggtggtcagggcttacacccctgtctccagtgatgatgacagaggctttrtggacctaattataaagatctacttcaaaaatgtacacccccaatatcctgaaggtgggaagatgactcagtatttggagaacatgaaaatcggggagaccatcttttttcgagggccaaggggacgcttgttttaccatgggccagggaatcttggaatcagaccagaccagacgagtgagcctaaaaaaacactggccgatcacctgggaatgatwgctgggggcacaggcatcacacccatgtkgcagctcattcgccacatcaccaaggaccccagtgacaggaccaggatgtccctcatctttgccaaccagacagaggaggatatcttggtcagaaaagagcttgaagaaattgccaggactcacccagaccagttcracctgtggtacaccctggacaggcctcccattggtccctggtcggcagagggcgctaccctactgagcaattctgcgcagttccac

SEQ ID NO: 4445 - DNA, 1354 bp, Homo sapiens
accgggaggttgggggccggagcgggaggcgtggggagaggtcgtgggcgggaccgcgaagggcggggagyggggcgggccggctcggattccggaaggctgagactccagtgacccggcgggaggagaggcaactttccctgtcgggcttgagttgggagaggagcagggcggccttgtagggacccgtccctgctcctgaccatcaccgtcactggggtcactgtgctcgtgttggtcctgaagagcatgaactccaggaggagagagccaatcaccttacaggaccctgmagccaagtacycgctgcccttgattgagaaagagaaaatcagccacaacacccggaggttccgctttggactgccttcgccggaccatgtcttagggcttcctgtaggtaactatgtccagctcttggcaaaaatcgataatgaattggtggtcagggcttacacccctgtctccagtgatgatgacagaggctttrtggacctaattataaagatctacttcaaaaatgtacacccccaatatcctgaaggtgggaagatgactcagtatttggagaacatgaaaatcggggagaccatcttttttcgagggccaaggggacgcttgttttaccatgggccagggaatcttggaatcagaccagaccagacgagtgagcctaaaaaaacactggccgatcacctgggaatgatwgctgggggcacaggcatcacacccatgtkgcagctcattcgccacatcaccaaggaccccagtgacaggaccaggatgtccctcatctttgccaaccagacagaggaggatatcttggtcagaaaagagcttgaagaaattgccaggactcacccagaccagttcracctgtggtacaccctggacaggcctcccattggctggaagtacagctcaggcttcgttactgccgacatgatcaaggagcaccttcctcctccagcgaagtccacgctcatcctggtgtgtggcccgccaccactratccagacggcggctcaccctaacctggagaagctgggttatacccaggacatgattttcacctactmacacctccaygtgctcagcaawtttgcatgtcccttttcatctgtttcagagtaagttcaatttcaccacggtaaactgggatgttttcaaaagtgccttgccatgtaccttsrcgcacacactggttctcctcttttgggtgtgggcctaacaaaaagggctcaaggggctggagactggctgctggggcctccttgcttggaggctggmaagagctccatttcagtatctttctccgtggttttgtgaaataaactcaagtacaaagcagaca

SEQ ID NO: 4446 - DNA, 2306 bp, Homo sapiens
cccctcggaccaccggactggcctggggcgggacgtgggcgcgggggcgcggcgtgcggcacgctgcagggctgaagcggcggcggcggtggggactgcacgtagcccggcgctcggcatggctctcctggtgctcggtctggtgagctgtaccttctttctggcagtgaatggtctgtattcctctagtgatgatgtgatygaattaactccatcraatttcaaccgagaagttattcagagtgatagtttgtggcttgtagaattctatgctccayggtgtggtcactgtcaaagattaacaccagaatggaagaaagcagcaactgcattaaaagatgttgtcaaagttggtgcagttgatgcagataagcatcattccctaggaggtcagtatggtgttcagggatttcctaccattaagatttttggatccaacaaaaacagaccagaagattaccaaggtggcagaactggtgaagccattgtagatgctgcgctgagtgctctgcgccagctcgtgaaggatcgcctcgggggacgragcggaggatacagttctggaaaacaaggcagaagtgatagttcaagtaagaaggatgtgattgagctracagacgacagctttgataagaatgttctggacagtgaagatgtttggatggttgagttctatgctccttggtgtggacactgcaaaaacctagagccagagtgggctgccgcagcttcagaagtaaaagagcagacgaaaggaaragtgaaactggcagctgtggatgctacagtcaatcaggttctggcctcccgatacgggattagaggatttcctacaatcaagatatttcagaaaggcgagtctcctgtggattatgacggtgggckgacaagatccgacatcgtgtcccgggcccttgatttgttttctgataacgccccacctcctgagctgcttgagattatcaacgaggacattgccaagaggacgtgtgaggagcaccagctctgtgttgtggctgtgctgccccatatccttgatactggagctgcaggcagaaattcttatctggaagttcttctgaagttggcagacaaatacaaaaagaaaatgtgggggtggctgtggacagaagctggagcccagtctgaacttgagaccgcgttggggattggagggtttgggtaccccgccatggccgccatcaatgcacgcaagatgaaatttgctctgctaaaaggctccttcagtgagcaaggcatcaacgagtttctcagggagctctcttttgggcgtggctccacggcacctgtaggaggcggggctttccctaccatcgttgagagagagccttgggacggcagggatggcgagcttcccgtggaggatgacattgacctcagtgatgtggagcttgatgacttagggaaagatgagttgtgagagccacaacagaggcttcagaccattttcttttyttgggagccagtggatttttccagcagtgaagggacattctctacactcagatgactctaccagtggccttttaaccaagaagtagtacttgattggtcatttgaaaacactgcaacagtgaacttttgcatctcaagaaaacattgaaaaattctatgaattgttgtagccggtgaattgagycgtattctgtcacataatattttgaagaaaacttggctgtcgaaacatttttctctctgactgctgcttgaatgttcttggaggctgyttcttatgtatgggttttttttaatgtgatcccttcatttgaatattaatggctttttccattaaagaataaaatattttggacaatgccgataaatgtatgaagttagtatccacatcataaattcagagtgatgtttagcagtaaatcaatattttgaagtgatacacagatgtctttcctccccacaaacttttttaaacaaaaaacaagacctcttttctttagatggtgccacctatgcccaccacaacagagattttacatggaaaccgggctcagtgagaactgatttcctgcccaatatttgtctttgggctgtctctagtgactaattattaaggaatctagctggttatacagttcaaggctttytrtgtwgttaatgaacctcaaaatagccgttaagayatgaaatacagcagcaggttaccaatgcgaacaggtagttcgcatttatgtaaaacattcagaaaatgaagttttgaatttgttrgaacattcaaaggacttgagagcattttattgtaacttaaaaaaataaatacaactgtcact

SEQ ID NO: 4447 - DNA, 2179 bp, Homo sapiens
gcacttttgtttttatcttcaggtctggtgagctgtaccttctttctggcagtgaatggtctgtattcctctagtgatgatgtgatygaattaactccatcraatttcaaccgagaagttattcagagtgatagtttgtggcttgtagaattctatgctccayggtgtggtcactgtcaaagattaacaccagaatggaagaaagcagcaactgcattaaaagatgttgtcaaagttggtgcagttgatgcagataagcatcattccctaggaggtcagtatggtgttcagggatttcctaccattaagatttttggatccaacaaaaacagaccagaagattaccaaggtggcagaactggtgaagccattgtagatgctgcgctgagtgctctgcgccagctcgtgaaggatcgcctcgggggacgragcggaggatacagttctggaaaacaaggcagaagtgatagttcaagtaagaaggatgtgattgagctracagacgacagctttgataagaatgttctggacagtgaagatgtttggatggttgagttctatgctccttggtgtggacactgcaaaaacctagagccagagtgggctgccgcagcttcagaagtaaaagagcagacgaaaggaaragtgaaactggcagctgtggatgctacagtcaatcaggttctggcctcccgatacgggattagaggatttcctacaatcaagatatttcagaaaggcgagtctcctgtggattatgacggtgggckgacaagatccgacatcgtgtcccgggcccttgatttgttttctgataacgccccacctcctgagctgcttgagattatcaacgaggacattgccaagaggacgtgtgaggagcaccagctctgtgttgtggctgtgctgccccatatccttgatactggagctgcaggcagaaattcttatctggaagttcttctgaagttggcagacaaatacaaaaagaaaatgtgggggtggctgtggacagaagctggagcccagtctgaacttgagaccgcgttggggattggagggtttgggtaccccgccatggccgccatcaatgcacgcaagatgaaatttgctctgctaaaaggctccttcagtgagcaaggcatcaacgagtttctcagggagctctcttttgggcgtggctccacggcacctgtaggaggcggggctttccctaccatcgttgagagagagccttgggacggcagggatggcgagcttcccgtggaggatgacattgacctcagtgatgtggagcttgatgacttagggaaagatgagttgtgagagccacaacagaggcttcagaccattttcttttyttgggagccagtggatttttccagcatctctacactcagatgactctaccagtggccttttaaccaagaagtagtacttgattggtcatttgaaaacactgcaacagtgaacttttgcatctcaagaaaacattgaaaaattctatgaattgttgtagccggtgaattgagycgtattctgtcacataatattttgaagaaaacttggctgtcgaaacatttttctctctgactgctgcttgaatgttcttggaggctgyttcttatgtatgggttttttttaatgtgatcccttcatttgaatattaatggctttttccattaaagaataaaatattttggacaatgccgataaatgtatgaagttagtatccacatcataaattcagagtgatgtttagcagtaaatcaatattttgaagtgatacacagatgtctttcctccccacaaacttttttaaacaaaaaacaagacctcttttctttagatggtgccacctatgcccaccacaacagagattttacatggaaaccgggctcagtgagaactgatttcctgcccaatatttgtctttgggctgtctctagtgactaattattaaggaatctagctggttatacagttcaaggctttytrtgtwgttaatgaacctcaaaatagccgttaagayatgaaatacagcagcaggttaccaatgcgaacaggtagttcgcatttatgtaaaacattcagaaaatgaagttttgaatttgttrgaacattcaaaggacttgagagcattttattgtaacttaaaaaaataaatacaactgtcact

SEQ ID NO: 4448 - DNA, 3818 bp, Homo sapiens
agatcttactccctttggcattttacaccttactcatacaatcatttttaaaaaatagcaatttaaaaaaatacagttcaagtgttcatcatatccaggcatgcaagccttttctaaatttttttaaataataaaaaagccccacagaggaaaggaggttatttgtgtcctcctgacacacacttttagattttggttaaaaagtctctagtgggtgcaaagtgaccccctttgtcactggaaacaaataggagcattctttgtgccactgtccacaaccacacagatatgtttcccaagggagctcatcaggtcttcaaacatttagcaagcatgacatgtgtaagagacagtattggagaagtaagacaagccttgctctgccgaagcttacaatccaggagctcaccccttcaaggaatttacagcctccagacagataataacattaggtccatgaaagcctacaaggcaagaagttcaggagagaaagaagtcataaccatcttggaagaatctcaacttgttttatcagaactcaaacgccaatttctcacccctagcttccctcattagygcttattaactagtattgggaggaccaagcgaagagtaaagctagggtagcagaggccataagctaattgcaaaggacagagctaaagaaacatgctagtttcccctgagcacccaactgcatgactgaaaatggattaatttgtatttctaatggatatacaagaaacacgtgaatatgctaaaataaatttaaggtcaagcaatgcaaagtgttagtgcgtttgccttccactctcagaggcagcctctcttatttggttcttgggctgcttcataaaaagttctgtgttttttaatggcctcagcttttgggaggctcaggccacctagcccatcaggagaccaggcccgaaggatggatctgaagagtgggcaacggagagttaaaccagggctgacttcaacaggcccagtcaagtcaggggcaagcacattgtccatccactggaagacggaaaggggagaggaaggcaggccctcccgactcacaggtcacctcgcaactttgctaggcactacccaccctttagggataagtgaagtatgtggtgggcatacaaggcgcacaggggagtcattctggcaaattccaagaaggttttaagggctcccgaggcaggcaggcccagttgctgtttggagcttcctttggggtgggaggatggcgggggcagggggccggggcggtgccttaacgaggggagatgcttttaaatagctgccttccaaaaaccatcctccctgcttctttgagaagcacccagctgttgtttaccctccaggacagcaaatccggttatttgtctctctattccgtgatattataaagtaatgaatggtccattaaactaagtttgggatcccgtctccccacagccacctcctcgccggcaccctcagccggggaggccgtaggctcgggctgcagcctggcagcctcagtccccctccctccaccatttccccctactccctccctctcctgcaccccctccccccggttatttgggagattagagttcattaattaaatcctgtgcttagatcgaactgtaacattattccaatcacatttatcttgcaggcggcggaggagatggcagcctcgctggaaacgcgcgggggagcctgagccggcggccggggacgcacggcgctgcgcgctccttcgccacgccgccgcgcagcccctccatcttcctgctcggcaccgggccccgcgcgcccctgcctacggggtcccgctgctctccggggctcctgccagccccaacccccggccccggtggcctccccccacccccgcccgggtccccctcctccgccacacgcgcgcgcgctcacacacacacacacacacacacacacatatatacacgccagcgagctgctggccgctcaatggaccgatttccccggtttccctgaacccagcccagcccgggatgagaaactgcaaaatggcccgggtcgccagtgtgctggggctggtcatgctcagcgtcgccctgctgattttatcgctcatcagctacgtgtccctgaaaaaggagaacatcttcaccactcccaagtacgccagcccgggggcgccccgaatgtacatgttccacgcgggattccggtcacaatttgcgctgaagtttctagacccgtcattcgtgcccattacgaattctctcacccaggaactccaagagaaaccttctaagtggamatttaatcggacagcgtttttacatcaaaggcaagaaattcttcagcatgtcgatgtaataaaaaatttttctttgaccaagaatagtgttcggattggacaactgatgcactatgattattccagccataaatatgttttctctattagcaataacttccggtcacttcttccagatgtgtcacccattatgaacaagcattataatatttgtgcygtggttggaaatagtgggatcctgacagggagccagtgtggacaagaaatagataaatcagattttgttttccgttgcaatttcgcccctacggaggctttccaaagagatgttggaagaaaaaccaatcttaccaccttcaaccccagcatcctggaaaaatattacaacaatctcttgactattcaggaccgtaacaactttttcctcagtttaaaaaagcttgacggggccattctttggatccctgcatttttcttccacacttcagcaactgtgaccaggacattagttgacttttttgttgaacacagaggtcagttaaaagtccaactggcttggccgggaaatataatgcaacatgtcaacaggtactggaaaaacaaacatttgtcacctaaacggctgagcacaggtattcttatgtacacccttgcatcagcaatatgtgaagagatccacttgtatggattttggccktttggatttgaccccaacacaagggaagatcttccataccattactatgacaaaaaaggaaccaaatttaccaccaagtggcaggagtcccaccagctgcctgctgagtttcagctgctgtaccgaatgcatggggaagggctcaccaagctgactctgtcacactgtgcctaagaactccaaacggaaagygccaaatggctgtttaaaaagtgccccaaatcaaattgaatagccttcagaatagaaccctagagaatgtcttataaggattgtctgccatttaaaaggaaagatgtcttttctcttttgcactgctcttttaagagttttagcagatttagcaggacagatgcattgaagccacatggtttagacttgattgataaagggaatgttgcatttgggactatgctgctaacgaaatggtttgaagtattttcatgtttggattttaataataaactgcctctcatttttatgaggactagagctatagtttctgcagctctgctcagatagtcctcataatcagaggcctctggccaactggggcaggacctgttttgctggtgggatcagactctgaaaaatggaaacgtaaaaaactggtttgcatatctcatcttctatctatctccctatctccatctctatcaccatctcactccytccctctgcaactactccctgccctaccaccgtggagtttaataatttgctaggaatcctattgaattcgctttgcttgtatatgttgcatttgtacttgatgtgtttaaggttctgggtaactttgatgcttcatgacaaaataggcaaatc

SEQ ID NO: 4449 - DNA, 1500 bp, Homo sapiens
atggcccatgaccttctcttcaggctttttccacttttggccstgggagtccccttacaaagcaaccgccttggccccacatctcgcctgcgctattccaggttcctagatccttctaatgtcattttcctgcgttgggactttgaccttgaggctgaaatcatcagttttgagctccaggtccgtacagctggctgggtgggcttcggtgtcacaaatcgctacaccaacgtgggaagtgatctggttgttggaggagtcttgcctaatggcaatgtctatttctcggatcagcacttggtggasgaagacactctgaaggaggatgggagccaggatgctgagctgctgsgsctgacggaagatgctgtctacaccaccatgcacttttccaggcccttccgctcctgcgaccctcatgacctggatattacgagcaacaccgtgagggtgctggccrcctatggcctggatgacactctgaagctgtatcgggarcgtacttttgtcaagtccatctttctgctacaagtcgtccaccctgaygatctggatgtccctgaggacaccatcatccatgacttggagatcactaatttcctcattccagaggatgacaccacgtatgcctgcacctttcttcctctccctattgtgagcragaagcatcacatttacaagtttgagcctaagttggtctaccacaatgagacaacggtgcatcacatcctggtgtacgcctgyggsaatgctagcgttctccccacaggcatcagcgactgctatggggccgaccctgccttctccctttgctcacaggtcatcgtgggctsggctgtcgggggcacaagctaccagtttccagatgacgtaggmgtctctattgggacccccttggaccytcagtggatcygactggagattcattacagcaattttaacaaccttcctggtgtgtatgattcctcggggattygcgtgtactacacttctcagctgygcaaatacgacacggatgtcctccagctgggcttcttcacgtttcccatccacttcatccccccgggcgctgagtccttcatgtcctatgggctgtgtaggacggagaagtttgaggagatgaatggagctcctatgcctgacatayaggtrtatggctacctgctrcacacccacttggctggacgggctctgcaagcagtgcaatacaggaatggaacacaacttcgaaaaatctgtaaagacgattcctatgacttcaacctgcaggagactcgagrtttgccctctagagtggagatcaagccgggagatgaattgctggtagaatgtcactaccagacactggaccgtgactccatgacatttggaggccccagcaccattaatgagatgtgcctcatcttcctcttctactatccccaaaataacatctccagctgcatggggtaccctgacattatctacgtggcccacgagctrggggaggaggcatcagag

SEQ ID NO: 4450 - DNA, 2382 bp, Homo sapiens
tctccagcctcttcttggaaatggccctatctaaaaaccacttggccattttgaaatctttctcaggtcctgattctgggttatgctcagggcagtctctgaagatttctcatcctgttcaggccggttccttgctaatttatgcccacacatacctggcagggagagctaaagatggagttggtgggagctgccctttggcatcattgatttttaatgtattcctaagcagcagcatctgtccttgatcctctgcttgtcagaaggccaaactcacagacattttaagcttaaaacaaacagttacaaagctgttgaactttgcctgtgcaaggacaaacacaaaaacatcccaaggcccaccccccgcygacccccactgtacttgtcacacatatgtgagaatttccattctcagctaaaggcaagcattgaaagaatacacagaaagcctggaaaaggtttccaggggtgtcaatacgccctgtcaactgagaattaagaggatccggctggtcacttgcctggagaggatcctgcatgctgatagtgctgaggcacctgccagctaagaaccaccgggaggaactgggccattctaacacccrttgctaccatgctggccacccgcctctccagacccctgtcacggctcccaggaaaaaccctaagtgcctgtgatagagaaaatggagcaagacgcccactattgcttggttctacttcctttatcccgattggcygtcggacttatgccagtgcggcggagccggttggcagcaaagctgtcctggtcacaggctgtgactctggatttgggttctcattggccaagcatctgcattcaaaaggcttccttgtgtttgctggctgcttgatgaaggacaaaggccatgatggggtcaaggagctggacagcctaaacagtgaccgattgagaaccgtccagctcaatgtctgcagcagcgaagaggtggagaaagtggtggagattgtccgctcgagcctgaaggaccctgagaaaggsatgtggggcctcgttaacaatgcyggcatctcaacgttcggggaggtggagttcaccagcctggagacctacaagcaggtggcagaagtgaacctttggggcacagtgcggatgacgaaatcctttctccccctcatccgaagggccaaaggccgcgtcgtcaatatcagcagcatgctgggccgcatggccaacccggcccgctccccgtactgcatcaccaagttcggggtagaggctttctcggactgcctgcgctatgagatgtaccccctgggcgtgaaggtcagcgtggtggagcccggcaacttcatcgctgccaccagcctttayagccctgagagcattcaggccatcgccaagaagatgtgggaggagctgcctgaggtcgtgcgcaaggactacggcaagaagtactttgatgaaaagatcgccaagatggagacctactgcagcagtggctccacagacacgtcccctgtcatcgatgctgtcacacacgccctgaccgccaccaccccctacacccgctaccaccccatggactactactggtggctgcgaatgcagatcatgacccacttgcctggagccatctccgacatgatctacatccgctgaagagtctcgctgtggcctctgtcagggatccctggtggaaggggaggggagggaggaacccatatagtcaactcttgattatccacgtgtggattatccaccatgccaggaagacccataactggttttaacactaactagagggaatgacttctttgcatagtgagtgacttgggccttcacaaacagggtgtggagtggmaggcagaggcctctaaatctcagrgcaaacatggtgaatctatctctccggagataatttcatacagagattttaaraaaacatctttatattaaaaacagatctcatttgatccttaagccagtctcatgaatgaaaaggacaggtttttttcttttgtaaatgaagcatttgcagcttaaagaggatgcatgaaataacccttttatcgcttataaatagtgccagttatgtgttccygccacggctgtggaaatacttcacatttgcattccaggactgttttggatccatttgcccgagaatcttctgactaactctgtgtcctcatctgggcagcacacaccaagtgcccactggtacctctgcatgtccatggtgctgtgtgactggccagccagcagccagtgactcagagctggctgtatggagggggtgggaatgtttctggagatttttgtttttccagacacagtcttgctcagtcccctaggctggagtgcaatggcaccatctccgctcactgcaacct

SEQ ID NO: 4451 - DNA, 2165 bp, Homo sapiens
ccccagcgcgcgcttcgcgtgtagaagcgtccgggtggcggaggccgcaggccgcaggagtgctggtggaggggcttccagaaagaccctgcggcagcgccccccctcggctctccccgcaggagagcgggcacctgcgcggcgccgggtgaaggcgagagcctcggcgagccctctgcagcggagccccctgcccatttggttttggtcagcctggaaatctgcctgtagtcagctgatgcagagtcaccctgcagttcctactttgaggggttgcagaagcacatatttcactatggagggccgcctgcaggcctcgcgctgacaggatcttttgtgacgctgcaaatgtcctgaaccaccgggaggaactgggccattctaacacccrttgctaccatgctggccacccgcctctccagacccctgtcacggctcccaggaaaaaccctaagtgcctgtgatagagaaaatggagcaagacgcccactattgcttggttctacttcctttatcccgattggcygtcggacttatgccagtgcggcggagccggttggcagcaaagctgtcctggtcacaggctgtgactctggatttgggttctcattggccaagcatctgcattcaaaaggcttccttgtgtttgctggctgcttgatgaaggacaaaggccatgatggggtcaaggagctggacagcctaaacagtgaccgattgagaaccgtccagctcaatgtctgcagcagcgaagaggtggagaaagtggtggagattgtccgctcgagcctgaaggaccctgagaaaggsatgtggggcctcgttaacaatgcyggcatctcaacgttcggggaggtggagttcaccagcctggagacctacaagcaggtggcagaagtgaacctttggggcacagtgcggatgacgaaatcctttctccccctcatccgaagggccaaaggccgcgtcgtcaatatcagcagcatgctgggccgcatggccaacccggcccgctccccgtactgcatcaccaagttcggggtagaggctttctcggactgcctgcgctatgagatgtaccccctgggcgtgaaggtcagcgtggtggagcccggcaacttcatcgctgccaccagcctttayagccctgagagcattcaggccatcgccaagaagatgtgggaggagctgcctgaggtcgtgcgcaaggactacggcaagaagtactttgatgaaaagatcgccaagatggagacctactgcagcagtggctccacagacacgtcccctgtcatcgatgctgtcacacacgccctgaccgccaccaccccctacacccgctaccaccccatggactactactggtggctgcgaatgcagatcatgacccacttgcctggagccatctccgacatgatctacatccgctgaagagtctcgctgtggcctctgtcagggatccctggtggaaggggaggggagggaggaacccatatagtcaactcttgattatccacgtgtggattatccaccatgccaggaagacccataactggttttaacactaactagagggaatgacttctttgcatagtgagtgacttgggccttcacaaacagggtgtggagtggmaggcagaggcctctaaatctcagrgcaaacatggtgaatctatctctccggagataatttcatacagagattttaaraaaacatctttatattaaaaacagatctcatttgatccttaagccagtctcatgaatgaaaaggacaggtttttttcttttgtaaatgaagcatttgcagcttaaagaggatgcatgaaataacccttttatcgcttataaatagtgccagttatgtgttccygccacggctgtggaaatacttcacatttgcattccaggactgttttggatccatttgcccgagaatcttctgactaactctgtgtcctcatctgggcagcacacaccaagtgcccactggtacctctgcatgtccatggtgctgtgtgactggccagccagcagccagtgactcagagctggctgtatggagggggtgggaatgtttctggagatttttgtttttccagacacagtcttgctcagtcccctaggctggagtgcaatggcaccatctccgctcactgcaacct

SEQ ID NO: 4452 - DNA, 2173 bp, Homo sapiens
ggatctggcgcccggcttaggggcgagacggccgcaccgggagcctagcgatcagggcaccttgggcgggaggagcgccagccgggcacccagcgcggaggaggcggctcggcggccccccgacagccacgccgccgtgagccccgcccagcgtagccccagcgcgcgcttcgcgtgtagaagcgtccgggtggcggaggccgcaggccgcaggagtgctggtggaggggcttccagaaagaccctgcggcagcgccccccctcggctctccccgcaggagagcgggcacctgcgcggcgccgggtgaaggcgagagcctcggcgagccctctgcagcggagccccctgcccatttggttttggaaccaccgggaggaactgggccattctaacacccrttgctaccatgctggccacccgcctctccagacccctgtcacggctcccaggaaaaaccctaagtgcctgtgatagagaaaatggagcaagacgcccactattgcttggttctacttcctttatcccgattggcygtcggacttatgccagtgcggcggagccggttggcagcaaagctgtcctggtcacaggctgtgactctggatttgggttctcattggccaagcatctgcattcaaaaggcttccttgtgtttgctggctgcttgatgaaggacaaaggccatgatggggtcaaggagctggacagcctaaacagtgaccgattgagaaccgtccagctcaatgtctgcagcagcgaagaggtggagaaagtggtggagattgtccgctcgagcctgaaggaccctgagaaaggsatgtggggcctcgttaacaatgcyggcatctcaacgttcggggaggtggagttcaccagcctggagacctacaagcaggtggcagaagtgaacctttggggcacagtgcggatgacgaaatcctttctccccctcatccgaagggccaaaggccgcgtcgtcaatatcagcagcatgctgggccgcatggccaacccggcccgctccccgtactgcatcaccaagttcggggtagaggctttctcggactgcctgcgctatgagatgtaccccctgggcgtgaaggtcagcgtggtggagcccggcaacttcatcgctgccaccagcctttayagccctgagagcattcaggccatcgccaagaagatgtgggaggagctgcctgaggtcgtgcgcaaggactacggcaagaagtactttgatgaaaagatcgccaagatggagacctactgcagcagtggctccacagacacgtcccctgtcatcgatgctgtcacacacgccctgaccgccaccaccccctacacccgctaccaccccatggactactactggtggctgcgaatgcagatcatgacccacttgcctggagccatctccgacatgatctacatccgctgaagagtctcgctgtggcctctgtcagggatccctggtggaaggggaggggagggaggaacccatatagtcaactcttgattatccacgtgtggattatccaccatgccaggaagacccataactggttttaacactaactagagggaatgacttctttgcatagtgagtgacttgggccttcacaaacagggtgtggagtggmaggcagaggcctctaaatctcagrgcaaacatggtgaatctatctctccggagataatttcatacagagattttaaraaaacatctttatattaaaaacagatctcatttgatccttaagccagtctcatgaatgaaaaggacaggtttttttcttttgtaaatgaagcatttgcagcttaaagaggatgcatgaaataacccttttatcgcttataaatagtgccagttatgtgttccygccacggctgtggaaatacttcacatttgcattccaggactgttttggatccatttgcccgagaatcttctgactaactctgtgtcctcatctgggcagcacacaccaagtgcccactggtacctctgcatgtccatggtgctgtgtgactggccagccagcagccagtgactcagagctggctgtatggagggggtgggaatgtttctggagatttttgtttttccagacacagtcttgctcagtcccctaggctggagtgcaatggcaccatctccgctcactgcaacct

SEQ ID NO: 4453 - DNA, 2014 bp, Homo sapiens
tacacagaaagcctggaaaaggtttccaggggtgtcaatacgccctgtcaactgagaattaagaggatccggctggtcacttgcctggagaggatcctgcatgctgatagtgctgaggcacctgccagctaaggtgagagacagctgaacttgaacatgtgggctgtcactgaragcggtcagcagaagaaaatttgagccatggaaccaccgggaggaactgggccattctaacacccrttgctaccatgctggccacccgcctctccagacccctgtcacggctcccaggaaaaaccctaagtgcctgtgatagagaaaatggagcaagacgcccactattgcttggttctacttcctttatcccgattggcygtcggacttatgccagtgcggcggagccggttggcagcaaagctgtcctggtcacaggctgtgactctggatttgggttctcattggccaagcatctgcattcaaaaggcttccttgtgtttgctggctgcttgatgaaggacaaaggccatgatggggtcaaggagctggacagcctaaacagtgaccgattgagaaccgtccagctcaatgtctgcagcagcgaagaggtggagaaagtggtggagattgtccgctcgagcctgaaggaccctgagaaaggsatgtggggcctcgttaacaatgcyggcatctcaacgttcggggaggtggagttcaccagcctggagacctacaagcaggtggcagaagtgaacctttggggcacagtgcggatgacgaaatcctttctccccctcatccgaagggccaaaggccgcgtcgtcaatatcagcagcatgctgggccgcatggccaacccggcccgctccccgtactgcatcaccaagttcggggtagaggctttctcggactgcctgcgctatgagatgtaccccctgggcgtgaaggtcagcgtggtggagcccggcaacttcatcgctgccaccagcctttayagccctgagagcattcaggccatcgccaagaagatgtgggaggagctgcctgaggtcgtgcgcaaggactacggcaagaagtactttgatgaaaagatcgccaagatggagacctactgcagcagtggctccacagacacgtcccctgtcatcgatgctgtcacacacgccctgaccgccaccaccccctacacccgctaccaccccatggactactactggtggctgcgaatgcagatcatgacccacttgcctggagccatctccgacatgatctacatccgctgaagagtctcgctgtggcctctgtcagggatccctggtggaaggggaggggagggaggaacccatatagtcaactcttgattatccacgtgtggattatccaccatgccaggaagacccataactggttttaacactaactagagggaatgacttctttgcatagtgagtgacttgggccttcacaaacagggtgtggagtggmaggcagaggcctctaaatctcagrgcaaacatggtgaatctatctctccggagataatttcatacagagattttaaraaaacatctttatattaaaaacagatctcatttgatccttaagccagtctcatgaatgaaaaggacaggtttttttcttttgtaaatgaagcatttgcagcttaaagaggatgcatgaaataacccttttatcgcttataaatagtgccagttatgtgttccygccacggctgtggaaatacttcacatttgcattccaggactgttttggatccatttgcccgagaatcttctgactaactctgtgtcctcatctgggcagcacacaccaagtgcccactggtacctctgcatgtccatggtgctgtgtgactggccagccagcagccagtgactcagagctggctgtatggagggggtgggaatgtttctggagatttttgtttttccagacacagtcttgctcagtcccctaggctggagtgcaatggcaccatctccgctcactgcaacct

SEQ ID NO: 4454 - DNA, 3986 bp, Homo sapiens
  misc_feature (1)...(3986): n = A,T,C or G
caggctgaagggagggaggctgagtctcagggcagagtctgagtcccactccgcaccccaccctctgtctggtacagcttaccaaaccaaagtgcccaaagccgtgacatcccggccggcggctcgcaggcccccgccctccgcacgtcacggccgccgggtgcagtgccccctaggggcccctgggacgaggaggaagcgccaggtccttcccgccgccgccgccgccgccgccgcctgctcccctggcacgcgccccgccgccctcggcagccgcagctccgtgtcccctgagaaccagccgtcccgcgccatgggcacgcgtctgccgctcgtcctgcgccagctccgccgcccgccccagcccccgggccctccgcgccgcctccgtgtgccctgtcgcgctagcagcggcggcggcggaggcggcggcggtggccgggagggcctgcttggacagcggcggccgcaggatggccaggcccggagcagctgcagccccggcggccgaacgcccgcggcgcgggactccatcgtcagagaagtcattcagaattcaaaagaagttctaagtttattgcaagaaaaaaaccctgccttcaagccggttcttgcaattatccaggcaggtgacgacaacttgatgcaggaaatcaaccagaatttggctgaggaggctggtctgaacatcactcacatttgcctccctccagatagcagtgaagccgagattatagatgaaatcttaaagatcaatgaagataccagagtacatggccttgcccttcagatctctgagaacttgtttagcaacaaagtcctcaatgccttgaaaccagaaaaagatgtggatggagtaacagacataaacctggggaagctggtgcgaggggatgcccatgaatgttttgtttcacctgttgccaaagctgtaattgaacttcttgaaaaatcaggtgtcaacctagatggaaagaagattttggtagtgggggcccatgggtctttggaagctgctctacaatgcctgttccagagaaaagggtccatgacaatgagcatccagtggaaaacacgccagcttcaaagcaagcttcacgaggctgacattgtggtcctaggctcacctaagccagaagagattccccttacttggatacaaccaggaactactgttctcaactgctcccatgacttcctgtcagggaaggttgggtgtggctctccaagaatacattttggtggactcattgaggaagatgatgtgattctccttgctgcagctctgcgaattcagaacatggtcagtagtggaaggagatggcttcgtgaacagcagcacaggcggtggagacttcactgcttgaaacttcagcctctctcccctgtgccaagtgacattgagatttcaagaggacaaactccaaaagctgtggatgtccttgccaaggagattggattgcttgcagatgaaattgaaatctatggcaaaagcaaagccaaagtacgtttgtccgtgctagaaaggttaaaggatcaagcagatggaaaatacgtcttagttgctgggatcacacccacccctcttggagaagggaagagcacagtcaccatcgggcttgtgcaggctctgaccgcacacctgaatgtcaactcctttgcctgcttgaggcagccttcccaaggaccgacgtttggagtgaaaggaggagccgcgggtggtggatatgcccaggtcatccccatggaggagttcaaccttcacttgactggagacatccacgccatcaccgctgccaataacttgctggctgccgccatcgacacgaggattcttcatgaaaacacgcaaacagataaggctctgtataatcggctggttcctttagtgaatggtgtcagagaattttcagaaattcagcttgctcggctaaaaaaactgggaataaataagactgatccgagcacactgacagaagaggaagtgagtaaatttgcccgtctcgacatcgacccatctaccatcacgtggcagagagtattggatacaaatgaccgatttctacgaaaaataaccatcgggcagggaaacacagagaagggccattaccggcaggcgcagtttgacatcgcagtggccagcgagatcatggcggtgctggccctgacggacagcctcgcagacatgaaggcacggctgggaaggatggtggtggccagtgacaaaagcgggcagcctgtgacagcagatgatttgggggtgacaggtgctttgacagttttgatgaaagatgcaataaaaccaaacctgatgcagaccctggaagggacacctgtgttcgtgcatgcgggcccttttgctaacattgctcacggcaactcttcagtgttggctgataaaattgccctgaaactggttggtgaagaaggatttgtagtgaccgaagctggctttggtgctgacatcggaatggagaaattcttcaacatcaagtgccgagcttccggcttggtgcccaacgtggttgtgttagtggcaacggtgcgagctctgaagatgcatggaggcgggccaagtgtaacggctggtgttcctcttaagaaagaatatacagaggagaacatccagctggtggcagacggctgctgtaacctccagaagcaaattcagatcactcagctctttggggttcccgttgtggtggctctgaatgtcttcaagaccgacacccgcgctgagattgacttggtgtgtgagcttgcaaagcgggctggtgcctttgatgcagtcccctgctatcactggtcsgttggtggaaaaggatcggtggacttggctcgggctgtgagagaggctgygagtaaaagaagccgattccagttcctgtatgatgttcaggttccaattgtggacaagataaggaccattgctcaggctgtctrtggagccaaagatattgaactctctcctgaggcacaagccaaaatagatcgttacactcaacagggttttggaaatttgcccatctgcatggcaaagacccayctttctctatctcaccaacctgacaaaaaaggtgtgccaagggacttcatcttacctatcagtgacgtccgggycagcataggcgctgggttcatttaccctttggtcggaacgatgagcaccatgccaggactgcccacccggccctgcttttatgacatagatcttgataccgaaacagaacaagttaaaggcttgttctaagtggacaaggctctcacaggaccckatgcagactcctgaaacagactactctttgcctttttgctgcagytggagaagaaactgaatttgaaaaatgtctgttatgcaatgctggagacntggtgaaataggccaaagatttcttcttcgttcaagatgaattctgttcacagtggagtatggtgttcggcaaaaggacctccascaagactgaaagaaactaatttatttctgtttctgtggagtttccattatttctactgcttacactttagaatgtttattttatggggactaagggattargagtgtgaactaaaaggtracattttccactctcaagttttctactttgtctttgaactgaaaataaacatggatctagaaaaccaaccagcaagttttcagtgccagataaaactctgcgctctagaggtaactcctcatgggaggcagctaggagtgttacctgacaccagtttcctagaaaactgtgacaagcaaagcaataacacacgtcgagaaatatctgatcaagcgggaaatcttctgactgtcggggatctctagtaagatctcttggaatgaagtgcactgtgtatccaaaactattttccagcgccagtgaagttgctcttacctaaaacaaatgggtttatgctagtttccaccaaggaatgagtctcgatggccattaaactttctaaggcccacagggctaggaaaagtcgctctt

SEQ ID NO: 4455 - DNA, 3546 bp, Homo sapiens
  misc_feature (1)...(3546): n = A,T,C or G
cgcgcgaagctccctggtgttgtgcgcccttccccgcgcgcggcccctcctgctgggctggggtctgtggctgacgtccgcttttcccggaacggcaaagagaagtcattcagaattcaaaagaagttctaagtttattgcaagaaaaaaaccctgccttcaagccggttcttgcaattatccaggcaggtgacgacaacttgatgcaggaaatcaaccagaatttggctgaggaggctggtctgaacatcactcacatttgcctccctccagatagcagtgaagccgagattatagatgaaatcttaaagatcaatgaagataccagagtacatggccttgcccttcagatctctgagaacttgtttagcaacaaagtcctcaatgccttgaaaccagaaaaagatgtggatggagtaacagacataaacctggggaagctggtgcgaggggatgcccatgaatgttttgtttcacctgttgccaaagctgtaattgaacttcttgaaaaatcaggtgtcaacctagatggaaagaagattttggtagtgggggcccatgggtctttggaagctgctctacaatgcctgttccagagaaaagggtccatgacaatgagcatccagtggaaaacacgccagcttcaaagcaagcttcacgaggctgacattgtggtcctaggctcacctaagccagaagagattccccttacttggatacaaccaggaactactgttctcaactgctcccatgacttcctgtcagggaaggttgggtgtggctctccaagaatacattttggtggactcattgaggaagatgatgtgattctccttgctgcagctctgcgaattcagaacatggtcagtagtggaaggagatggcttcgtgaacagcagcacaggcggtggagacttcactgcttgaaacttcagcctctctcccctgtgccaagtgacattgagatttcaagaggacaaactccaaaagctgtggatgtccttgccaaggagattggattgcttgcagatgaaattgaaatctatggcaaaagcaaagccaaagtacgtttgtccgtgctagaaaggttaaaggatcaagcagatggaaaatacgtcttagttgctgggatcacacccacccctcttggagaagggaagagcacagtcaccatcgggcttgtgcaggctctgaccgcacacctgaatgtcaactcctttgcctgcttgaggcagccttcccaaggaccgacgtttggagtgaaaggaggagccgcgggtggtggatatgcccaggtcatccccatggaggagttcaaccttcacttgactggagacatccacgccatcaccgctgccaataacttgctggctgccgccatcgacacgaggattcttcatgaaaacacgcaaacagataaggctctgtataatcggctggttcctttagtgaatggtgtcagagaattttcagaaattcagcttgctcggctaaaaaaactgggaataaataagactgatccgagcacactgacagaagaggaagtgagtaaatttgcccgtctcgacatcgacccatctaccatcacgtggcagagagtattggatacaaatgaccgatttctacgaaaaataaccatcgggcagggaaacacagagaagggccattaccggcaggcgcagtttgacatcgcagtggccagcgagatcatggcggtgctggccctgacggacagcctcgcagacatgaaggcacggctgggaaggatggtggtggccagtgacaaaagcgggcagcctgtgacagcagatgatttgggggtgacaggtgctttgacagttttgatgaaagatgcaataaaaccaaacctgatgcagaccctggaagggacacctgtgttcgtgcatgcgggcccttttgctaacattgctcacggcaactcttcagtgttggctgataaaattgccctgaaactggttggtgaagaaggatttgtagtgaccgaagctggctttggtgctgacatcggaatggagaaattcttcaacatcaagtgccgagcttccggcttggtgcccaacgtggttgtgttagtggcaacggtgcgagctctgaagatgcatggaggcgggccaagtgtaacggctggtgttcctcttaagaaagaatatacagaggagaacatccagctggtggcagacggctgctgtaacctccagaagcaaattcagatcactcagctctttggggttcccgttgtggtggctctgaatgtcttcaagaccgacacccgcgctgagattgacttggtgtgtgagcttgcaaagcgggctggtgcctttgatgcagtcccctgctatcactggtcsgttggtggaaaaggatcggtggacttggctcgggctgtgagagaggctgygagtaaaagaagccgattccagttcctgtatgatgttcaggttccaattgtggacaagataaggaccattgctcaggctgtctrtggagccaaagatattgaactctctcctgaggcacaagccaaaatagatcgttacactcaacagggttttggaaatttgcccatctgcatggcaaagacccayctttctctatctcaccaacctgacaaaaaaggtgtgccaagggacttcatcttacctatcagtgacgtccgggycagcataggcgctgggttcatttaccctttggtcggaacgatgagcaccatgccaggactgcccacccggccctgcttttatgacatagatcttgataccgaaacagaacaagttaaaggcttgttctaagtggacaaggctctcacaggaccckatgcagactcctgaaacagactactctttgcctttttgctgcagytggagaagaaactgaatttgaaaaatgtctgttatgcaatgctggagacntggtgaaataggccaaagatttcttcttcgttcaagatgaattctgttcacagtggagtatggtgttcggcaaaaggacctccascaagactgaaagaaactaatttatttctgtttctgtggagtttccattatttctactgcttacactttagaatgtttattttatggggactaagggattargagtgtgaactaaaaggtracattttccactctcaagttttctactttgtctttgaactgaaaataaacatggatctagaaaaccaaccagcaagttttcagtgccagataaaactctgcgctctagaggtaactcctcatgggaggcagctaggagtgttacctgacaccagtttcctagaaaactgtgacaagcaaagcaataacacacgtcgagaaatatctgatcaagcgggaaatcttctgactgtcggggatctctagtaagatctcttggaatgaagtgcactgtgtatccaaaactattttccagcgccagtgaagttgctcttacctaaaacaaatgggtttatgctagtttccaccaaggaatgagtctcgatggccattaaactttctaaggcccacagggctaggaaaagtcgctctt

SEQ ID NO: 4456 - DNA, 2789 bp, Homo sapiens
agtgtgacatgttggcgagccaagtttatggaggcctttttttcccatgttctacgtgggaccattgatgtgtcttctgacaggcgtctttgtgatcagcggttctcacctcttctgcacagctcccgccatgtccgacagctcaccatctgtaacatgctgcagggtgcaaccgagctggtggctgagcccaaccgcagggttctggagaccctggccagctccctgcacactctcaagttccgccacctgctgttctctgatgtggctgctcagcagtcacttcggcagctgttgcatcagctcattcaccatggggctgtcagtcaagtgtcgctatactcctggcctgtgcctgagtcagcccttttcatccttattctcaccatgagtgctggcttctggcaaccagggcctggtggcccaccctgccgcctctgtggagaggcctcccgaggccgggccccatcccgagatgaagggtccctcttattgggctcacgtcggccccgccgggatgctgctgagcgatgtgctgcagccctgatggccagccggcgtaagagtgaagccaagcagatgcccagagctgcacctgccactcgggtaacacgccggagcacacaggagagcctgacagcaggcggaacagaccttaagagggagctgcaccccccagccacctcccatgaggctcctggcaccaagcggtcaccttctgctccagcagccacctcctctgcctcttcttctacatcctcatacaaacgggcaccagctagctcagccccacagcctaagcccctaaagcgtttcaagcgagctgcagggaagaagggtgctcgcacccgtcaggggcctggtgcagagtctgaagacctgtatgacttcgtttttattgtggctggcgagaaggaggatggcgaagagatggagattggggaagtggcttgtggagctttggatggatcagatcccagctgcctggggcttccagcactggaagcttcacaaagattccgcagcatctccaccttggagctattcacagttccactctccacagaggcagccctgacactatgccacctgctgagctcctgggtgtcactggagagcctcacactctcctacaatggcctgggctctaacatcttccgcctgctagacagcctgcgggccctgtcaggccaggctggatgtcgcctccgtgccctgcatctcagtgacctgttctcaccactgcccatcctggagctgacacgtgctatcgtgcgagcactgcccctgctacgggtcctctctattcgtgttgaccacccaagccagcgggacaaccctggtgtgccagggaatgcagggccccctagccacataataggcgatgaggagataccagaaaactgcctggagcagttggagatgggatttccacggggagcccagccagccccactgctgtgctccrttctgaaggcctcgggttctctgcagcagctgtccctggatagtgccacctttgcctctccccaggattttgggcttgttttgcaaacactcaaagagtacaacctagccctgaaaagactgagcttccatgacatgaatctcgctgactgtcagagcgaggtgctctttttgctacagaatctgactctgcaagagattaccttctccttctgccgtctgtttgagaagcgcccagcccaatttctgcctgagatggttgctgctatgaagggcaactccacactgaagggcctccggctgccagggaaccgcctggggaatgctggcctgctggccttggcagatgttttctcagaggattcatcctcctctctctgtcagctggacatcagttccaactgcatcaagccagatgggcttctggagttcgccaagcggctggagcgctggggccgtggagcctttggtcacctgcgcctcttccaaaactggctggaccaggatgcagtcacagccagggaagccatccggcggctccgggctacctgccatgtgkttagcgactcatgggactcatcccaggccttcgcagattatgttagcaccatgtgatggggcccgtacctcacagtctcatgctcggtaccatcagcttgcaggggctgaagcatgggctgcccagaaccccaaccaccagttctatctttctctttctgtcaccttttttctcttttttccttcttcccttgcactgaggtcctggaggycttgatgaggcccagcaaacaggcattctcacagctgggtttatagtctttgggccccttactcagtatcctgggaaccctgggccaggaggttacagtggtcatcataattgctgaagagatcccctcccctgcccctgggttcctgccttccctcctcaagcaggcacccaggctttagagaagtatagggggcttcttccctgctgggcttaccacactgctctcaggcctcaaaccctttcatacctttattcttttttttaaccaaaaaagtttttcttataaaataaattttgggcaaacatcatgcagcccttcttgatgattttctcccagagaacaaaattcaacagggccctgtggagcaaggagccccttttccctatctccttcctctaagagctacacccagaccagctggttatcagcggaggccccgctgctcctcatgagaacgctggtggaagacgaaggtgatrgcagtggaggcagcatcccaggcagcctggagtacctcatcccggagcccccacttatcagtgcagtggt

SEQ ID NO: 4457 - DNA, 3267 bp, Homo sapiens
atgtactaccagccgcaggcagaggttaggggtagctgatgtttgcacccgaggaggctttgctaagaaacatccccttagtcataccacacccaagtataattgatctaggagtttatctaaaatagtagctcctaagagacttggaaagtgtgctaatttcttcgaaatttctttagaataattcacattcttccccatatcgcttatggagccgtcctaactgctgaccttttcaagatggcggtccgcgggcgacactctcgggctcgcgcacctccccaagatggcggcgcccgaggcctggcgcgcccggagttgctggttctgtgaggtagcggcggcaacgaccatggaggccacgtcccgggaggcggcgccagcgaagagctcggcctcgggccccaacgctccccccgccctgttcgagctgtgcgggcgggcggtgagcgcccatatgggggttctggagagcggggtgtgggccctcccaggcccaatacttcaaagcatcctacctctgctcaatatatattacttggagaggattgaggaaactgccctcaagaaaggcctctcaactcaggccatctggcgccgactctgggatgaactgatgaagacaaggccttccagtttggaaagtgtgacatgttggcgagccaagtttatggaggcctttttttcccatgttctacgtgggaccattgatgtgtcttctgacaggcgtctttgtgatcagcggttctcacctcttctgcacagctcccgccatgtccgacagctcaccatctgtaacatgctgcagggtgcaaccgagctggtggctgagcccaaccgcagggttctggagaccctggccagctccctgcacactctcaagttccgccacctgctgttctctgatgtggctgctcagcagtcacttcggcagctgttgcatcagctcattcaccatggggctgtcagtcaagtgtcgctatactcctggcctgtgcctgagtcagcccttttcatccttattctcaccatgagtgctggcttctggcaaccagggcctggtggcccaccctgccgcctctgtggagaggcctcccgaggccgggccccatcccgagatgaagggtccctcttattgggctcacgtcggccccgccgggatgctgctgagcgatgtgctgcagccctgatggccagccggcgtaagagtgaagccaagcagatgcccagagctgcacctgccactcgggtaacacgccggagcacacaggagagcctgacagcaggcggaacagaccttaagagggagctgcaccccccagccacctcccatgaggctcctggcaccaagcggtcaccttctgctccagcagccacctcctctgcctcttcttctacatcctcatacaaacgggcaccagctagctcagccccacagcctaagcccctaaagcgtttcaagcgagctgcagggaagaagggtgctcgcacccgtcaggggcctggtgcagagtctgaagacctgtatgacttcgtttttattgtggctggcgagaaggaggatggcgaagagatggagattggggaagtggcttgtggagctttggatggatcagatcccagctgcctggggcttccagcactggaagcttcacaaagattccgcagcatctccaccttggagctattcacagttccactctccacagaggcagccctgacactatgccacctgctgagctcctgggtgtcactggagagcctcacactctcctacaatggcctgggctctaacatcttccgcctgctagacagcctgcgggccctgtcaggccaggctggatgtcgcctccgtgccctgcatctcagtgacctgttctcaccactgcccatcctggagctgacacgtgctatcgtgcgagcactgcccctgctacgggtcctctctattcgtgttgaccacccaagccagcgggacaaccctggtgtgccagggaatgcagggccccctagccacataataggcgatgaggagataccagagtacaacctagccctgaaaagactgagcttccatgacatgaatctcgctgactgtcagagcgaggtgctctttttgctacagaatctgactctgcaagagattaccttctccttctgccgtctgtttgagaagcgcccagcccaatttctgcctgagatggttgctgctatgaagggcaactccacactgaagggcctccggctgccagggaaccgcctggggaatgctggcctgctggccttggcagatgttttctcagaggattcatcctcctctctctgtcagctggacatcagttccaactgcatcaagccagatgggcttctggagttcgccaagcggctggagcgctggggccgtggagcctttggtcacctgcgcctcttccaaaactggctggaccaggatgcagtcacagccagggaagccatccggcggctccgggctacctgccatgtgkttagcgactcatgggactcatcccaggccttcgcagattatgttagcaccatgtgatggggcccgtacctcacagtctcatgctcggtaccatcagcttgcaggggctgaagcatgggctgcccagaaccccaaccaccagttctatctttctctttctgtcaccttttttctcttttttccttcttcccttgcactgaggtcctggaggycttgatgaggcccagcaaacaggcattctcacagctgggtttatagtctttgggccccttactcagtatcctgggaaccctgggccaggaggttacagtggtcatcataattgctgaagagatcccctcccctgcccctgggttcctgccttccctcctcaagcaggcacccaggctttagagaagtatagggggcttcttccctgctgggcttaccacactgctctcaggcctcaaaccctttcatacctttattcttttttttaaccaaaaaagtttttcttataaaataaattttgggcaaacatcatgcagcccttcttgatgattttctcccagagaacaaaattcaacagggccctgtggagcaaggagccccttttccctatctccttcctctaagagctacacccagaccagctggttatcagcggaggccccgctgctcctcatgagaacgctggtggaagacgaaggtgatrgcagtggaggcagcatcccaggcagcctggagtacctcatcccggagcccccacttatcagtgcagtggt

SEQ ID NO: 4458 - DNA, 3432 bp, Homo sapiens
atgtactaccagccgcaggcagaggttaggggtagctgatgtttgcacccgaggaggctttgctaagaaacatccccttagtcataccacacccaagtataattgatctaggagtttatctaaaatagtagctcctaagagacttggaaagtgtgctaatttcttcgaaatttctttagaataattcacattcttccccatatcgcttatggagccgtcctaactgctgaccttttcaagatggcggtccgcgggcgacactctcgggctcgcgcacctccccaagatggcggcgcccgaggcctggcgcgcccggagttgctggttctgtgaggtagcggcggcaacgaccatggaggccacgtcccgggaggcggcgccagcgaagagctcggcctcgggccccaacgctccccccgccctgttcgagctgtgcgggcgggcggtgagcgcccatatgggggttctggagagcggggtgtgggccctcccaggcccaatacttcaaagcatcctacctctgctcaatatatattacttggagaggattgaggaaactgccctcaagaaaggcctctcaactcaggccatctggcgccgactctgggatgaactgatgaagacaaggccttccagtttggaaagtgtgacatgttggcgagccaagtttatggaggcctttttttcccatgttctacgtgggaccattgatgtgtcttctgacaggcgtctttgtgatcagcggttctcacctcttctgcacagctcccgccatgtccgacagctcaccatctgtaacatgctgcagggtgcaaccgagctggtggctgagcccaaccgcagggttctggagaccctggccagctccctgcacactctcaagttccgccacctgctgttctctgatgtggctgctcagcagtcacttcggcagctgttgcatcagctcattcaccatggggctgtcagtcaagtgtcgctatactcctggcctgtgcctgagtcagcccttttcatccttattctcaccatgagtgctggcttctggcaaccagggcctggtggcccaccctgccgcctctgtggagaggcctcccgaggccgggccccatcccgagatgaagggtccctcttattgggctcacgtcggccccgccgggatgctgctgagcgatgtgctgcagccctgatggccagccggcgtaagagtgaagccaagcagatgcccagagctgcacctgccactcgggtaacacgccggagcacacaggagagcctgacagcaggcggaacagaccttaagagggagctgcaccccccagccacctcccatgaggctcctggcaccaagcggtcaccttctgctccagcagccacctcctctgcctcttcttctacatcctcatacaaacgggcaccagctagctcagccccacagcctaagcccctaaagcgtttcaagcgagctgcagggaagaagggtgctcgcacccgtcaggggcctggtgcagagtctgaagacctgtatgacttcgtttttattgtggctggcgagaaggaggatggcgaagagatggagattggggaagtggcttgtggagctttggatggatcagatcccagctgcctggggcttccagcactggaagcttcacaaagattccgcagcatctccaccttggagctattcacagttccactctccacagaggcagccctgacactatgccacctgctgagctcctgggtgtcactggagagcctcacactctcctacaatggcctgggctctaacatcttccgcctgctagacagcctgcgggccctgtcaggccaggctggatgtcgcctccgtgccctgcatctcagtgacctgttctcaccactgcccatcctggagctgacacgtgctatcgtgcgagcactgcccctgctacgggtcctctctattcgtgttgaccacccaagccagcgggacaaccctggtgtgccagggaatgcagggccccctagccacataataggcgatgaggagataccagaaaactgcctggagcagttggagatgggatttccacggggagcccagccagccccactgctgtgctccrttctgaaggcctcgggttctctgcagcagctgtccctggatagtgccacctttgcctctccccaggattttgggcttgttttgcaaacactcaaagagtacaacctagccctgaaaagactgagcttccatgacatgaatctcgctgactgtcagagcgaggtgctctttttgctacagaatctgactctgcaagagattaccttctccttctgccgtctgtttgagaagcgcccagcccaatttctgcctgagatggttgctgctatgaagggcaactccacactgaagggcctccggctgccagggaaccgcctggggaatgctggcctgctggccttggcagatgttttctcagaggattcatcctcctctctctgtcagctggacatcagttccaactgcatcaagccagatgggcttctggagttcgccaagcggctggagcgctggggccgtggagcctttggtcacctgcgcctcttccaaaactggctggaccaggatgcagtcacagccagggaagccatccggcggctccgggctacctgccatgtgkttagcgactcatgggactcatcccaggccttcgcagattatgttagcaccatgtgatggggcccgtacctcacagtctcatgctcggtaccatcagcttgcaggggctgaagcatgggctgcccagaaccccaaccaccagttctatctttctctttctgtcaccttttttctcttttttccttcttcccttgcactgaggtcctggaggycttgatgaggcccagcaaacaggcattctcacagctgggtttatagtctttgggccccttactcagtatcctgggaaccctgggccaggaggttacagtggtcatcataattgctgaagagatcccctcccctgcccctgggttcctgccttccctcctcaagcaggcacccaggctttagagaagtatagggggcttcttccctgctgggcttaccacactgctctcaggcctcaaaccctttcatacctttattcttttttttaaccaaaaaagtttttcttataaaataaattttgggcaaacatcatgcagcccttcttgatgattttctcccagagaacaaaattcaacagggccctgtggagcaaggagccccttttccctatctccttcctctaagagctacacccagaccagctggttatcagcggaggccccgctgctcctcatgagaacgctggtggaagacgaaggtgatrgcagtggaggcagcatcccaggcagcctggagtacctcatcccggagcccccacttatcagtgcagtggt

SEQ ID NO: 4459 - DNA, 3112 bp, Homo sapiens
ggtcttggcgggtcggtgagtcttggcggctgttaacgcgcgctttgggaacaggaaggttgagagagaggtgctggggtctgcgtctatctctgtcgctcttttcagcccctcctggtattcccctcctaacctgggttttttacacgcccgcgtggcttcctgctcgacctccctgagtctgatcctggtttccacctccagccctgggaaatttcctttctccagactcgccctccccacccgggcctcggactttcaccccagcttctctctcytggccagtgattacccacccccaatcccaccccgccccgccgcgcaactacctcctcccttcacccggactgggaccatcatccccactccactccgcccagtctgggactccacctgcctcctccccaatcccacactaatctctgcttggtctcttcctctttggcctaatctctcgtctcggcttattggggacggccactctcacagtttggttccaaacaccagttcctggatggattcccgccatccatgccccctctttaattagccggtcctctcartaatgtagcagccccctctacagattagaccctggtcctacactcttagccgctgcctgcttttgacctttggctcatgggtacttgacgttttaaactcctaggcccaggatgaggaggagcttggctcccagccagctggccaagagaaaacctgaaggcaggtcctgtgrtgatgaagactggcaacctggcctagtgactcctaggaaacggaaatccagcagtgagacccagatccaggagtgtttcctgtctccttttcggaaacctttgagtcagctaaccaatcaaccaccttgtctggacagcagtcagcatgaagcatttattcgaagcattttgtcaaagcctttcaaagtccccattccaaattatcaaggtcctctgggctctygagcattgggcctgaaaagggctggggtccgccgggccctccatgaccccctggaaaaagatgccttggttctgtatgagcctcccccgctgagcgctcatgaccagctgaagcttgacaaggagaaactccctgtccatgtggttgttgaccctattctcagtraggttttgcggcctcatcagagagagggagtgaaattcctgtgggagtgtgtcaccagtcggcgcatccctggcagccatggctgcatcatggctgatgagatgggcctaggaaagacgctgcagtgcatcacattgatgtggacacttttacgccagagtccagagtgcaagccagaaattgacaaggcagtggtggtgtcgccttccagcctggtgaagaactggtacaatgaggttgggaaatggctcggagggaggatccaacctctggccatcgatggaggatctaaggatgaaatagaccaaaagctggaaggattcatgaaccagcgtggagccagggtgtcttctcccatcctcatcatttcctatgagaccttccgccttcatgttggagtcctccagaaaggaagtgttggtctggtcatatgtgacgagggacacaggctcaagaactctgagaatcagacttaccaagccctggacagcttgaacaccagccggcgggtgctcatctccrgaactcccatccagaatgatctgcttgagtatttcagcttggtacattttgttaattccggcatcctagggactgcccatgaattcaagaagcattttgaattgccaattttgaagggtcgagacgctgctgctagtgaggcagacaggcagctaggagaggagcggctgcgggagctcaccagcattgtgaatagatgcctgatacggaggacttctgatatcctttctaaatatctgcctgtgaagattgagcaggtcgtttgttgtaggctgacaccccttcagactgagttatacaagaggtttctgagacaagccaaaccggcagaagaattgcttgagggcaagatgagtgtgtcttccctttcttccatcacctcgctaaagaagctttgtaatcatccagctctaatctatgataagtgtgtggaagaggaggatggctttgtgggtgccttggacctcttccctcctggttacagctctaaggccctggagccccagctgtcaggtaagatgctggtcctggattatattctggcggtgacccgaagccgtagcagtgacaaagtagtgctggtgtcgaattacacccagactttggatctctttgagaagctgtgccgtgcccgaaggtacttatacgtccgcctggatggcacgatgtccattaagaagcgagccaaggttgtagaacgcttcaatagtccatcgagccctgactttgtcttcatgctgagcagcaaagctgggggctgtggcctcaatctcattggggctaaccggctggtcatgtttgaccctgactggaacccagccaatgatgaacaagccatggcccgggtctggcgagatggtcaaaagaagacttgctatatctaccgcctgctgtctgcagggaccattgaggagaagatcttccagcgtcagagccacaagaaggcactgagcagctgtgtggtggatgaggagcaggatgtagagcgccacttctctctgggcgagttgaaggagctgtttatcctggatgaagctagcctcagtgacacacatgacaggttgcactgccgacgttgtgtcaacagccgtcagatccggccaccccctgatggttctgactgcacttcagacctggcagggtggaaccactgcactgataagtgggggctccgggatgaggtactccaggctgcctgggatgctgcctccactgcyatcaccttcgtcttccaccagcgttctcatgaggagcagcggggcctccgctgataaccagctggtctgggtgtagctcttagaggaaggagatagggaaaaggggctccttgctccacagggccctgttgaattttgttctctgggagaaaatcatcaagaagggctgcatgatgtttgcccaaaatttattttataagaaaaacttttttggttaaaaaaaagaataaaggtatgaaagggtttga

SEQ ID NO: 4460 - DNA, 2498 bp, Homo sapiens
agccaatgggtgatacgacggcagcgcggcgggaggttcgattgacccggtcttggcgggtcgaggaggagcttggctcccagccagctggccaagagaaaacctgaaggcaggtcctgtgrtgatgaagactggcaacctggcctagtgactcctaggaaacggaaatccagcagtgagacccagatccaggagtgtttcctgtctccttttcggaaacctttgagtcagctaaccaatcaaccaccttgtctggacagcagtcagcatgaagcatttattcgaagcattttgtcaaagcctttcaaagtccccattccaaattatcaaggtcctctgggctctygagcattgggcctgaaaagggctggggtccgccgggccctccatgaccccctggaaaaagatgccttggttctgtatgagcctcccccgctgagcgctcatgaccagctgaagcttgacaaggagaaactccctgtccatgtggttgttgaccctattctcagtraggttttgcggcctcatcagagagagggagtgaaattcctgtgggagtgtgtcaccagtcggcgcatccctggcagccatggctgcatcatggctgatgagatgggcctaggaaagacgctgcagtgcatcacattgatgtggacacttttacgccagagtccagagtgcaagccagaaattgacaaggcagtggtggtgtcgccttccagcctggtgaagaactggtacaatgaggttgggaaatggctcggagggaggatccaacctctggccatcgatggaggatctaaggatgaaatagaccaaaagctggaaggattcatgaaccagcgtggagccagggtgtcttctcccatcctcatcatttcctatgagaccttccgccttcatgttggagtcctccagaaaggaagtgttggtctggtcatatgtgacgagggacacaggctcaagaactctgagaatcagacttaccaagccctggacagcttgaacaccagccggcgggtgctcatctccrgaactcccatccagaatgatctgcttgagtatttcagcttggtacattttgttaattccggcatcctagggactgcccatgaattcaagaagcattttgaattgccaattttgaagggtcgagacgctgctgctagtgaggcagacaggcagctaggagaggagcggctgcgggagctcaccagcattgtgaatagatgcctgatacggaggacttctgatatcctttctaaatatctgcctgtgaagattgagcaggtcgtttgttgtaggctgacaccccttcagactgagttatacaagaggtttctgagacaagccaaaccggcagaagaattgcttgagggcaagatgagtgtgtcttccctttcttccatcacctcgctaaagaagctttgtaatcatccagctctaatctatgataagtgtgtggaagaggaggatggctttgtgggtgccttggacctcttccctcctggttacagctctaaggccctggagccccagctgtcaggtaagatgctggtcctggattatattctggcggtgacccgaagccgtagcagtgacaaagtagtgctggtgtcgaattacacccagactttggatctctttgagaagctgtgccgtgcccgaaggtacttatacgtccgcctggatggcacgatgtccattaagaagcgagccaaggttgtagaacgcttcaatagtccatcgagccctgactttgtcttcatgctgagcagcaaagctgggggctgtggcctcaatctcattggggctaaccggctggtcatgtttgaccctgactggaacccagccaatgatgaacaagccatggcccgggtctggcgagatggtcaaaagaagacttgctatatctaccgcctgctgtctgcagggaccattgaggagaagatcttccagcgtcagagccacaagaaggcactgagcagctgtgtggtggatgaggagcaggatgtagagcgccacttctctctgggcgagttgaaggagctgtttatcctggatgaagctagcctcagtgacacacatgacaggttgcactgccgacgttgtgtcaacagccgtcagatccggccaccccctgatggttctgactgcacttcagacctggcagggtggaaccactgcactgataagtgggggctccgggatgaggtactccaggctgcctgggatgctgcctccactgcyatcaccttcgtcttccaccagcgttctcatgaggagcagcggggcctccgctgataaccagctggtctgggtgtagctcttagaggaaggagatagggaaaaggggctccttgctccacagggccctgttgaattttgttctctgggagaaaatcatcaagaagggctgcatgatgtttgcccaaaatttattttataagaaaaacttttttggttaaaaaaaagaataaaggtatgaaagggtttga

SEQ ID NO: 4461 - DNA, 761 bp, Homo sapiens
gcgaccacgatgagtgtgccgcacttccggccagatcgccggatttccgctgagtgacccttacaagtccttcttgatcctgaactgggttaggtgccgctgttgctgctcgtgttgaatctagaaccgtagccagacatgggactggaggacgagcaaaagatgcttaccgaatccggagatcctgaggaggaggaagaggragaggaggaattagtgataggactgaggctttcagtgcatactggcaaccttggaaggcaggaatgtgaaacttttccctactacttagcatcagaattgaatgggagaccgcattctgccatttctggcggcagtgtggctctgccagctggccttctgcacggatcccctaacaacagtgagagagcaatgcgagcagttggagaaatgtgtaaaggcccgggagcggctasagctctgtgatgagcgtgtatcctctcgatcacatacagaagaggattgcacggaggagctctttgacttcttgcatgcgagggaccattgcgtggcccacaaactctttaacaacttgaaataaatgtgtggacttaattcaccccagtcttcatcatctgggcatcagaatatttccttatggttttggatgtaccatttgtttcttatttgtgtaactgtaagttcacatgaacctcatgggtttggcttaggctggtagcttctatgtaattcrcaatgattccatctaaataaaagttctatgatctgcaaacctgccc

SEQ ID NO: 4462 - DNA, 549 bp, Homo sapiens
gcgaccacgatgagtgtgccgcacttccggccagatcgccggatttccgctgagtgacccttacaagtccttcttgatcctgaactgggttaggtgccgctgttgctgctcgtgttgaatctagaaccgtagccagacatgggactggaggacgagcaaaagatgcttaccgaatccggagatcctgaggaggaggaagaggragaggaggaattagtggatcccctaacaacagtgagagagcaatgcgagcagttggagaaatgtgtaaaggcccgggagcggctasagctctgtgatgagcgtgtatcctctcgatcacatacagaagaggattgcacggaggagctctttgacttcttgcatgcgagggaccattgcgtggcccacaaactctttaacaacttgaaataaatgtggttttggatgtaccatttgtttcttatttgtgtaactgtaagttcacatgaacctcatgggtttggcttaggctggtagcttctatgtaattcrcaatgattccatctaaataaaagttctatgatctgc

SEQ ID NO: 4463 - DNA, 1640 bp, Homo sapiens
gcgaccacgatgagtgtgccgcacttccggccagatcgccggatttccgctgagtgacccttacaagtccttcttgatcctgaactgggttaggtgccgctgttgctgctcgtgttgaatctagaaccgtagccagacatgggactggaggacgagcaaaagatgcttaccgaatccggagatcctgaggaggaggaagaggragaggaggaattagtggtaagaactgtctcaggtttggaaacatctcagtaaaagcagggtttgagcttcatgaaattctaagggcattttaaggagtttttacttgataccttgtagataatgggggtggaataagctttgatacttcctgtgcagtggagagtttagggtgtgagccttggaagctgagtctgttctgggtttggggcttcttcagttgtggtaccagggagcagatggcatcttgagggcctggcactcaatcatctgctatttgtggtttaataaagaactttgggctaggcatggtggctcgtgcctgtaatctcagcactttgggaggccaaggcaggcggattaccagcctgaacaacgtagagaaaccccatctctactaaaaatacaaaattagccgggcgtggtggcacatgcctgtaatcccagctactcgagaggctgaggcaggagaattgctcgaacccgagaggcggaggttgtggtgagctgagattgcgccattgcgctccagcctgggcaacaagagcaaaactccgtcttaaaaaaaaaaaaaaaaagaactctgaaggaacctttgttagatagtccttctctatgttagcattgcctttctagttgggcagctggggtgcataggcctggttctcagacaaggggatttgaagtttcagacgtgtcatattccaaaatgctgtgttaacaagtaaggcctcctatagatctacttcaagtttggccaggtttcctttaccaccttgtttttcagataggactgaggctttcagtgcatactggcaaccttggaaggcaggaatgtgaaacttttccctactacttagcatcagaattgaatgggagaccgcattctgccatttctggcggcagtgtggctctgccagctggccttctgcacggtaattcagaggcagcaccttggtttggtggttgtgttaatcaaagcatatgtgtttggtgggtctctgctaaaaatgcccattttgttttttttctgtttctacatcaggatcccctaacaacagtgagagagcaatgcgagcagttggagaaatgtgtaaaggcccgggagcggctasagctctgtgatgagcgtgtatcctctcgatcacatacagaagaggattgcacggaggagctctttgacttcttgcatgcgagggaccattgcgtggcccacaaactctttaacaacttgaaataaatgtgtggacttaattcaccccagtcttcatcatctgggcatcagaatatttccttatggttttggatgtaccatttgtttcttatttgtgtaactgtaagttcacatgaacctcatgggtttggcttaggctggtagcttctatgtaattcrcaatgattccatctaaataaaagttctatgatctgcaaacctgccc

SEQ ID NO: 4464 - DNA, 586 bp, Homo sapiens
gcgaccacgatgagtgtgccgcacttccggccagatcgccggatttccgctgagtgacccttacaagtccttcttgatcctgaactgggttaggtgccgctgttgctgctcgtgttgaatctagaaccgtagccagacatgggactggaggacgagcaaaagatgcttaccgaatccggagatcctgaggaggatcccctaacaacagtgagagagcaatgcgagcagttggagaaatgtgtaaaggcccgggagcggctasagctctgtgatgagcgtgtatcctctcgatcacatacagaagaggattgcacggaggagctctttgacttcttgcatgcgagggaccattgcgtggcccacaaactctttaacaacttgaaataaatgtgtggacttaattcaccccagtcttcatcatctgggcatcagaatatttccttatggttttggatgtaccatttgtttcttatttgtgtaactgtaagttcacatgaacctcatgggtttggcttaggctggtagcttctatgtaattcrcaatgattccatctaaataaaagttctatgatctgcaaacctgccc

SEQ ID NO: 4465 - DNA, 613 bp, Homo sapiens
gcgaccacgatgagtgtgccgcacttccggccagatcgccggatttccgctgagtgacccttacaagtccttcttgatcctgaactgggttaggtgccgctgttgctgctcgtgttgaatctagaaccgtagccagacatgggactggaggacgagcaaaagatgcttaccgaatccggagatcctgaggaggaggaagaggragaggaggaattagtggatcccctaacaacagtgagagagcaatgcgagcagttggagaaatgtgtaaaggcccgggagcggctasagctctgtgatgagcgtgtatcctctcgatcacatacagaagaggattgcacggaggagctctttgacttcttgcatgcgagggaccattgcgtggcccacaaactctttaacaacttgaaataaatgtgtggacttaattcaccccagtcttcatcatctgggcatcagaatatttccttatggttttggatgtaccatttgtttcttatttgtgtaactgtaagttcacatgaacctcatgggtttggcttaggctggtagcttctatgtaattcrcaatgattccatctaaataaaagttctatgatctgcaaacctgccc

SEQ ID NO: 4466 - DNA, 2144 bp, Homo sapiens
  misc_feature (1)...(2144): n = A,T,C or G
ggaactgcaaccatggtgcccagcttcctctccctgagcttctcctccttgggcctgtgggcttctgggctgatcttggtcttaggctttctcaagctcatccacctgctgctgcggaggcagacgttggctaaggctatggacaaattcccagggcctcccacccactggctttttggacatgccctcgagatccaggagacggggagcctggacaaagtggtgtcctgggcccaccagttcccgtatgcccacccactctggttcggacagttcattggcttcctgaacatctatgagcctgactatgccaaagctgtgtacagccgtggggaccctaargcccctgatgtgtatgacttcttcctccagtggattgggagaggcctgctggttcttgaggggcccaagtggttgcagcaccgcaagctgctcacacctggctttcattatgatgtgctgaagccctatgtggccgtgttcactgagtctacacgtatcatgctggacaagtgggaagagaaagctygggagggtaagtcctttgacatcttctgcgatgtgggtcacatggcgctgaacacactcatgaagtgcacctttggaagaggagacaccggcctgggccacagggacagcagctactaccttgcagtcagcgatctcactctgttgatgcagcagcgccttgtgtccttccagtaccataatgacttcatctactggctcaccccacatggccgccgcttcctgcgggcctgccaggtggcccatgaccatacagaccaggtcatcagggagcggaaggcagccctgcaggatgagaaggtgcggaagaagatccagaaccggaggcacctggacttcctggacattctcctgggtgcccgggtgaatgacatcaaactgtcagatgcagacctccgggctgaagtggacacattcatgtttgaaggccatgacaccaccaccrgtggtatctcctggtttctctactgcatrgccctgtaccctgagcaccagcatngttgtagagaggaggtccgcgagatcctaggggaccaggacttcttccagtgggatgatctgggcaaaatgacttatctgaccatgtscatcaaggagagcttcygcctctacccacctgtgccccaggtgtaccgccagctcagcaagcctgtcacctttgtggatggccggtctctacctgcaggaagcctgatctctatgcatatctatgccctccataggaacagtgctgtatggcccgaccctgaggtctttgactctctgcgcttttccactgagaatgcatccaaacgccatccctttgcctttatgcccttctctgctgggcccaggaactgcattgggcagcagtttgccatgagtgagatgaaggtggtcacagccatgtgcttgctccgctttgagttctctctggacccctcacrgctgcccatcaagatgccccagcttgtcctgcgctccaagaatggctttcacctccacctgaagccactgggccctgggtctgggaagtagctctgatgagaatggggtcccagatggctcaggctgtgamctccctgggcaccaccctccccaggctgggtgtggaggagttgggrccccctgccttcaggaggcttgtagtttagaagggaagtaggcattaccatagacgactcctagaggacagtgctatgtaaaaatgtgtgtctataaatgtttatcatgcatgtattctagagctcattcatttattcaacaaacatttggtgagcacctatttcgttcgagaaacttcatttatctcctataattggcaaacttaaaaatgcagcagaaacttacattccaaccttagagactcatagtgagcacaaggaaagttttgccctgagattcatggttatggctgggtaccaccaaatagaagaatggcttaggggagtgccccttcactgagatgtgtttctttgttgaactttgtgtgtgtgtgtttagaatataacagacataagaaaaaattacctaaatgaagactgtacaaaataataaataattctgaagcagactctcttgtaaccatcactgaagtcaagaaatatggaatatggtatcactgatgtgtcttctgc

SEQ ID NO: 4467 - DNA, 2665 bp, Homo sapiens
aagcggcatggaggaggcggaggccgcggcgagccgggccgagcagtgagggccctagcggggcccgagcggggcccggggcccctaagcctatggacgactggaagcccagccccctcatcaagccctttggggctyggaagaagcggagctggtaccttacctggaagtataaactgacaaaccagcgggccctgcggagattctgtcagacaggggccgtgcttttcctgctggtgactgtcattgtcaatatcaagttgatcctggacactcggcgagccatcagtgaagccaatgaagacccagagccagagcaagactatgatgaggccytaggccgcctggagcccccacggcgcagaggcagtggtccccggcgggtcctggacgtagaggtgtattcaagtcgcagcaaagtatatgtggcagtggatggcaccacggtgctggaggatgaggcccgggagcagggccggggcatccatgtcattgtcctcaaccaggccacgggccacgtgatggcaaaacgtgtgtttgacacgtactcacctcatgaggatgaggccatggtgctattcctcaacatggtagcgcccggccgagtgctcatctgcactgtcaaggatgagggctccttccacctcaaggacacagccaaggctctgctgaggagcctgggcagccaggctggccctgccctgggctggagggacacatgggccttcgtgggacgaaaaggaggtcctgtcttcggggagaaacattctaartcacctgccctctcttcctggggggacccagtcctgctgaagacagatgtgccattgagctcagcagaagaggcagagtgccactgggcagacacagagctgaaccgtcgccgccggcgcttctgcagcaaagttgagggctatggaagtgtatgcagctgcaaggaccccacacccatcgagttcagccctgacccactcccagacaacaaggtcctcaatgtgcctgtggctgtcattgcagggaaccgacccaattacctgtacaggatgctgcgctctctgctttcagcccagggggtgtctcctcagatgataacagttttcattgacggctactatgaggaacccatggatgtggtggcactgtttggtctgaggggcatccagcatactcccatcagcatcaagaatgccygcgtgtctcagcactacaaggccagcctcactgccactttcaacctgtttccggaggccaagtttgctgtggttctggaagaggacctggacattgctgtggattttttcagtttcctgagccaatccatccacctactggaggaggatgacagcctrtactgcatctctgcctggaatgaccaggggtatgaacacacggctgaggacccagcactactgtaccgtgtggagaccatgcctgggctgggctgggtgctcaggaggtccttgtacaaggaggagcttgagcccaagtggcctacaccggaaaagctctgggattgggacatgtggatgcggatgcctgaacaacgccggggccgagagtgcatcatccstgacgtttcccgatcctaccactttggcatcgtcggcctcaacatgaatggctactttcacgaggcctacttcaagaagcacaagttcaacacggttccaggtgtccagctcaggaatgtggacagtctgaagaaagaagcttatgaagtggaagttcacaggctgctcartgaggctgaggttctggaccacagcaagaacccttgtgaagactctttcctgccagacacagagggccacacctacgtggcctttattcgaatggagaaagatgatgacttcaccacctggacccagcttgccaagtgcctccatatctgggacctggatgtgcgtggcaaccatcggggcctgtggagattgtttcggaagaagaaccacttcctggtggtgggggtcccggcttccccctactcagtgaagaagccaccctcagtcaccccaattttcctggagccacccccaaaggaggagggagccccaggagccccagaacagacatgagacctcctccaggaccctgcggggctgggtactgtgtacccccaggctggctagcccttccctccatcctgtaggattttgtagatgctggtaggggctggggctaccttgtttttaacatgagacttaattactaactccaaggggagggttcccctgctccaacaccccgttcctgagttaaaagtctatttatttacttccttgttggagaagggcaggagagtacctgggaatcattacgatccctagcagctcatcctgccctttgaataccctcactttccaggcctggctcagaatctaacctatttattgactgtcctgagggccttgaaaacaggccgaacctggagggcctggatttctttttgggctggaatgctgccctgagggtggggctggctcttactcaggaaactgctgtgcccaacccatggrcaggcccagctggggcccacatgctgacacagactcactcagagacccttagacactggaccaggcctcctctcagccttctctttgtccagatttccaaagctggataagttggtcattgattaaaaaaggagaagccctctggggat

SEQ ID NO: 4468 - DNA, 3949 bp, Homo sapiens
aaaatgagaacactctatttaaaaagtaagacctgaaaagaagcacaaacatctgacaatgagaaactttcctgccaggaggagtgacatgttactgttcacaagaagtaatggtatggacgataaataatgtgatctcacttagcagcaggggctcagatgcccctatatgacctactaccatccaaggacccgtacaaagggctacccatcctggcaggaaatgacatcactcagcaggtaggaaggggtgggtctaccagcccaaacgcttctgggagggccaatccatagagggttagtcctgaaggtccatgtccctcctcaatcctccatcttggccaagagagaggccaaggcttctagactttgggtgaagtaattatgcccccatctcttcatctgttaactccagggagtcctaaattccttaaatccttacttagctggggggagtagtgagagatactaaataccaaaagccataggtcaatcctttagagtcaatatctctatagaagtatctctaggggctgggcataatcccagcactttgggaggctgaggcgggaggatcccttgagcccaggagtttgagaccagcctgggcaacacagggaaaccctatctctacaaaaaaaaaataaataaataaacaattagctgggcatggtggtgcatgcctgtggtcctaactatgggggaggctgaaataggaggatcgcttgagcccaggaggtcaaggctgcagtgagctgtgatcatgccactgctctctatcttgggtaacagcataagaccctgtctcaaaaaaagaaagaaagaaagaaagagcaagctagctctagggacccaataattgagggataaaggcagagactccctagggactagagaaatgatgagccaggtttccatggtaactgatttcagtgcagcctcttcctagtctcagactgagggagaatcaattttgggggagaccacatctaatggataaaagagccacaggattacaaaagggtggaatagttgttacaagaaggtcacatcatcctggcactgctcccagaaccagtgggcctcgaagcccagcttggcactctcatcctctggtgactcaggtggtccacctygaagcctctcccctgggggcttccacacagctctcaagctccctagcctggtggctgccacatccacctcagtcctggccctctctccaccagctataacttttgcccagtccatctcggaacgtggagccccaggtgggccctgttcatccagctcgctgggggccactgtgtccaggaagctgccaatagagacactgtccagccggtcggtggtgctggtgtctggcaggctgtcccagctgcctcgccttgagcggcctgggctcccgcctgtcaggctatattgactgctggtgaggctgctgcaatgactggtcaacgtcccccgctcctccaacagccagcgcactgcctcgatgccctcattcaaggtcaccagctgctgcaggatcttcacatcgatggctcgcagattcctgaagtcatgggctggccaggacattggtgacccgccaatccggtatggacgactggaagcccagccccctcatcaagccctttggggctyggaagaagcggagctggtaccttacctggaagtataaactgacaaaccagcgggccctgcggagattctgtcagacaggggccgtgcttttcctgctggtgactgtcattgtcaatatcaagttgatcctggacactcggcgagccatcagtgaagccaatgaagacccagagccagagcaagactatgatgaggccytaggccgcctggagcccccacggcgcagaggcagtggtccccggcgggtcctggacgtagaggtgtattcaagtcgcagcaaagtatatgtggcagtggatggcaccacggtgctggaggatgaggcccgggagcagggccggggcatccatgtcattgtcctcaaccaggccacgggccacgtgatggcaaaacgtgtgtttgacacgtactcacctcatgaggatgaggccatggtgctattcctcaacatggtagcgcccggccgagtgctcatctgcactgtcaaggatgagggctccttccacctcaaggacacagccaaggctctgctgaggagcctgggcagccaggctggccctgccctgggctggagggacacatgggccttcgtgggacgaaaaggaggtcctgtcttcggggagaaacattctaartcacctgccctctcttcctggggggacccagtcctgctgaagacagatgtgccattgagctcagcagaagaggcagagtgccactgggcagacacagagctgaaccgtcgccgccggcgcttctgcagcaaagttgagggctatggaagtgtatgcagctgcaaggaccccacacccatcgagttcagccctgacccactcccagacaacaaggtcctcaatgtgcctgtggctgtcattgcagggaaccgacccaattacctgtacaggatgctgcgctctctgctttcagcccagggggtgtctcctcagatgataacagttttcattgacggctactatgaggaacccatggatgtggtggcactgtttggtctgaggggcatccagcatactcccatcagcatcaagaatgccygcgtgtctcagcactacaaggccagcctcactgccactttcaacctgtttccggaggccaagtttgctgtggttctggaagaggacctggacattgctgtggattttttcagtttcctgagccaatccatccacctactggaggaggatgacagcctrtactgcatctctgcctggaatgaccaggggtatgaacacacggctgaggacccagcactactgtaccgtgtggagaccatgcctgggctgggctgggtgctcaggaggtccttgtacaaggaggagcttgagcccaagtggcctacaccggaaaagctctgggattgggacatgtggatgcggatgcctgaacaacgccggggccgagagtgcatcatccstgacgtttcccgatcctaccactttggcatcgtcggcctcaacatgaatggctactttcacgaggcctacttcaagaagcacaagttcaacacggttccaggtgtccagctcaggaatgtggacagtctgaagaaagaagcttatgaagtggaagttcacaggctgctcartgaggctgaggttctggaccacagcaagaacccttgtgaagactctttcctgccagacacagagggccacacctacgtggcctttattcgaatggagaaagatgatgacttcaccacctggacccagcttgccaagtgcctccatatctgggacctggatgtgcgtggcaaccatcggggcctgtggagattgtttcggaagaagaaccacttcctggtggtgggggtcccggcttccccctactcagtgaagaagccaccctcagtcaccccaattttcctggagccacccccaaaggaggagggagccccaggagccccagaacagacatgagacctcctccaggaccctgcggggctgggtactgtgtacccccaggctggctagcccttccctccatcctgcctggctcagaatctaacctatttattgactgtcctgagggccttgaaaacaggccgaacctggagggcctggatttctttttgggctggaatgctgccctgagggtggggctggctcttactcaggaaactgctgtgcccaacccatggrcaggcccagctggggcccacatgctgacacagactcactcagagacccttagacactggaccaggcctcctctcagccttctctttgtccagatttccaaagctggataagttggtcattgattaaaaaaggagaagccctct

SEQ ID NO: 4469 - DNA, 3850 bp, Homo sapiens
aaaatgagaacactctatttaaaaagtaagacctgaaaagaagcacaaacatctgacaatgagaaactttcctgccaggaggagtgacatgttactgttcacaagaagtaatggtatggacgataaataatgtgatctcacttagcagcaggggctcagatgcccctatatgacctactaccatccaaggacccgtacaaagggctacccatcctggcaggaaatgacatcactcagcaggtaggaaggggtgggtctaccagcccaaacgcttctgggagggccaatccatagagggttagtcctgaaggtccatgtccctcctcaatcctccatcttggccaagagagaggccaaggcttctagactttgggtgaagtaattatgcccccatctcttcatctgttaactccagggagtcctaaattccttaaatccttacttagctggggggagtagtgagagatactaaataccaaaagccataggtcaatcctttagagtcaatatctctatagaagtatctctaggggctgggcataatcccagcactttgggaggctgaggcgggaggatcccttgagcccaggagtttgagaccagcctgggcaacacagggaaaccctatctctacaaaaaaaaaataaataaataaacaattagctgggcatggtggtgcatgcctgtggtcctaactatgggggaggctgaaataggaggatcgcttgagcccaggaggtcaaggctgcagtgagctgtgatcatgccactgctctctatcttgggtaacagcataagaccctgtctcaaaaaaagaaagaaagaaagaaagagcaagctagctctagggacccaataattgagggataaaggcagagactccctagggactagagaaatgatgagccaggtttccatggtaactgatttcagtgcagcctcttcctagtctcagactgagggagaatcaattttgggggagaccacatctaatggataaaagagccacaggattacaaaagggtggaatagttgttacaagaaggtcacatcatcctggcactgctcccagaaccagtgggcctcgaagcccagcttggcactctcatcctctggtgactcaggtggtccacctygaagcctctcccctgggggcttccacacagctctcaagctccctagcctggtggctgccacatccacctcagtcctggccctctctccaccagctataacttttgcccagtccatctcggaacgtggagccccaggtgggccctgttcatccagctcgctgggggccactgtgtccaggaagctgccaatagagacactgtccagccggtcggtggtgctggtgtctggcaggctgtcccagctgcctcgccttgagcggcctgggctcccgcctgtcaggctatattgactgctggtgaggctgctgcaatgactggtcaacgtcccccgctcctccaacagccagcgcactgcctcgatgccctcattcaaggtcaccagctgctgcaggatcttcacatcgatggctcgcagattcctgaagtcatgggctggccaggacattggtgacccgccaatccggtatggacgactggaagcccagccccctcatcaagccctttggggctyggaagaagcggagctggtaccttacctggaagtataaactgacaaaccagcgggccctgcggagattctgtcagacaggggccgtgcttttcctgctggtgactgtcattgtcaatatcaagttgatcctggacactcggcgagccatcagtgaagccaatgaagacccagagccagagcaagactatgatgaggccytaggccgcctggagcccccacggcgcagaggcagtggtccccggcgggtcctggacgtagaggtgtattcaagtcgcagcaaagtatatgtggcagtggatggcaccacggtgctggaggatgaggcccgggagcagggccggggcatccatgtcattgtcctcaaccaggccacgggccacgtgatggcaaaacgtgtgtttgacacgtactcacctcatgaggatgaggccatggtgctattcctcaacatggtagcgcccggccgagtgctcatctgcactgtcaaggatgagggctccttccacctcaaggacacagccaaggctctgctgaggagcctgggcagccaggctggccctgccctgggctggagggacacatgggccttcgtgggacgaaaaggagaggcagagtgccactgggcagacacagagctgaaccgtcgccgccggcgcttctgcagcaaagttgagggctatggaagtgtatgcagctgcaaggaccccacacccatcgagttcagccctgacccactcccagacaacaaggtcctcaatgtgcctgtggctgtcattgcagggaaccgacccaattacctgtacaggatgctgcgctctctgctttcagcccagggggtgtctcctcagatgataacagttttcattgacggctactatgaggaacccatggatgtggtggcactgtttggtctgaggggcatccagcatactcccatcagcatcaagaatgccygcgtgtctcagcactacaaggccagcctcactgccactttcaacctgtttccggaggccaagtttgctgtggttctggaagaggacctggacattgctgtggattttttcagtttcctgagccaatccatccacctactggaggaggatgacagcctrtactgcatctctgcctggaatgaccaggggtatgaacacacggctgaggacccagcactactgtaccgtgtggagaccatgcctgggctgggctgggtgctcaggaggtccttgtacaaggaggagcttgagcccaagtggcctacaccggaaaagctctgggattgggacatgtggatgcggatgcctgaacaacgccggggccgagagtgcatcatccstgacgtttcccgatcctaccactttggcatcgtcggcctcaacatgaatggctactttcacgaggcctacttcaagaagcacaagttcaacacggttccaggtgtccagctcaggaatgtggacagtctgaagaaagaagcttatgaagtggaagttcacaggctgctcartgaggctgaggttctggaccacagcaagaacccttgtgaagactctttcctgccagacacagagggccacacctacgtggcctttattcgaatggagaaagatgatgacttcaccacctggacccagcttgccaagtgcctccatatctgggacctggatgtgcgtggcaaccatcggggcctgtggagattgtttcggaagaagaaccacttcctggtggtgggggtcccggcttccccctactcagtgaagaagccaccctcagtcaccccaattttcctggagccacccccaaaggaggagggagccccaggagccccagaacagacatgagacctcctccaggaccctgcggggctgggtactgtgtacccccaggctggctagcccttccctccatcctgcctggctcagaatctaacctatttattgactgtcctgagggccttgaaaacaggccgaacctggagggcctggatttctttttgggctggaatgctgccctgagggtggggctggctcttactcaggaaactgctgtgcccaacccatggrcaggcccagctggggcccacatgctgacacagactcactcagagacccttagacactggaccaggcctcctctcagccttctctttgtccagatttccaaagctggataagttggtcattgattaaaaaaggagaagccctct

SEQ ID NO: 4470 - DNA, 2754 bp, Homo sapiens
ggcggaagcgggggggcgggccaggccggggcggggccgcaagcggcatggaggaggcggaggccgcggcgagccgggccgagcagtgagggccctagcggggcccgagcggggcccggggcccctaagccattcctgaagtcatgggctggccaggacattggtgacccgccaatccggtatggacgactggaagcccagccccctcatcaagccctttggggctyggaagaagcggagctggtaccttacctggaagtataaactgacaaaccagcgggccctgcggagattctgtcagacaggggccgtgcttttcctgctggtgactgtcattgtcaatatcaagttgatcctggacactcggcgagccatcagtgaagccaatgaagacccagagccagagcaagactatgatgaggccytaggccgcctggagcccccacggcgcagaggcagtggtccccggcgggtcctggacgtagaggtgtattcaagtcgcagcaaagtatatgtggcagtggatggcaccacggtgctggaggatgaggcccgggagcagggccggggcatccatgtcattgtcctcaaccaggccacgggccacgtgatggcaaaacgtgtgtttgacacgtactcacctcatgaggatgaggccatggtgctattcctcaacatggtagcgcccggccgagtgctcatctgcactgtcaaggatgagggctccttccacctcaaggacacagccaaggctctgctgaggagcctgggcagccaggctggccctgccctgggctggagggacacatgggccttcgtgggacgaaaaggaggtcctgtcttcggggagaaacattctaartcacctgccctctcttcctggggggacccagtcctgctgaagacagatgtgccattgagctcagcagaagaggcagagtgccactgggcagacacagagctgaaccgtcgccgccggcgcttctgcagcaaagttgagggctatggaagtgtatgcagctgcaaggaccccacacccatcgagttcagccctgacccactcccagacaacaaggtcctcaatgtgcctgtggctgtcattgcagggaaccgacccaattacctgtacaggatgctgcgctctctgctttcagcccagggggtgtctcctcagatgataacagttttcattgacggctactatgaggaacccatggatgtggtggcactgtttggtctgaggggcatccagcatactcccatcagcatcaagaatgccygcgtgtctcagcactacaaggccagcctcactgccactttcaacctgtttccggaggccaagtttgctgtggttctggaagaggacctggacattgctgtggattttttcagtttcctgagccaatccatccacctactggaggaggatgacagcctrtactgcatctctgcctggaatgaccaggggtatgaacacacggctgaggacccagcactactgtaccgtgtggagaccatgcctgggctgggctgggtgctcaggaggtccttgtacaaggaggagcttgagcccaagtggcctacaccggaaaagctctgggattgggacatgtggatgcggatgcctgaacaacgccggggccgagagtgcatcatccstgacgtttcccgatcctaccactttggcatcgtcggcctcaacatgaatggctactttcacgaggcctacttcaagaagcacaagttcaacacggttccaggtgtccagctcaggaatgtggacagtctgaagaaagaagcttatgaagtggaagttcacaggctgctcartgaggctgaggttctggaccacagcaagaacccttgtgaagactctttcctgccagacacagagggccacacctacgtggcctttattcgaatggagaaagatgatgacttcaccacctggacccagcttgccaagtgcctccatatctgggacctggatgtgcgtggcaaccatcggggcctgtggagattgtttcggaagaagaaccacttcctggtggtgggggtcccggcttccccctactcagtgaagaagccaccctcagtcaccccaattttcctggagccacccccaaaggaggagggagccccaggagccccagaacagacatgagacctcctccaggaccctgcggggctgggtactgtgtacccccaggctggctagcccttccctccatcctgtaggattttgtagatgctggtaggggctggggctaccttgtttttaacatgagacttaattactaactccaaggggagggttcccctgctccaacaccccgttcctgagttaaaagtctatttatttacttccttgttggagaagggcaggagagtacctgggaatcattacgatccctagcagctcatcctgccctttgaataccctcactttccaggcctggctcagaatctaacctatttattgactgtcctgagggccttgaaaacaggccgaacctggagggcctggatttctttttgggctggaatgctgccctgagggtggggctggctcttactcaggaaactgctgtgcccaacccatggrcaggcccagctggggcccacatgctgacacagactcactcagagacccttagacactggaccaggcctcctctcagccttctctttgtccagatttccaaagctggataagttggtcattgattaaaaaaggagaagccctctggggat

SEQ ID NO: 4471 - DNA, 2981 bp, Homo sapiens
gcgggcgcgcggccggcccgaggggcggtccctgggctcccgctcgccgccgctgccgctcctcgttctgctcctcactccccagcggctggaggccggtaccggcgggcaggaggcgcccgaggatgtgctgctggccgctgctcctgctgtgggggctgctccccgggacggcggcggggggctcgggccgaacctatccgcaccggaccctcctggactcggagggcaagtactggctgggctggagccagcggggcagccagatcgccttccgcctccaggtgcgcactgcaggctacgtgggcttcggcttctcgcccaccggggccatggcgtccgccgacatcgtcgtgggcggggtggcccacgggcggccctacctccaggattattttacaaatgcaaatagagagttgaaaaaagatgctcagcaagattaccatctagaatatgccatggaaaatagcacacacacaataattgaatttaccagagagctgcatacatgtgacataaatgacaagagtataayggatagcactgtgagagtgatctgggcctaccaccatgaagatgcaggagaagctggtcccaagtaccatgactccaataggggcaccaagagtttgcggttattgaatcctgagaaaactagtgtgctatctacagccttaccatactttgatctggtaaatcaggacgttgagccagtgatacagagaggccatgagagtctggtgcaccacatcctgctctatcagtgcagcaacaactttaacgacagcgttctggagtccggccacgagtgctatcaccccaacatgcccgatgcattcctcacctgtgaaactgtgatttttgcctgggctattggtggagagggcttttcttatccacctcatgttggattatcccttggcactccattagatccgcattatgtgctcctagaagtccattatgataatcccacttatgaggaaggcttaatagataattctggactgaggytattttacacaatgratataaggaaatatgatgctggggtgattgaggctggcctctgggtgagcctcttccataccatccctccagggatgcctgagttccagtctgagggtcactgcactttggagtgcctggaagaggctctggaagccgaaaagccaagtggaattcatgtgtttgctgttcttctccatgctcacctggctggcagaggcatcaggctgcgtcattttcgaaaagggaaggaaatgaaattacttgcctatgatgatgattttgacttcaatttccaggagtttcagtatctaaaggaagaacaaacaatcttaccaggagataacctaattactgagtgtcgctacaacacgaaagatagagctgagatgacttggggaggactaagcaccaggagtgaaatgtgtctctcataccttctttattacccaagaattaatcttactcgatgtgcaagtattccagacattatgsaacaacttcagttcattggggttaaggagatctacagaccagtcargacctggcctttcattatcaaaagtcccaagcaatataaaaacctttctttcatggatgctatgaataagtttaaatggactaaaaaggaaggtctctccttcaacaagctggtcctcagcctgccagtgaatgtgagatgttccaagacagacaatgctgagtggtcgattcaaggaatgacagcattacctccagatatagaaagaccctataaagcagaacctttggtgtgtggcacgtcttcttcctcttccctgcacagagatttctccatcaacttgcttgtttgccttctgctactcagctgcacgctgagcaccaagagcttgtgatcaaaattctgttggacttgacaatgttttctatgatctgaacctgtcatttgaagtacaggttaaagactgtgtccactttgggcatgaagagtgtggagacttttcttccccattttccctccctcctttttcctttccatgttacatgagagacatcaatcaggttctcttctctttcttagaaatatctgatgttatatatacatggtcaataaaataaaactggcctgacttaagataaccattttaaaaaattgggctgtcatgtgggaataaaagaattctttctttcctactacattctgttttatttaaatactcattgttgctatttcactttttgacttgacttttatatttctttaaaaaattccttccttttaaaaaatataaaagggactactgttcattccagttttcttcttctttgttgttcttctagtgtgacttttcaagtgtaacagccattcttcctgactttaatattgtccagttctggtcttttctgtgaattaccactgggccccttacctcaatgctttttgttgatgcccactctggttcccttgtttatctgagtctgttggtaccccaaatgaccccacacccatcttaaagtactttttttcaccttccctgtttagtactggccagatgagttttttctagagctctgtcactatctgaaaagaaagaggctatgggaaacatagaaatggtatgtattaataactgatcataggctgaggagaaaaaatgtagctggctgcaaacccagtgctgtgaggtgacttatatgaggttccagatcaaagacagrccgtgtgagccagtccaggagggtgtaagttctgaatggttccttgctgactttgggtgacacatgtaccacatactggctcagtttaagtcatsgttctattgtagatttatttttatattagttaataaatgactttaaattgtcaccaattgaaaatcttgtcactcttttggttttctttatatagctcagccaaatcttgttttatgtcctgtcctcatctcttaagctaaatctgtttggatcatattaataaactaaatgaaattaca

SEQ ID NO: 4472 - DNA, 3065 bp, Homo sapiens
gcgggcgcgcggccggcccgaggggcggtccctgggctcccgctcgccgccgctgccgctcctcgttctgctcctcactccccagcggctggaggccggtaccggcgggcaggaggcgcccgaggatgtgctgctggccgctgctcctgctgtgggggctgctccccgggacggcggcggggggctcgggccgaacctatccgcaccggaccctcctggactcggagggcaagtactggctgggctggagccagcggggcagccagatcgccttccgcctccaggtgcgcactgcaggctacgtgggcttcggcttctcgcccaccggggccatggcgtccgccgacatcgtcgtgggcggggtggcccacgggcggccctacctccaggattattttacaaatgcaaatagagagttgaaaaaagatgctcagcaagattaccatctagaatatgccatggaaaatagcacacacacaataattgaatttaccagagagctgcatacatgtgacataaatgacaagagtataayggatagcactgtgagagtgatctgggcctaccaccatgaagatgcaggagaagctggtcccaagtaccatgactccaataggggcaccaagagtttgcggttattgaatcctgagaaaactagtgtgctatctacagccttaccatactttgatctggtaaatcaggacgtccccatcccaaacaaagatacaacatattggtgccaaatgtttaagattcctgtgttccaagaaaagcatcatgtaataaaggttgagccagtgatacagagaggccatgagagtctggtgcaccacatcctgctctatcagtgcagcaacaactttaacgacagcgttctggagtccggccacgagtgctatcaccccaacatgcccgatgcattcctcacctgtgaaactgtgatttttgcctgggctattggtggagagggcttttcttatccacctcatgttggattatcccttggcactccattagatccgcattatgtgctcctagaagtccattatgataatcccacttatgaggaaggcttaatagataattctggactgaggytattttacacaatgratataaggaaatatgatgctggggtgattgaggctggcctctgggtgagcctcttccataccatccctccagggatgcctgagttccagtctgagggtcactgcactttggagtgcctggaagaggctctggaagccgaaaagccaagtggaattcatgtgtttgctgttcttctccatgctcacctggctggcagaggcatcaggctgcgtcattttcgaaaagggaaggaaatgaaattacttgcctatgatgatgattttgacttcaatttccaggagtttcagtatctaaaggaagaacaaacaatcttaccaggagataacctaattactgagtgtcgctacaacacgaaagatagagctgagatgacttggggaggactaagcaccaggagtgaaatgtgtctctcataccttctttattacccaagaattaatcttactcgatgtgcaagtattccagacattatgsaacaacttcagttcattggggttaaggagatctacagaccagtcargacctggcctttcattatcaaaagtcccaagcaatataaaaacctttctttcatggatgctatgaataagtttaaatggactaaaaaggaaggtctctccttcaacaagctggtcctcagcctgccagtgaatgtgagatgttccaagacagacaatgctgagtggtcgattcaaggaatgacagcattacctccagatatagaaagaccctataaagcagaacctttggtgtgtggcacgtcttcttcctcttccctgcacagagatttctccatcaacttgcttgtttgccttctgctactcagctgcacgctgagcaccaagagcttgtgatcaaaattctgttggacttgacaatgttttctatgatctgaacctgtcatttgaagtacaggttaaagactgtgtccactttgggcatgaagagtgtggagacttttcttccccattttccctccctcctttttcctttccatgttacatgagagacatcaatcaggttctcttctctttcttagaaatatctgatgttatatatacatggtcaataaaataaaactggcctgacttaagataaccattttaaaaaattgggctgtcatgtgggaataaaagaattctttctttcctactacattctgttttatttaaatactcattgttgctatttcactttttgacttgacttttatatttctttaaaaaattccttccttttaaaaaatataaaagggactactgttcattccagttttcttcttctttgttgttcttctagtgtgacttttcaagtgtaacagccattcttcctgactttaatattgtccagttctggtcttttctgtgaattaccactgggccccttacctcaatgctttttgttgatgcccactctggttcccttgtttatctgagtctgttggtaccccaaatgaccccacacccatcttaaagtactttttttcaccttccctgtttagtactggccagatgagttttttctagagctctgtcactatctgaaaagaaagaggctatgggaaacatagaaatggtatgtattaataactgatcataggctgaggagaaaaaatgtagctggctgcaaacccagtgctgtgaggtgacttatatgaggttccagatcaaagacagrccgtgtgagccagtccaggagggtgtaagttctgaatggttccttgctgactttgggtgacacatgtaccacatactggctcagtttaagtcatsgttctattgtagatttatttttatattagttaataaatgactttaaattgtcaccaattgaaaatcttgtcactcttttggttttctttatatagctcagccaaatcttgttttatgtcctgtcctcatctcttaagctaaatctgtttggatcatattaataaactaaatgaaattaca

SEQ ID NO: 4473 - DNA, 2736 bp, Homo sapiens
atgaattcttttctctctgtatttaggtatcctgatttttcttttccatattttccacaggattattttacaaatgcaaatagagagttgaaaaaagatgctcagcaagattaccatctagaatatgccatggaaaatagcacacacacaataattgaatttaccagagagctgcatacatgtgacataaatgacaagagtataayggatagcactgtgagagtgatctgggcctaccaccatgaagatgcaggagaagctggtcccaagtaccatgactccaataggggcaccaagagtttgcggttattgaatcctgagaaaactagtgtgctatctacagccttaccatactttgatctggtaaatcaggacgtccccatcccaaacaaagatacaacatattggtgccaaatgtttaagattcctgtgttccaagaaaagcatcatgtaataaaggttgagccagtgatacagagaggccatgagagtctggtgcaccacatcctgctctatcagtgcagcaacaactttaacgacagcgttctggagtccggccacgagtgctatcaccccaacatgcccgatgcattcctcacctgtgaaactgtgatttttgcctgggctattggtggagagggcttttcttatccacctcatgttggattatcccttggcactccattagatccgcattatgtgctcctagaagtccattatgataatcccacttatgaggaaggcttaatagataattctggactgaggytattttacacaatgratataaggaaatatgatgctggggtgattgaggctggcctctgggtgagcctcttccataccatccctccagggatgcctgagttccagtctgagggtcactgcactttggagtgcctggaagaggctctggaagccgaaaagccaagtggaattcatgtgtttgctgttcttctccatgctcacctggctggcagaggcatcaggctgcgtcattttcgaaaagggaaggaaatgaaattacttgcctatgatgatgattttgacttcaatttccaggagtttcagtatctaaaggaagaacaaacaatcttaccaggagataacctaattactgagtgtcgctacaacacgaaagatagagctgagatgacttggggaggactaagcaccaggagtgaaatgtgtctctcataccttctttattacccaagaattaatcttactcgatgtgcaagtattccagacattatgsaacaacttcagttcattggggttaaggagatctacagaccagtcargacctggcctttcattatcaaaagtcccaagcaatataaaaacctttctttcatggatgctatgaataagtttaaatggactaaaaaggaaggtctctccttcaacaagctggtcctcagcctgccagtgaatgtgagatgttccaagacagacaatgctgagtggtcgattcaaggaatgacagcattacctccagatatagaaagaccctataaagcagaacctttggtgtgtggcacgtcttcttcctcttccctgcacagagatttctccatcaacttgcttgtttgccttctgctactcagctgcacgctgagcaccaagagcttgtgatcaaaattctgttggacttgacaatgttttctatgatctgaacctgtcatttgaagtacaggttaaagactgtgtccactttgggcatgaagagtgtggagacttttcttccccattttccctccctcctttttcctttccatgttacatgagagacatcaatcaggttctcttctctttcttagaaatatctgatgttatatatacatggtcaataaaataaaactggcctgacttaagataaccattttaaaaaattgggctgtcatgtgggaataaaagaattctttctttcctactacattctgttttatttaaatactcattgttgctatttcactttttgacttgacttttatatttctttaaaaaattccttccttttaaaaaatataaaagggactactgttcattccagttttcttcttctttgttgttcttctagtgtgacttttcaagtgtaacagccattcttcctgactttaatattgtccagttctggtcttttctgtgaattaccactgggccccttacctcaatgctttttgttgatgcccactctggttcccttgtttatctgagtctgttggtaccccaaatgaccccacacccatcttaaagtactttttttcaccttccctgtttagtactggccagatgagttttttctagagctctgtcactatctgaaaagaaagaggctatgggaaacatagaaatggtatgtattaataactgatcataggctgaggagaaaaaatgtagctggctgcaaacccagtgctgtgaggtgacttatatgaggttccagatcaaagacagrccgtgtgagccagtccaggagggtgtaagttctgaatggttccttgctgactttgggtgacacatgtaccacatactggctcagtttaagtcatsgttctattgtagatttatttttatattagttaataaatgactttaaattgtcaccaattgaaaatcttgtcactcttttggttttctttatatagctcagccaaatcttgttttatgtcctgtcctcatctcttaagctaaatctgtttggatcatattaataaactaaatgaaattaca

SEQ ID NO: 4474 - DNA, 1644 bp, Homo sapiens
tccccgcccctcgcgccttcgtttattcctccgcgcgctgggacaggctgcttcttcgccagaaccaaccggttgcttgctgtcccagcggcgccccctcatcaccgtcgccatgcccggaggtctgcttctcggggacgtggctcccaactttgaggccaataccaccgtcggccgcatccgtttccacgactttctgggagactcatggggcattctcttctcccaccctcgggactttaccccagtgtgcaccacagagcttggcagagctgcaaagctggcaccagaatttgccaagaggaatgttaagttgattgccctttcaatagacagtgttgaggaccatcttgcctggagcaaggatatcaatgcttacaattgtgaagagcccacagaaaagttaccttttcccatcatcgatgataggaatcgggagcttgccatcctgttgggcatgctggatccagcagagaaggatgaaaagggcatgcctgtgacagctcgtgtggtgtttgtttttggtcctgataagaagctgaagctgtctatcctctacccagctaccactggcaggaactttgatgagattctcagggtagtcatctctctccagctgacagcagaaaaaagggttgccaccccagttgattggaaggatggggatagtgtgatggtccttccaaccatccctgaagaagaagccaaaaaacttttcmcgaaaggagtcttcaccaaagagctcccatctggcaagaaatacctccgctacacaccccarccttaastctcttggagaagytggtgctgtgagccagaggatgtcagctgccaattgtgttttcctgcagcaattmcataaacacatcctggtgtcatcacagccaaggtttttaggttgctataccaatggcttattaaatgaaaatggcactaaaagtttcttgagattctttatactctctgccttcagcaatcaatttttaaaactcaaatcttgttggatctctgcagggcttgtgaccaatgaagtcatatttgttgatggttgacaaagcttgcttcactccatcagagaatgactatcaatttttttttaactgtcctatcacgtcctstcctgtcacccattttgaagagtggcagaacttgaagttcaacttcctctgtaaatatccaagtataaagcccaggaacttctagaataacccagatgcgctttaattttttttaatatgttttgatcacagaacttctagaataacccagatgctctttcatattcttttaatacatcttgatcacagctgggggaaaaaaagctttttaattctrtaccttcctagtagataagtgaagagcagggaaagagacctttaaatattttgctataaaaaaatttgtgataagtttctatcaaaatgggragattgcagaaaaggcttcccttggctcccaaggagrtgtagcaggtgtgagcaatattagtgccatgtgcctttcacacagggtttgcatttatcagtctgttttccgatgatgtgtacatgaaagagtacmccatgtgaaragaagagagaatgattgaaaatgttttagtatagaactcttcwtgcagtgggttgctattttytagattttact

SEQ ID NO: 4475 - DNA, 1730 bp, Homo sapiens
tccccgcccctcgcgccttcgtttattcctccgcgcgctgggacaggctgcttcttcgccagaaccaaccggttgcttgctgtcccagcggcgccccctcatcaccgtcgccatgcccggaggtctgcttctcggggacgtggctcccaactttgaggccaataccaccgtcggccgcatccgtttccacgactttctgggagactcatggggcattctcttctcccaccctcgggactttaccccagtgtgcaccacagagcttggcagagctgcaaagctggcaccagaatttgccaagaggaatgttaagttgattgccctttcaatagacagtgttgaggaccatcttgcctggagcaaggatatcaatgcttacaattgtgaagagcccacagaaaagttaccttttcccatcatcgatgataggaatcgggagcttgccatcctgttgggcatgctggatccagcagagaaggatgaaaagggcatgcctgtgacagctcgtgtggtgtttgtttttggtcctgataagaagctgaagctgtctatcctctacccagctaccactggcaggaactttgatgagattctcagggtagtcatctctctccagctgacagcagaaaaaagggttgccaccccagttgattggaaggatggggatagtgtgatggtccttccaaccatccctgaagaagaagccaaaaaacttttcmcgaaaggagtcttcaccaaagagctcccatctggcaagaaatacctccgctacacaccccarccttaastctcttggagaagytggtgctgtgagccagaggatgtcagctgccaattgtgttttcctgcagcaattmcataaacacatcctggtgtcatcacagccaaggtttttaggttgctataccaatggcttattaaatgaaaatggcactaaaagtttcttgagattctttatactctctgccttcagcaatcaattccattcatacatcagcactctgctggttctgtttgaaatatgttctgtatttaaaactcaaatcttgttggatctctgcagggcttgtgaccaatgaagtcatatttgttgatggttgacaaagcttgcttcactccatcagagaatgactatcaatttttttttaactgtcctatcacgtcctstcctgtcacccattttgaagagtggcagaacttgaagttcaacttcctctgtaaatatccaagtataaagcccaggaacttctagaataacccagatgcgctttaattttttttaatatgttttgatcacagaacttctagaataacccagatgctctttcatattcttttaatacatcttgatcacagctgggggaaaaaaagctttttaattctrtaccttcctagtagataagtgaagagcagggaaagagacctttaaatattttgctataaaaaaatttgtgataagtttctatcaaaatgggragattgcagaaaaggcttcccttggctcccaaggagrtgtagcaggtgtgagcaatattagtgccatgtgcctttcacacagggtttgcatttatcagtctgttttccgatgatgtgtacatgaaagagtacmccatgtgaaragaagagagaatgattgaaaatgttttagtatagaactcttcwtgcagtgggttgctattttytagattttactttttagggaacaaaataaaatcctttgttaaaactgg

SEQ ID NO: 4476 - DNA, 1418 bp, Homo sapiens
atggagaacaacactaccagcaggtggctccggcagggccgtctgayggacggcgtagcccaagtcggtcagcactggaggacctcagaagccatgttgaagccccatagtgaagccagggctgccttcattcagacccagcagctgcacgcagccatggctgacacattcttggagcacatgtgctgcctggacactgactcgccacccatyacagcctggagcactggcatcatcygtactatgggcccagcttctccattgctagagatgctgaagaaaacgattaagtctggaattaatgtggctcatctgaactctcatggagcccatgagtaccatacagagaccatcaagaacgtgcgcacagccacggaaagctttgcttctgactccatcctctaccagcccattgctgtggctccagacactaaaggacctgagatcccaactgggcccgtcaagggcagcggcactgcagaggtggagctgaagaagggagccactctcaagttcacgctggataatacctacatggaaaagggtaagagaacatcctgtggcgggactacaagaacatctgcaaggtggtggaagtgggctgcaagatctacgwggatgatgggctaatttctctccaagtgaagcagaaggatgctcactttctggtgacagaggtggaaaatggtggctccttgggcagcaagaagagtgtgaaccttcctggggctgccgtggacctgyctgccatgttggagaaggacatccaggacctgaagtttgggggcgagcaagatgtcgatatgatgttttcatcattcatctgcaagacatctgatgtccatgaagttaggaaggtcttgggagagaaaggaaagaacagcaagataaccagcaaaattgagaatcatgatgggggttggaggtttgatgaaatcctggaggccagcgatgggattatgatgctagaggatgtgatcaagaagctccaccccacttgggctgagggcagtggtgtggccaatgcagttctggtggaagctgactgcatcatgctgtctggagaaacagccaaagggaactatcctctggaggctgtgcacatgcagcacctgattgcctgtgaggcagaggccaccatctaccacttgcaattatttgaggagttctgccacctggcacccattaccagtgaccccgcagaagctactgccgtgggcactgtggaggcctccttcaagtgctgcagtggggccataatcrtcctcaccaagtctgcaggtgtgcccaccaggtggccagatactgcccacgctgaggatgtggacctccgagtgaacttggccatgaatgttgctgtcctgcagcaaacacttcaccctccaccttccattttcccccactactgcagccgccty

SEQ ID NO: 4477 - DNA, 2004 bp, Homo sapiens
tgaaagtgggcacagctgctgcacatcccggggctcctgacctctctgcgtttgcagcgtagcccaagtcggtcagcactggaggacctcagaagccatgttgaagccccatagtgaagccagggctgccttcattcagacccagcagctgcacgcagccatggctgacacattcttggagcacatgtgctgcctggacactgactcgccacccatyacagcctggagcactggcatcatcygtactatgggcccagcttctccattgctagagatgctgaagaaaacgattaagtctggaattaatgtggctcatctgaactctcatggagcccatgagtaccatacagagaccatcaagaacgtgcgcacagccacggaaagctttgcttctgactccatcctctaccagcccattgctgtggctccagacactaaaggacctgagatcccaactgggcccgtcaagggcagcggcactgcagaggtggagctgaagaagggagccactctcaagttcacgctggataatacctacatggaaaagggtaagagaacatcctgtggcgggactacaagaacatctgcaaggtggtggaagtgggctgcaagatctacgwggatgatgggctaatttctctccaagtgaagcagaaggatgctcactttctggtgacagaggtggaaaatggtggctccttgggcagcaagaagagtgtgaaccttcctggggctgccgtggacctgyctgccatgttggagaaggacatccaggacctgaagtttgggggcgagcaagatgtcgatatgatgttttcatcattcatctgcaagacatctgatgtccatgaagttaggaaggtcttgggagagaaaggaaagaacagcaagataaccagcaaaattgagaatcatgatgggggttggaggtttgatgaaatcctggaggccagcgatgggattatggtagctcgtggtgatccaccacaagccgtcgagatgagattcctgcagggaaggtctgccttgctcagaggatgatgattgggtggtgcaaccaagctgggaagcctgtcatcttgccactcagatgctagaggatgtgatcaagaagctccaccccacttgggctgagggcagtggtgtggccaatgcagttctggtggaagctgactgcatcatgctgtctggagaaacagccaaagggaactatcctctggaggctgtgcacatgcagcacctgattgcctgtgaggcagaggccaccatctaccacttgcaattatttgaggagttctgccacctggcacccattaccagtgaccccgcagaagctactgccgtgggcactgtggaggcctccttcaagtgctgcagtggggccataatcrtcctcaccaagtctgcaggtgtgcccaccaggtggccagatactgcccacgtgcccccatgattgttgtgacatggcatccccaggcagctcgccaggcccacctgtaccgtggtatcttccctgtgctgtgtaaggaccccatccaggagccctaggctgaggatgtggacctccgagtgaacttggccatgaatgttggtaaggcctgaggcttcttcaagaaggatgatgtggtcattgtgctgacctggtgacaccctggccctggcttctccaccaccctgtgtgttattcctgtgctgtgatggactccagagctcttcctccagcccctgtcccacccccttcccccaatgcatccattaggccagcaatgcttatagagctcactctgggctgtagtgtggcactggtgggctggaacaccagggaagaagatttatgcctcgctgaaacgtggctgtttttagagcctgctgtggcgggagagcccggagcctggctgcccatcatgtggccccacccaagcaagagaagaaggaggaatgcagaacagaggcccccagagtgtatggcaagagggtggcagcttcctttcytctgtgtactct

SEQ ID NO: 4478 - DNA, 3061 bp, Homo sapiens
gcgactactttgtgtgctggggcggcgcgctccggtcctcccgctcagctggcggtctgggctgctctggggcagcccttcggtccactgctctgcatcgcgggcgccgggaattttccgagtccgagcggagacagggtttctctgtgttgcccaggctggtctcgaactctgagctcaagcgacctgcccacctcggccacccaaaatgttgggattacaggggttgctgcttttgctcagaggacatccatgaccctaatggtctttttgttcaagataaagtgattttttgcctttgttgattaactggacaaattcagcatgtagagcgcatgaagtacaggacaataaagcttcctacacatatcaccaggaggatctctttgaaagattcactgcaggactaccagagagaataatttgtctgaagcatcatgtgttgaaacaacagaagtctattcacctgtgcactaactagaaacagagttacaatgttttcaattctttgagctccaggactccagggaagtgagttgaaaatctgaaaatgcggccatggactggttcctggcgttggattatgctcattctttttgcctgggggaccttgctgttttatataggtggtcacttggtacgagataatgaccatcctgatcactctagccgagaactgtccaagattctggcaaagcttgaacgcttaaaacarcagaatgaagacttgaggcgaatggccgaatctctccggataccagaaggccctattgatcaggggccagctataggaagagtacgcgttttagaagagcagcttgttaaggccaaagaacagattgaaaattacmagaaacagaccagaaatggtctggggaaggatcatgaaatcctgaggaggaggattgaaaatggagctaaagagctctggtttttcctacagagtgaattgaagaaattaaagaacttagaaggaaatgaactccaaagacatgcagatgaatttcttttggatttaggacatcatgaaaggtctataatgacggatctatactacctcagtcagacagatggagcaggtgattggcgggaaaaagaggccaaagatctgacagaactrgttcagcggagaataacatatcttcagaatcccaaggactgcagcaaagccaaaaagctggtgtgtaatatcaacaaaggctgtggctatggctgtcagctccatcatgtggtctactgcttcatgattgcatatggcacccagcgaacactcatcttggaatctcagaattggcgctatgctactggtggatgggagactgtatttaggcctgtaagtgagacatgcamagacagatctggcatctccactggacactggtcaggtgaagtgaaggacaaaaatgttcaagtggtcgagcttcccattgtagacagtcttcatccccgtcctccatatttacccttggctgtaccagaagacctcgcagatcgacttgtacgagtgcatggtgaccctgcagtgtggtgggtgtctcagtttgtcaaatacttgatccgcccacagccttggctagaaaaagaaatagaagaagccaccaagaagcttggcttcaaacatccagttattggagtccatgtcagacgcacagacaaagtgggaacagaagctgccttccatcccattgaagagtacatggtgcatgttgaagaacattttcagcttcttgcacgcagaatgcaagtggacaaaaaaagagtgtatttggccacagatgacccttctttattaaaggaggcaaaaacaaagtaccccaattatgaatttattagtgataactctatttcctggtcagctggactgcacaatcgatacacaacttcctagtgtgtactttttcatcccaggtctgtcgagttgcttatgaaattatgcaaacactacatcctgatgcctctgcaaacttccattctttagatgacatctactattttgggggccagaatgcccacaatcaaattgccatttatgctcaccaaccccgaactgcagatgaaattcccatggaacctggagatatcattggtgtggctggaaatcattgggatggctattctaaaggtgtcaacaggaaattgggaaggacgggcctatatccctcctacaaagttcgagagaagatagaaacggtcaagtaccccacatatcctgaggctgagaaataaagctcagatggaagagataaacgaccaaactcagttcgaccaaactcagttcaaaccatttsagccaaactgtagatgaagagggctctgatctaacaaaataaggttatatgagtagatactctcagcaccaagagcagctgggaactgacataggcttcaattggtggaattcctctttaacaagggctgcaatgccctcatacccatgcacagtacaataatgtactcacatataacatgcaaacaggttgttttctactttgcccctttcagtatgtccccataagacaaacactgccatattgtgtaatttaagtgacacagacattttgtgtgagacttaaaacatggtgcctatatctgagagacctgtgtgaactattgagaagatcggaacagctccttactctgaggaagttgattcttatttgatggtggtattgtgaccactgaattcactccagtcaacagattcagaatgagaatggacgtttggtttttttttgtttttgtttttgttttttcctttataaggttgtctgttttttttttttwaaataattgcatcagttcattgacctcatcattaataagtgaagaatacatcagaaaataaaatattcactctccattagaaaattttgtaaaacartgccatgaacaaattctttagtactcaatgtttctggacattctctttgataacaaaaaataaattttaaaaaggaattttgtaaagtttctagaattttatatcattggatgatatgttgatcagccttatgtggaagaactgtgataaaaagaggagctttttagtttttcagcttat

SEQ ID NO: 4479 - DNA, 2994 bp, Homo sapiens
cgcgctccggtcctcccgctcagctggcggtctgggctgctctggggcagcccttcggtccactgctctgcatcgcgggcgccgggaattttccgagtccgagcgggttgctgcttttgctcagaggacatccatgaccctaatggtctttttgttcaagataaagtgattttttgcctttgttgattaactggacaaattcagcatgtagagcgcatgaagtacaggacaataaagcttcctacacatatcaccaggaggatctctttgaaagattcactgcaggactaccagagagaataatttgtctgaagcatcatgtgttgaaacaacagaagtctattcacctgtgcactaactagaaacagagttacaatgttttcaattctttgagctccaggactccagggaagtgagttgaaaatctgaaaatgcggccatggactggttcctggcgttggattatgctcattctttttgcctgggggaccttgctgttttatataggtggtcacttggtacgagataatgaccatcctgatcactctagccgagaactgtccaagattctggcaaagcttgaacgcttaaaacarcagaatgaagacttgaggcgaatggccgaatctctccggataccagaaggccctattgatcaggggccagctataggaagagtacgcgttttagaagagcagcttgttaaggccaaagaacagattgaaaattacmagaaacagaccagaaatggtctggggaaggatcatgaaatcctgaggaggaggattgaaaatggagctaaagagctctggtttttcctacagagtgaattgaagaaattaaagaacttagaaggaaatgaactccaaagacatgcagatgaatttcttttggatttaggacatcatgaaaggtctataatgacggatctatactacctcagtcagacagatggagcaggtgattggcgggaaaaagaggccaaagatctgacagaactrgttcagcggagaataacatatcttcagaatcccaaggactgcagcaaagccaaaaagctggtgtgtaatatcaacaaaggctgtggctatggctgtcagctccatcatgtggtctactgcttcatgattgcatatggcacccagcgaacactcatcttggaatctcagaattggcgctatgctactggtggatgggagactgtatttaggcctgtaagtgagacatgcamagacagatctggcatctccactggacactggtcaggtgaagtgaaggacaaaaatgttcaagtggtcgagcttcccattgtagacagtcttcatccccgtcctccatatttacccttggctgtaccagaagacctcgcagatcgacttgtacgagtgcatggtgaccctgcagtgtggtgggtgtctcagtttgtcaaatacttgatccgcccacagccttggctagaaaaagaaatagaagaagccaccaagaagcttggcttcaaacatccagttattggagtccatgtcagacgcacagacaaagtgggaacagaagctgccttccatcccattgaagagtacatggtgcatgttgaagaacattttcagcttcttgcacgcagaatgcaagtggacaaaaaaagagtgtatttggccacagatgacccttctttattaaaggaggcaaaaacaaagtaccccaattatgaatttattagtgataactctatttcctggtcagctggactgcacaatcgatacacagaaaattcacttcgtggagtgatcctggatatacattttctctctcaggcagacttcctagtgtgtactttttcatcccaggtctgtcgagttgcttatgaaattatgcaaacactacatcctgatgcctctgcaaacttccattctttagatgacatctactattttgggggccagaatgcccacaatcaaattgccatttatgctcaccaaccccgaactgcagatgaaattcccatggaacctggagatatcattggtgtggctggaaatcattgggatggctattctaaaggtgtcaacaggaaattgggaaggacgggcctatatccctcctacaaagttcgagagaagatagaaacggtcaagtaccccacatatcctgaggctgagaaataaagctcagatggaagagataaacgaccaaactcagttcgaccaaactcagttcaaaccatttsagccaaactgtagatgaagagggctctgatctaacaaaataaggttatatgagtagatactctcagcaccaagagcagctgggaactgacataggcttcaattggtggaattcctctttaacaagggctgcaatgccctcatacccatgcacagtacaataatgtactcacatataacatgcaaacaggttgttttctactttgcccctttcagtatgtccccataagacaaacactgccatattgtgtaatttaagtgacacagacattttgtgtgagacttaaaacatggtgcctatatctgagagacctgtgtgaactattgagaagatcggaacagctccttactctgaggaagttgattcttatttgatggtggtattgtgaccactgaattcactccagtcaacagattcagaatgagaatggacgtttggtttttttttgtttttgtttttgttttttcctttataaggttgtctgttttttttttttwaaataattgcatcagttcattgacctcatcattaataagtgaagaatacatcagaaaataaaatattcactctccattagaaaattttgtaaaacartgccatgaacaaattctttagtactcaatgtttctggacattctctttgataacaaaaaataaattttaaaaaggaattttgtaaagtttctagaattttatatcattggatgatatgttgatcagccttatgtggaagaactgtgataaaaagaggagctttttagtttttcagcttat

SEQ ID NO: 4480 - DNA, 3331 bp, Homo sapiens
cgcgttatctccggccgacccgagcagccgsttccctcctctccaggccccctccccatcccacccccgccgcctggccccagccgacccgtcccttcgtctccccgcggaatggggccggcactgctcagggtcgcgcgccctggacccagctcgctctcggtctcgcgctgtcagcgactgcccggctcgcgccgcctcgcgctctgcctcagtcagtggcgccgaaggctccgttaagcggcggcggcggttcctgtttccgtttcttcctctccgttcggtcgggagtagcatcctccactcagccacccttcccactcccccatcgtggggcagctgcggctgagggctgtggctttggcagctgcgacggggagcggcggagaccgcctctgctcccgcctggggttgctgcttttgctcagaggacatccatgaccctaatggtctttttgttcaagataaagtgattttttgcctttgttgattaactggacaaattcagattctattttgaccagcaataagttgaattatggggctagaagataaggactaaaaacaagaattggtgtccagaaagcatgtagagcgcatgaagtacaggacaataaagcttcctacacatatcaccaggaggatctctttgaaagattcactgcaggactaccagagagaataatttgtctgaagcatcatgtgttgaaacaacagaagtctattcacctgtgcactaactagaaacagagttacaatgttttcaattctttgagctccaggactccagggaagtgagttgaaaatctgaaaatgcggccatggactggttcctggcgttggattatgctcattctttttgcctgggggaccttgctgttttatataggtggtcacttggtacgagataatgaccatcctgatcactctagccgagaactgtccaagattctggcaaagcttgaacgataccagaaggccctattgatcaggggccagctataggaagagtacgcgttttagaagagcagcttgttaaggccaaagaacagattgaaaattacmagaaacagaccagaaatggtctggggaaggatcatgaaatcctgaggaggaggattgaaaatggagctaaagagctctggtttttcctacagagtgaattgaagaaattaaagaacttagaaggaaatgaactccaaagacatgcagatgaatttcttttggatttaggacatcatgaaaggtctataatgacggatctatactacctcagtcagacagatggagcaggtgattggcgggaaaaagaggccaaagatctgacagaactrgttcagcggagaataacatatcttcagaatcccaaggactgcagcaaagccaaaaagctggtgtgtaatatcaacaaaggctgtggctatggctgtcagctccatcatgtggtctactgcttcatgattgcatatggcacccagcgaacactcatcttggaatctcagaattggcgctatgctactggtggatgggagactgtatttaggcctgtaagtgagacatgcamagacagatctggcatctccactggacactggtcaggtgaagtgaaggacaaaaatgttcaagtggtcgagcttcccattgtagacagtcttcatccccgtcctccatatttacccttggctgtaccagaagacctcgcagatcgacttgtacgagtgcatggtgaccctgcagtgtggtgggtgtctcagtttgtcaaatacttgatccgcccacagccttggctagaaaaagaaatagaagaagccaccaagaagcttggcttcaaacatccagttattggagtccatgtcagacgcacagacaaagtgggaacagaagctgccttccatcccattgaagagtacatggtgcatgttgaagaacattttcagcttcttgcacgcagaatgcaagtggacaaaaaaagagtgtatttggccacagatgacccttctttattaaaggaggcaaaaacaaagtaagtaccccaattatgaatttattagtgataactctatttcctggtcagctggactgcacaatcgatacacagaaaattcacttcgtggagtgatcctggatatacattttctctctcaggcagacttcctagtgtgtactttttcatcccaggtctgtcgagttgcttatgaaattatgcaaacactacatcctgatgcctctgcaaacttccattctttagatgacatctactattttgggggccagaatgcccacaatcaaattgccatttatgctcaccaaccccgaactgcagatgaaattcccatggaacctggagatatcattggtgtggctggaaatcattgggatggctattctaaaggtgtcaacaggaaattgggaaggacgggcctatatccctcctacaaagttcgagagaagatagaaacggtcaagtaccccacatatcctgaggctgagaaataaagctcagatggaagagataaacgaccaaactcagttcgaccaaactcagttcaaaccatttsagccaaactgtagatgaagagggctctgatctaacaaaataaggttatatgagtagatactctcagcaccaagagcagctgggaactgacataggcttcaattggtggaattcctctttaacaagggctgcaatgccctcatacccatgcacagtacaataatgtactcacatataacatgcaaacaggttgttttctactttgcccctttcagtatgtccccataagacaaacactgccatattgtgtaatttaagtgacacagacattttgtgtgagacttaaaacatggtgcctatatctgagagacctgtgtgaactattgagaagatcggaacagctccttactctgaggaagttgattcttatttgatggtggtattgtgaccactgaattcactccagtcaacagattcagaatgagaatggacgtttggtttttttttgtttttgtttttgttttttcctttataaggttgtctgttttttttttttwaaataattgcatcagttcattgacctcatcattaataagtgaagaatacatcagaaaataaaatattcactctccattagaaaattttgtaaaacartgccatgaacaaattctttagtactcaatgtttctggacattctctttgataacaaaaaataaattttaaaaaggaattttgtaaagtttctagaattttatatcattggatgatatgttgatcagccttatgtggaagaactgtgataaaaagaggagctttttagtttttcagcttat

SEQ ID NO: 4481 - DNA, 3974 bp, Homo sapiens
ggccgccgactgagctggcacgggccggtccattcccggcgctgtagggagcacagcattctctggaggcgagtctcctcccgggatccaggatccgctcgcgccccgctcagcctccggccttcaggcggtagagggcggcctacgcctgtgtgcgagccggagccggcgtgcgcagccgctgccctgctggaactgtgccgtcccgctgtggcccgcggctctgctaggcggtggatgctgctgctacgctctccaccggcgcagcgaggaagggggcggggagaakccctggcacatgccagggtcgccgtaggtggcagcggccggcgcatgcgcgccctctcccagaagccaggaacgccgaggggcgcgctcccccattcgcgcgcgcacgccggcgctggccgaggcttccccgcctgcgctcgttgtcagagccgctccggcgcgtgcgcgcgttatctccggccgacccgagcagccgsttccctcctctccaggccccctccccatcccacccccgccgcctggccccagccgacccgtcccttcgtctccccgcggaatggggccggcactgctcagggtcgcgcgccctggacccagctcgctctcggtctcgcgctgtcagcgactgcccggctcgcgccgcctcgcgctctgcctcagtcagtggcgccgaaggctccgttaagcggcggcggcggttcctgtttccgtttcttcctctccgttcggtcgggagtagcatcctccactcagccacccttcccactcccccatcgtggggcagctgcggctgagggctgtggctttggcagctgcgacggggagcggcggagaccgcctctgctcccgcctggggtaagggggcgttttgggagccgggccccgcgcgcctcggggtcttgggctgggctgcgcgcgggatctgaggaggctccgcggctgtccctgctcgttcacccgggcctgttgctgcaactgctgccggttaaccagcggctctcggaaaagtggggagggagcccccgggacgctctggcggatgccttggcgcagccccgggggcgcgggcagagggttgctgcttttgctcagaggacatccatgaccctaatggtctttttgttcaagataaagtgattttttgcctttgttgattaactggacaaattcagcatgtagagcgcatgaagtacaggacaataaagcttcctacacatatcaccaggaggatctctttgaaagattcactgcaggactaccagagagaataatttgtctgaagcatcatgtgttgaaacaacagaagtctattcacctgtgcactaactagaaacagagttacaatgttttcaattctttgagctccaggactccagggaagtgagttgaaaatctgaaaatgcggccatggactggttcctggcgttggattatgctcattctttttgcctgggggaccttgctgttttatataggtggtcacttggtacgagataatgaccatcctgatcactctagccgagaactgtccaagattctggcaaagcttgaacgcttaaaacarcagaatgaagacttgaggcgaatggccgaatctctccggataccagaaggccctattgatcaggggccagctataggaagagtacgcgttttagaagagcagcttgttaaggccaaagaacagattgaaaattacmagaaacagaccagaaatggtctggggaaggatcatgaaatcctgaggaggaggattgaaaatggagctaaagagctctggtttttcctacagagtgaattgaagaaattaaagaacttagaaggaaatgaactccaaagacatgcagatgaatttcttttggatttaggacatcatgaaaggtctataatgacggatctatactacctcagtcagacagatggagcaggtgattggcgggaaaaagaggccaaagatctgacagaactrgttcagcggagaataacatatcttcagaatcccaaggactgcagcaaagccaaaaagctggtgtgtaatatcaacaaaggctgtggctatggctgtcagctccatcatgtggtctactgcttcatgattgcatatggcacccagcgaacactcatcttggaatctcagaattggcgctatgctactggtggatgggagactgtatttaggcctgtaagtgagacatgcamagacagatctggcatctccactggacactggtcaggtgaagtgaaggacaaaaatgttcaagtggtcgagcttcccattgtagacagtcttcatccccgtcctccatatttacccttggctgtaccagaagacctcgcagatcgacttgtacgagtgcatggtgaccctgcagtgtggtgggtgtctcagtttgtcaaatacttgatccgcccacagccttggctagaaaaagaaatagaagaagccaccaagaagcttggcttcaaacatccagttattggagtccatgtcagacgcacagacaaagtgggaacagaagctgccttccatcccattgaagagtacatggtgcatgttgaagaacattttcagcttcttgcacgcagaatgcaagtggacaaaaaaagagtgtatttggccacagatgacccttctttattaaaggaggcaaaaacaaagtaccccaattatgaatttattagtgataactctatttcctggtcagctggactgcacaatcgatacacagaaaattcacttcgtggagtgatcctggatatacattttctctctcaggcagacttcctagtgtgtactttttcatcccaggtctgtcgagttgcttatgaaattatgcaaacactacatcctgatgcctctgcaaacttccattctttagatgacatctactattttgggggccagaatgcccacaatcaaattgccatttatgctcaccaaccccgaactgcagatgaaattcccatggaacctggagatatcattggtgtggctggaaatcattgggatggctattctaaaggtgtcaacaggaaattgggaaggacgggcctatatccctcctacaaagttcgagagaagatagaaacggtcaagtaccccacatatcctgaggctgagaaataaagctcagatggaagagataaacgaccaaactcagttcgaccaaactcagttcaaaccatttsagccaaactgtagatgaagagggctctgatctaacaaaataaggttatatgagtagatactctcagcaccaagagcagctgggaactgacataggcttcaattggtggaattcctctttaacaagggctgcaatgccctcatacccatgcacagtacaataatgtactcacatataacatgcaaacaggttgttttctactttgcccctttcagtatgtccccataagacaaacactgccatattgtgtaatttaagtgacacagacattttgtgtgagacttaaaacatggtgcctatatctgagagacctgtgtgaactattgagaagatcggaacagctccttactctgaggaagttgattcttatttgatggtggtattgtgaccactgaattcactccagtcaacagattcagaatgagaatggacgtttggtttttttttgtttttgtttttgttttttcctttataaggttgtctgttttttttttttwaaataattgcatcagttcattgacctcatcattaataagtgaagaatacatcagaaaataaaatattcactctccattagaaaattttgtaaaacartgccatgaacaaattctttagtactcaatgtttctggacattctctttgataacaaaaaataaattttaaaaaggaattttgtaaagtttctagaattttatatcattggatgatatgttgatcagccttatgtggaagaactgtgataaaaagaggagctttttagtttttcagcttat

SEQ ID NO: 4482 - DNA, 3298 bp, Homo sapiens
cgcgttatctccggccgacccgagcagccgsttccctcctctccaggccccctccccatcccacccccgccgcctggccccagccgacccgtcccttcgtctccccgcggaatggggccggcactgctcagggtcgcgcgccctggacccagctcgctctcggtctcgcgctgtcagcgactgcccggctcgcgccgcctcgcgctctgcctcagtcagtggcgccgaaggctccgttaagcggcggcggcggttcctgtttccgtttcttcctctccgttcggtcgggagtagcatcctccactcagccacccttcccactcccccatcgtggggcagctgcggctgagggctgtggctttggcagctgcgacggggagcggcggagaccgcctctgctcccgcctggggttgctgcttttgctcagaggacatccatgaccctaatggtctttttgttcaagataaagtgattttttgcctttgttgattaactggacaaattcagcatgtagagcgcatgaagtacaggacaataaagcttcctacacatatcaccaggaggatctctttgaaagattcactgcaggactaccagagagaataatttgtctgaagcatcatgtgttgaaacaacagaagtctattcacctgtgcactaactagaaacagagttacaatgttttcaattctttgagctccaggactccagggaagtgagttgaaaatctgaaaatgcggccatggactggttcctggcgttggattatgctcattctttttgcctgggggaccttgctgttttatataggtggtcacttggtacgagataatgaccatcctgatcactctagccgagaactgtccaagattctggcaaagcttgaacgcttaaaacarcagaatgaagacttgaggcgaatggccgaatctctccggataccagaaggccctattgatcaggggccagctataggaagagtacgcgttttagaagagcagcttgttaaggccaaagaacagattgaaaattacmagaaacagaccagaaatggtctggggaaggatcatgaaatcctgaggaggaggattgaaaatggagctaaagagctctggtttttcctacagagtgaattgaagaaattaaagaacttagaaggaaatgaactccaaagacatgcagatgaatttcttttggatttaggacatcatgaaaggtctataatgacggatctatactacctcagtcagacagatggagcaggtgattggcgggaaaaagaggccaaagatctgacagaactrgttcagcggagaataacatatcttcagaatcccaaggactgcagcaaagccaaaaagctggtgtgtaatatcaacaaaggctgtggctatggctgtcagctccatcatgtggtctactgcttcatgattgcatatggcacccagcgaacactcatcttggaatctcagaattggcgctatgctactggtggatgggagactgtatttaggcctgtaagtgagacatgcamagacagatctggcatctccactggacactggtcaggtgaagtgaaggacaaaaatgttcaagtggtcgagcttcccattgtagacagtcttcatccccgtcctccatatttacccttggctgtaccagaagacctcgcagatcgacttgtacgagtgcatggtgaccctgcagtgtggtgggtgtctcagtttgtcaaatacttgatccgcccacagccttggctagaaaaagaaatagaagaagccaccaagaagcttggcttcaaacatccagttattggagtccatgtcagacgcacagacaaagtgggaacagaagctgccttccatcccattgaagagtacatggtgcatgttgaagaacattttcagcttcttgcacgcagaatgcaagtggacaaaaaaagagtgtatttggccacagatgacccttctttattaaaggaggcaaaaacaaagtaccccaattatgaatttattagtgataactctatttcctggtcagctggactgcacaatcgatacacagaaaattcacttcgtggagtgatcctggatatacattttctctctcaggcagacttcctagtgtgtactttttcatcccaggtctgtcgagttgcttatgaaattatgcaaacactacatcctgatgcctctgcaaacttccattctttagatgacatctactattttgggggccagaatgcccacaatcaaattgccatttatgctcaccaaccccgaactgcagatgaaattcccatggaacctggagatatcattggtgtggctggaaatcattgggatggctattctaaaggtgtcaacaggaaattgggaaggacgggcctatatccctcctacaaagttcgagagaagatagaaacggtcaagtaccccacatatcctgaggctgagaaataaagctcagatggaagagataaacgaccaaactcagttcgaccaaactcagttcaaaccatttsagccaaactgtagatgaagagggctctgatctaacaaaataaggttatatgagtagatactctcagcaccaagagcagctgggaactgacataggcttcaattggtggaattcctctttaacaagggctgcaatgccctcatacccatgcacagtacaataatgtactcacatataacatgcaaacaggttgttttctactttgcccctttcagtatgtccccataagacaaacactgccatattgtgtaatttaagtgacacagacattttgtgtgagacttaaaacatggtgcctatatctgagagacctgtgtgaactattgagaagatcggaacagctccttactctgaggaagttgattcttatttgatggtggtattgtgaccactgaattcactccagtcaacagattcagaatgagaatggacgtttggtttttttttgtttttgtttttgttttttcctttataaggttgtctgttttttttttttwaaataattgcatcagttcattgacctcatcattaataagtgaagaatacatcagaaaataaaatattcactctccattagaaaattttgtaaaacartgccatgaacaaattctttagtactcaatgtttctggacattctctttgataacaaaaaataaattttaaaaaggaattttgtaaagtttctagaattttatatcattggatgatatgttgatcagccttatgtggaagaactgtgataaaaagaggagctttttagtttttcagcttat

SEQ ID NO: 4483 - DNA, 1795 bp, Homo sapiens
actctgggcgaggccgcccctatcccagccgcaccggtccttcccggcacacgcgaggctcccatggctctggcggtggccccgtrggggcgacagtgggaagaggcccgcgccctgggccgggcagtcaggatgctgcagcgcctagaagagcaatgcgtcgacccccggctgtccgtgagtcccccttcgctgcgggacctgctgccccgcacagcgcagctgcttcgagaggtggcccattctcggcgggcggccggcggaggcggccccgggggtcccggcggctctggggactttctactcatctacctggccaatctggaggccaagagcaggcaggtggccgcgctgctgcctccccggggccgaaggagtgccaacgacgagctcttccgggcgggctccagactcaggcgacasstggccaagctggccatcatcttcagccacatgcacgcagagctgcacgcactcttccccgggggaaagtactgtggacacatgtaccagctcaccamggcccccgcccacaccttctggagggaaagttgcggagcccggtgtgtgctgccctgggctgagtttgagtccctcctgggcacctgccaccctgtggaaccaggctgcacagccctggccttgcgcaccaccattgacctsacctgcagcgggcacgtgtccatcttcgagttcgacgtcttcaccaggctctttcagccatggccaacactcctcaagaactggcagctcctggcagtcaaccacccaggctacatggccttcctcacctatgatgaggtccaagagcgtctgcaggcctgcagrgacaagccaggcagttacatcttccggcccagctgtactcgcctggggcagtgggccatcggctatgtgagctcagatggcagcatcctgcagaccatccctgccaacaaacccctgtcccaggtgctcctggagggacagaaggacggcttctacctctacccagatggaaagacccacaacccagacctgactgagctcggccaggcagaaccccagcagcgcatccacgtgtcagaggagcagctgcagctctactgggccatggactccacatttgagctctgcaagatctgtgctgagagcaacaaggatgtgaagattgagccgtgygggcacctgctctgcagctgctgcctggctgcctggcagcactcggacagccagacctgccccttctgccgctgcragatcaagggctgggaggccgtgagtatctaccagttcyacggtcaggctactgctgaggactcagggaacagcagtgaccaggaaggcagggagttggagctggggcaggtgcccctttcggctcctccattgcccccacggccagatctgccccccaggaagcccagaaatgcccagccgaaagtgagactcctaaaggggaactcccctccagctgcgctgggaccccaggaccctgccccggcctgaaggccagggcacccagatgtgctgctcaagggagccccaagggctggaagggggttgtgaaaccgaaataaactgccaagcctggtctgtcctccagggtgcaaaggaagagtgcagtggccagcagggggcagcagagggcagcaggcactgggaaagggccgtccccaggcctggtccccacctgaacaacaggagtccaggccccagcccctcctccctcagactcaggagtccatactccagcccctcctccctcaracccaggagtccatactgcagcccctcctccctcagacccaggagt

SEQ ID NO: 4484 - DNA, 1657 bp, Homo sapiens
actctgggcgaggccgcccctatcccagccgcaccggtccttcccggcacacgcgaggctcccatggctctggcggtggccccgtrggggcgacagtgggaagaggcccgcgccctgggccgggcagtcaggatgctgcagcgcctagaagagcaatgcgtcgacccccggctgtccgtgagtcccccttcgctgcgggacctgctgccccgcacagcgcagctgcttcgagaggtggcccattctcggcgggcggccggcggaggcggccccgggggtcccggcggctctggggactttctactcatctacctggccaatctggaggccaagagcaggcaggtggccgcgctgctgcctccccggggccgaaggagtgccaacgacgagctcttccgggcgggctccagactcaggcgacasstggccaagctggccatcatcttcagccacatgcacgcagagctgcacgcactcttccccgggggaaagtactgtggacacatgtaccagctcaccamggcccccgcccacaccttctggagggaaagttgcggagcccggtgtgtgctgccctgggctgagtttgagtccctcctgggcacctgccaccctgtggaaccaggctgcacagccctggccttgcgcaccaccattgacctsacctgcagcgggcacgtgtccatcttcgagttcgacgtcttcaccaggctctttcagccatggccaacactcctcaagaactggcagctcctggcagtcaaccacccaggctacatggccttcctcacctatgatgaggtccaagagcgtctgcaggcctgcagrgacaagccaggcagctacctctacccagatggaaagacccacaacccagacctgactgagctcggccaggcagaaccccagcagcgcatccacgtgtcagaggagcagctgcagctctactgggccatggactccacatttgagctctgcaagatctgtgctgagagcaacaaggatgtgaagattgagccgtgygggcacctgctctgcagctgctgcctggctgcctggcagcactcggacagccagacctgccccttctgccgctgcragatcaagggctgggaggccgtgagtatctaccagttcyacggtcaggctactgctgaggactcagggaacagcagtgaccaggaaggcagggagttggagctggggcaggtgcccctttcggctcctccattgcccccacggccagatctgccccccaggaagcccagaaatgcccagccgaaagtgagactcctaaaggggaactcccctccagctgcgctgggaccccaggaccctgccccggcctgaaggccagggcacccagatgtgctgctcaagggagccccaagggctggaagggggttgtgaaaccgaaataaactgccaagcctggtctgtcctccagggtgcaaaggaagagtgcagtggccagcagggggcagcagagggcagcaggcactgggaaagggccgtccccaggcctggtccccacctgaacaacaggagtccaggccccagcccctcctccctcagactcaggagtccatactccagcccctcctccctcaracccaggagtccatactgcagcccctcctccctcagacccaggagt

SEQ ID NO: 4485 - DNA, 2735 bp, Homo sapiens
actctgggcgaggccgcccctatcccagccgcaccggtccttcccggcacacgcgaggctcccatggctctggcggtggccccgtrggggcgacagtgggaagaggcccgcgccctgggccgggcagtcaggatgctgcagcgcctagaagagcaatgcgtcgacccccggctgtccgtgagtcccccttcgctgcgggacctgctgccccgcacagcgcagctgcttcgagaggtggcccattctcggcgggcggccggcggaggcggccccgggggtcccggcggctctggggactttctactcatctacctggccaatctggaggccaagagcaggcaggtggccgcgctgctgcctccccggggccgaaggagtgccaacgacgagctcttccgggcgggctccagactcaggcgacasstggccaagctggccatcatcttcagccacatgcacgcagagctgcacgcactcttccccgggggaaagtactgtggacacatgtaccagctcaccamggcccccgcccacaccttctggagggaaagttgcggagcccggtgtgtgctgccctgggctgagtttgagtccctcctgggcacctgccaccctgtggaaccaggctgcacagccctggccttgcgcaccaccattgacctsacctgcagcgggcacgtgtccatcttcgagttcgacgtcttcaccaggctctttcagccatggccaacactcctcaagaactggcagctcctggcagtcaaccacccaggctacatggccttcctcacctatgatgaggtccaagagcgtctgcaggcctgcagrgacaagccaggcagctacctctacccagatggaaagacccacaacccagacctgactgagctcggccaggcagaaccccagcagcgcatccacgtgtcagaggagcagctgcagctctactgggccatggactccacatttgagctctgcaagatctgtgctgagagcaacaaggatgtgaagattgagccgtgygggcacctgctctgcagctgctgcctggctgcctggcagcactcggacagccagacctgccccttctgccgctgcragatcaagggctgggaggccgtgagtatctaccagttcyacggtcaggctactgctgaggactcagggaacagcagtgaccaggaaggcagggagttggagctggggcaggtgcccctttcggctcctccattgcccccacggccagatctgccccccaggaagcccagaaatgcccagccgaaagtgagactcctaaaggggaactcccctccagctgcgctgggaccccaggaccctgccccggcctgaaggccagggcacccagatgtgctgctcaagggagccccaagggctggaagggggttgtgaaaccgaaataaactgccaagcctggtctgtcctccagggtgcaaaggaagagtgcagtggccagcagggggcagcagagggcagcaggcactgggaaagggccgtccccaggcctggtccccacctgaacaacaggagtccaggccccagcccctcctccctcagactcaggagtccatactccagcccctcctccctcaracccaggagtccatactgcagcccctcctccctcagacccaggagtccatactccagcccctcctccctcagacccaggagtccatactscagcccctcctycctcagacccaggagtccatactgcagcccctccttcctcagacccaggagtccatactscagcccctcctccctcagacccaggagtccatactgcagcccctcctccctcagacccaggagtccatactgcagcccctccttcctcagacccaggaatccatactgcagccccttctccctcagacccaggagtccaggccccagcccctcctccctcagacccaggagtccatactgcagcccctcctccctcagacccaggagtccatactccagcccctcctccctcagacccaggagtccatactgcagccccttctccctcagacccaggagtccaggccccagcccctcctccctcagacccaggagtccatactgcagcccctcctccctcagacccaggagtccatactccagcccctcctccctcagacccaggagtccatactgcagcccctccttcctcagacccaggagtccatactgcagccccttctccctcagacccaggagtccaggccccagcccctcctccctcagacccaggagtccatactgcagcccctcctccctcagacccaggagtccatactccagcccctcctccctcagacccaggagtccatactgcagccccttctccctcagacccaggagtccatactgcagcccctccttcctcagacccaggagtccatactgcagccccttctccctcagacccaggagtccaggccccagcccctcctccctcagacccaggagtccatactgcagcccctcctccctcagacccaggagtccatactccagcccctcctccctcagacccaggagtccatactgcagcccctcctccctcagacccaggagtccatactgcagcccctccttcctcagacccagtagtccatactgcagcccctyctccctcagacccaggagtccaggccccagcccctcctccctcagaccyaggagtccaggccccagcccctcctccctcagacccagga

SEQ ID NO: 4486 - DNA, 2873 bp, Homo sapiens
actctgggcgaggccgcccctatcccagccgcaccggtccttcccggcacacgcgaggctcccatggctctggcggtggccccgtrggggcgacagtgggaagaggcccgcgccctgggccgggcagtcaggatgctgcagcgcctagaagagcaatgcgtcgacccccggctgtccgtgagtcccccttcgctgcgggacctgctgccccgcacagcgcagctgcttcgagaggtggcccattctcggcgggcggccggcggaggcggccccgggggtcccggcggctctggggactttctactcatctacctggccaatctggaggccaagagcaggcaggtggccgcgctgctgcctccccggggccgaaggagtgccaacgacgagctcttccgggcgggctccagactcaggcgacasstggccaagctggccatcatcttcagccacatgcacgcagagctgcacgcactcttccccgggggaaagtactgtggacacatgtaccagctcaccamggcccccgcccacaccttctggagggaaagttgcggagcccggtgtgtgctgccctgggctgagtttgagtccctcctgggcacctgccaccctgtggaaccaggctgcacagccctggccttgcgcaccaccattgacctsacctgcagcgggcacgtgtccatcttcgagttcgacgtcttcaccaggctctttcagccatggccaacactcctcaagaactggcagctcctggcagtcaaccacccaggctacatggccttcctcacctatgatgaggtccaagagcgtctgcaggcctgcagrgacaagccaggcagttacatcttccggcccagctgtactcgcctggggcagtgggccatcggctatgtgagctcagatggcagcatcctgcagaccatccctgccaacaaacccctgtcccaggtgctcctggagggacagaaggacggcttctacctctacccagatggaaagacccacaacccagacctgactgagctcggccaggcagaaccccagcagcgcatccacgtgtcagaggagcagctgcagctctactgggccatggactccacatttgagctctgcaagatctgtgctgagagcaacaaggatgtgaagattgagccgtgygggcacctgctctgcagctgctgcctggctgcctggcagcactcggacagccagacctgccccttctgccgctgcragatcaagggctgggaggccgtgagtatctaccagttcyacggtcaggctactgctgaggactcagggaacagcagtgaccaggaaggcagggagttggagctggggcaggtgcccctttcggctcctccattgcccccacggccagatctgccccccaggaagcccagaaatgcccagccgaaagtgagactcctaaaggggaactcccctccagctgcgctgggaccccaggaccctgccccggcctgaaggccagggcacccagatgtgctgctcaagggagccccaagggctggaagggggttgtgaaaccgaaataaactgccaagcctggtctgtcctccagggtgcaaaggaagagtgcagtggccagcagggggcagcagagggcagcaggcactgggaaagggccgtccccaggcctggtccccacctgaacaacaggagtccaggccccagcccctcctccctcagactcaggagtccatactccagcccctcctccctcaracccaggagtccatactgcagcccctcctccctcagacccaggagtccatactccagcccctcctccctcagacccaggagtccatactscagcccctcctycctcagacccaggagtccatactgcagcccctccttcctcagacccaggagtccatactscagcccctcctccctcagacccaggagtccatactgcagcccctcctccctcagacccaggagtccatactgcagcccctccttcctcagacccaggaatccatactgcagccccttctccctcagacccaggagtccaggccccagcccctcctccctcagacccaggagtccatactgcagcccctcctccctcagacccaggagtccatactccagcccctcctccctcagacccaggagtccatactgcagccccttctccctcagacccaggagtccaggccccagcccctcctccctcagacccaggagtccatactgcagcccctcctccctcagacccaggagtccatactccagcccctcctccctcagacccaggagtccatactgcagcccctccttcctcagacccaggagtccatactgcagccccttctccctcagacccaggagtccaggccccagcccctcctccctcagacccaggagtccatactgcagcccctcctccctcagacccaggagtccatactccagcccctcctccctcagacccaggagtccatactgcagccccttctccctcagacccaggagtccatactgcagcccctccttcctcagacccaggagtccatactgcagccccttctccctcagacccaggagtccaggccccagcccctcctccctcagacccaggagtccatactgcagcccctcctccctcagacccaggagtccatactccagcccctcctccctcagacccaggagtccatactgcagcccctcctccctcagacccaggagtccatactgcagcccctccttcctcagacccagtagtccatactgcagcccctyctccctcagacccaggagtccaggccccagcccctcctccctcagaccyaggagtccaggccccagcccctcctccctcagacccagga

SEQ ID NO: 4487 - DNA, 1557 bp, Homo sapiens
ttgggtcagtgtcacctccaggatacagacagccccccttcagcccagcccagccaggtctcctacaccgccaccatgccattcggtaacacccacaacaagttcaagctgaattacaagcctgaggaggagtaccccgacctcagcaaacataacaaccacatggccaaggtactgacccttgaactctacaagaagctgcgggacaaggagactccatctggcttcactgtagacgatgtcatccagacaggagtggacaacccaggtcaccccttcatcatgaccgtgggctgcgtggctggtgatgaggagtcctacgaagttttcaaggaactctttgaccccatcatctcggatcgccacgggggctacaaacccactgacaagcacaagactgacctcaaccatgaaaacctcaagggtggagacgacctggacccyaactacgtgctcagcagccgcgtccgcactggccgcagcatcaagggctacacgttgcccccacactgctcccgtggcgagcgccgggcggtggagaagctctctgtggaagctctcaacagcctgacgggcgagttcaaagggaagtactaccctctgaagagcatgacggagaaggagcagcagcagctcatcgatgaccacttcctgttcgacaagcccgtgtccccgctgctgctggcctcaggcatggcccgcgactggcccgacgcccgtggcatctggcacaatgacaacaagagcttcctggtgtgggtgaacgaggaggatcacctccgggtcatctccatggagaaggggggcaacatgaaggaggttttccgccgcttctgcgtagggctgcagaagattgaggagatctttaagaaagctggccaccccttcatgtggaaccagcacctgggctacgtgctcacctgcccatccaacctgggcactgggctgcgtggaggcgtgcatgtgaagctggcgcacctgagcaagcaccccaagttcgaggagatcctcacccgcctgcgtctgcagaagaggggtacaggtggcgtggacacagctgccgtgggctcagtatttgacgtgtccaacgctgatcggctgggctcgtccgaagtagaacaggtgcagctggtggtggatggtgtgaagctcatggtggaaatggagaagaagttggagaaaggccagtccatygacgacatgatccccgcccagaagtaggcgcctgcccacctgccaccgactgctggaacccagccagtgggagggcctggcccaccagagtcctgctccctcactcctcgccccgccccctgkcccagagtcccacctgggggctctctccacccttctcagagttccagtttcaaccagagttccaaccaatgggctccatcctctggattctggccaatgaaatatctccctrgcagggtcctcttcttttcccagagctccaccccaaccaggagctctagttaatggagagctcccagcacactcggagcttgtgctttgtctccacgcaaagcgataaataaaagcattggtggcctt

SEQ ID NO: 4488 - DNA, 1801 bp, Homo sapiens
gcccgaggtcccagacgcccggcgcagcgggagcggcggggcgtgcctggcctgcgggacgcgactgatcgcagtggggcgaagcggggccggagccgcccgcggtcaggagcagcaatgtctgtgcaggtagcggctcctggaagtgcagggctgggcccagagcgcctgagccctgaggagctggtgcggcagacgcggcaagtggtccaggggctggaggcgctgcgggcagagcaccatggcctggctgggcacctggcggaggccctggcgggacagggcccggcagccggcttggagatgctggaggaaaagcagcaggtggtgagccactcgctggaggccatcgagctggggctgggcgaggcccaggtgctgctggccctgtcggcacatgtgggtgcactggaggcagagaagcagcggctgcgctcgcaggcccggcggctggcccaggagaacgtgtggctgcgggaggarctggaggagacgcagcggcggcttcgggccagcgaggagtccgtggcccagctggaggaggagaagcgccacctggagttcctggggcagctgcgacagtacgacccaccggcggagagccagcagtctgagtccccgcctcgccgagacagcctggcctccctgttccccagcgaggaggaggagaggaaaggtcctgaggccgcaggagcagcagctgctcagcagggtggctatgagatccctgcccgccttcggaccctgcataacctcgtgatccagtacgcggggcagggccgctatgaggtggcggtgcctctgtgccgccaggccttggaggacctggagcgcagctcgggccactgccaccctgacgtggccaccatgctcaacatcctggcgctggtgtaccgggaccagaacaagtacaaagmagccacagaccttctccatgatgccctgcagatccgggagcagacgctgggccctgagcacccygcggtggccgccacgctcaacaacttggctgtcctctatgggaagcgtgggcgttaccgggaggcagagcccctgtgccagcgcgctttggagatccgagagaaggtcctgggtgctgaccacccagatgtggccaagcagctcaacaacctggccctgctgtgccagaaccagggcaagtttgaggacgtggagcggcactatgcccgggccctgagcatctatgaggcactgggcgggccccatgaccccaacgtggccaagaccaagaacaacctggcctcagcctacctgaaacagaacaagtatcaacaagcggaagagctgtacaaagaaatcctccacaaggaggacctacccgcccctctcggtgcccccaacacaggcacagctggtgacgcagaacaggcccttcgccgcagcagctcactctccaagatccgtgagtctatcaggcgaggaagtgagaagctggtctcccggctccgaggcgaggcggcggcaggagcagccggaatgaagagagccatgtcactcaacacactgaacgtggatgctccaagggctcctgggactcagtttcccagctggcacctggacaaggcccctcggaccctcagcgccagcacccaggacctgagcccccactaacgtccagtgaactgcgctggccgcagcttcttgggaacagtgcaggagggatgggctggtggggtgagagggggtctatcatctcctggcccccccttgcstctgggtacctggtggatagctgccttctcctgcgattaaaggctgtggacgtgacagtgagaaatgt

SEQ ID NO: 4489 - DNA, 1829 bp, Homo sapiens
gggcgggggcaaccctgggcccgctcgccctgagacggggaagggccttggggctcccggatgccccctgccccgtcctggggctctccgggatctggaggcctggctggggtcccatgccccccaccccagcgcaggagcagcaatgtctgtgcaggtagcggctcctggaagtgcagggctgggcccagagcgcctgagccctgaggagctggtgcggcagacgcggcaagtggtccaggggctggaggcgctgcgggcagagcaccatggcctggctgggcacctggcggaggccctggcgggacagggcccggcagccggcttggagatgctggaggaaaagcagcaggtggtgagccactcgctggaggccatcgagctggggctgggcgaggcccaggtgctgctggccctgtcggcacatgtgggtgcactggaggcagagaagcagcggctgcgctcgcaggcccggcggctggcccaggagaacgtgtggctgcgggaggarctggaggagacgcagcggcggcttcgggccagcgaggagtccgtggcccagctggaggaggagaagcgccacctggagttcctggggcagctgcgacagtacgacccaccggcggagagccagcagtctgagtccccgcctcgccgagacagcctggcctccctgttccccagcgaggaggaggagaggaaaggtcctgaggccgcaggagcagcagctgctcagcagggtggctatgagatccctgcccgccttcggaccctgcataacctcgtgatccagtacgcggggcagggccgctatgaggtggcggtgcctctgtgccgccaggccttggaggacctggagcgcagctcgggccactgccaccctgacgtggccaccatgctcaacatcctggcgctggtgtaccgggaccagaacaagtacaaagmagccacagaccttctccatgatgccctgcagatccgggagcagacgctgggccctgagcacccygcggtggccgccacgctcaacaacttggctgtcctctatgggaagcgtgggcgttaccgggaggcagagcccctgtgccagcgcgctttggagatccgagagaaggtcctgggtgctgaccacccagatgtggccaagcagctcaacaacctggccctgctgtgccagaaccagggcaagtttgaggacgtggagcggcactatgcccgggccctgagcatctatgaggcactgggcgggccccatgaccccaacgtggccaagaccaagaacaacctggcctcagcctacctgaaacagaacaagtatcaacaagcggaagagctgtacaaagaaatcctccacaaggaggacctacccgcccctctcggtgcccccaacacaggcacagctggtgacgcagaacaggcccttcgccgcagcagctcactctccaagatccgtgagtctatcaggcgaggaagtgagaagctggtctcccggctccgaggcgaggcggcggcaggagcagccggaatgaagagagccatgtcactcaacacactgaacgtggatgctccaagggctcctgggactcagtttcccagctggcacctggacaaggcccctcggaccctcagcgccagcacccaggacctgagcccccactaacgtccagtgaactgcgctggccgcagcttcttgggaacagtgcaggagggatgggctggtggggtgagagggggtctatcatctcctggcccccccttgcstctgggtacctggtggatagctgccttctcctgcgattaaaggctgtggacgtgacagtgagaaatgt

SEQ ID NO: 4490 - DNA, 2558 bp, Homo sapiens
agatttaatagaagatgaaccagcaaaatatataggaagttgctggcagagaattaggamgaaaatctggagacagkggtatcctgagcaccactggaaggcagtatttcaagaaagaagtgtctactgctgctgcaagtaagacgaggtcaaaaggtatccggaccaattcagtgggtgagcaggccatagtcagatattaaaaggtgttgaggagtgctctggaattgaagaaattgaaaggagtatggcattacctgtgttataaaacaaatgatggtctgtcaaacacaccaaaatttttttttctttgcttgtactcttctttctgtatggaactttcactcctccttgatctcttgattccttacatcatcttttaatgtccaggttagataggacctctcctataaagcctttcttagccttagcctctttaagagtatgggcattgtcttaaccattagtgcattcctagtgtttagcataacataaatacttaactttacttatgtaactaataatcaaagcatgggctttggaataaggcagacctgaaattgaatacctgtttagttgcttacttactgtgagaccctgtaaaatgcattttatcctttatcccttgttcctcagttttttcattagtaaaatgtgtggggtggtaataattgtacctatcccagagagtttctatgagtactaaattatataatgcacaacaaaatgcatattaaagtgcctgccattgcaagcaatcagtaaatattakccattatatccattgctttgggattatttctctgggcagttttcaagtgccttaatgatcttctcctgtccttcatctgatacacattcycatatcatttgctggatattcatattatggaatcagaatactgtaatgttgactttctttttcccaggattgattatgtcaagtggccaggcatggaaggagcaaagaaggttcactctkrcagcactaaggaactttggtttaggaaagaagagcttagaggaaygcattcaggaggaggcccaacacctcactgaagcaataaaagaggagaacggacagccttttgaccctcatttcaagatcaacaatgcagtttccaatatcawttgctccatcaccttcggagaacgctttgagtaccaggatagttggtttcagcagctgctgaagttactagatgaagtcacatacttggaggcttcaaagacatgccagctctacaatgtctttccatggataatgaaattcctgcctggaccccaccaaactctcttcagcaactggaaaaaactgaaattgtttgtttctcatatgattgacaaacacagaaaggattggaatcctgcagaaacaagagactttattgatgcttaccttaaagaaatgtcaaagcacacaggcaatcctacttcaagtttccatgaagaaaacctcatctgcagcaccctggacctcttctttgccggaaccgagacaacttccacaactctgmgatgggctctgctttatatggccctctacccagaaatccaagaaaaagtacaagctgagattgacagagtgattggccaggggcagcagccgagcacagccgcccgggagtccatgccctacaccaatgctgtcatccatgaggtgcagagaatgggcaacatcatcccccwgaacgttcccagggaagtgacagttgataccactttggctgggtaccacctgcccaagaacatctcaccagactagggatctgccaaactttgggaaattctgcttcatgaacctggggttctagaatgctaaaatgtgaaaggacatttaagaccacctgggacaacatcatattaatgctggtgtttttaacataatatccccacagggtaccatgatcctgaccwatttgacggcgctgcacagggaccccacagagtgggccacccctgacacattcaatccggaccattttctggagaatggacagtttaagaaaagggaagcctttatgcctttctcaataggaaagcgggcatgcctcggagaacagttggccaggactgagctgtttattttcttcacttcccttatgcaaaaatttaccttcaggcccccaaacaatgagaagctgagcctgaagtttagaatgggtatcaccatttccccagtcagtcaccgcctctgcgctgtwcctcaggtgtaatattgttaagaaagaaaggggcaaggaaagyaagaagacatggcacgtgttctgaaaccactggtgtctgctcagatgtgttgggacmaaatgaaagtgactttcaagaaagatcagaggaatttgactcagagaaaactagatccaaatcccagctctactgtctygtccgaattagccttgggaaaatcatttatatgctaaataatttacctttttatctaggagatgaaaagaggataatgwttccttccataaagaaagttcttgtaagaatcaaaagaaatggtgagctttaagtggtttgtaaaccataaaacacatcataaaagttctatctrt

SEQ ID NO: 4491 - DNA, 1908 bp, Homo sapiens
cgcctgctgggaccgccgcctgcttggaccgcagaagagcaggaggacgtctgagccatgctcgcggcgatgggctctctggcggctgccctctgggcagtggtccatcctcggactctcctactgggcactgtcgcctttctgctcgctgctgactttctcaaaagacggcgcccaaagaactacccgccggggccctggcgcytgcccttccttggcaacttcttccttgtggacttcgagcagtcgcacctggaggttcagctgtttgtgaagaaatatgggaacctttttagcttggagcttggtgacatatctgcagttcttattactggcttgcccttaatcaaagaagcccttatccayatggaccaaaactttgggaaccgscccgtgacccctatgcgagaacatatctttaagaaaartggattgattatgtcaagtggccaggcatggaaggagcaaagaaggttcactctkrcagcactaaggaactttggtttaggaaagaagagcttagaggaaygcattcaggaggaggcccaacacctcactgaagcaataaaagaggagaacggacagccttttgaccctcatttcaagatcaacaatgcagtttccaatatcawttgctccatcaccttcggagaacgctttgagtaccaggatagttggtttcagcagctgctgaagttactagatgaagtcacatacttggaggcttcaaagacatgccagctctacaatgtctttccatggataatgaaattcctgcctggaccccaccaaactctcttcagcaactggaaaaaactgaaattgtttgtttctcatatgattgacaaacacagaaaggattggaatcctgcagaaacaagagactttattgatgcttaccttaaagaaatgtcaaagcacacaggcaatcctacttcaagtttccatgaagaaaacctcatctgcagcaccctggacctcttctttgccggaaccgagacaacttccacaactctgmgatgggctctgctttatatggccctctacccagaaatccaagaaaaagtacaagctgagattgacagagtgattggccaggggcagcagccgagcacagccgcccgggagtccatgccctacaccaatgctgtcatccatgaggtgcagagaatgggcaacatcatcccccwgaacgttcccagggaagtgacagttgataccactttggctgggtaccacctgcccaagggtaccatgatcctgaccwatttgacggcgctgcacagggaccccacagagtgggccacccctgacacattcaatccggaccattttctggagaatggacagtttaagaaaagggaagcctttatgcctttctcaataggaaagcgggcatgcctcggagaacagttggccaggactgagctgtttattttcttcacttcccttatgcaaaaatttaccttcaggcccccaaacaatgagaagctgagcctgaagtttagaatgggtatcaccatttccccagtcagtcaccgcctctgcgctgtwcctcaggtgtaatattgttaagaaagaaaggggcaaggaaagyaagaagacatggcacgtgttctgaaaccactggtgtctgctcagatgtgttgggacmaaatgaaagtgactttcaagaaagatcagaggaatttgactcagagaaaactagatccaaatcccagctctactgtctygtccgaattagccttgggaaaatcatttatatgctaaataatttacctttttatctaggagatgaaaagaggataatgwttccttccataaagaaagttcttgtaagaatcaaaagaaatggtgagctttaagtggtttgtaaaccataaaacacatcataaaagttctatctrt

SEQ ID NO: 4492 - DNA, 1722 bp, Homo sapiens
caggaggacgtctgagccatgctcgcggcgatgggctctctggcggctgccctctgggcagtggtccatcctcggactctcctactgggcactgtcgcctttctgctcgctgctgactttctcaaaagacggcgcccaaagaactacccgccggggccctggcgcytgcccttccttggcaacttcttccttgtggacttcgagcagtcgcacctggaggttcagctggtaggagtgggagaaggattgattatgtcaagtggccaggcatggaaggagcaaagaaggttcactctkrcagcactaaggaactttggtttaggaaagaagagcttagaggaaygcattcaggaggaggcccaacacctcactgaagcaataaaagaggagaacggacagccttttgaccctcatttcaagatcaacaatgcagtttccaatatcawttgctccatcaccttcggagaacgctttgagtaccaggatagttggtttcagcagctgctgaagttactagatgaagtcacatacttggaggcttcaaagacatgccagctctacaatgtctttccatggataatgaaattcctgcctggaccccaccaaactctcttcagcaactggaaaaaactgaaattgtttgtttctcatatgattgacaaacacagaaaggattggaatcctgcagaaacaagagactttattgatgcttaccttaaagaaatgtcaaagcacacaggcaatcctacttcaagtttccatgaagaaaacctcatctgcagcaccctggacctcttctttgccggaaccgagacaacttccacaactctgmgatgggctctgctttatatggccctctacccagaaatccaagaaaaagtacaagctgagattgacagagtgattggccaggggcagcagccgagcacagccgcccgggagtccatgccctacaccaatgctgtcatccatgaggtgcagagaatgggcaacatcatcccccwgaacgttcccagggaagtgacagttgataccactttggctgggtaccacctgcccaagggtaccatgatcctgaccwatttgacggcgctgcacagggaccccacagagtgggccacccctgacacattcaatccggaccattttctggagaatggacagtttaagaaaagggaagcctttatgcctttctcaataggaaagcgggcatgcctcggagaacagttggccaggactgagctgtttattttcttcacttcccttatgcaaaaatttaccttcaggcccccaaacaatgagaagctgagcctgaagtttagaatgggtatcaccatttccccagtcagtcaccgcctctgcgctgtwcctcaggtgtaatattgttaagaaagaaaggggcaaggaaagyaagaagacatggcacgtgttctgaaaccactggtgtctgctcagatgtgttgggacmaaatgaaagtgactttcaagaaagatcagaggaatttgactcagagaaaactagatccaaatcccagctctactgtctygtccgaattagccttgggaaaatcatttatatgctaaataatttacctttttatctaggagatgaaaagaggataatgwttccttccataaagaaagttcttgtaagaatcaaaagaaatggtgagctttaagtggtttgtaaaccataaaacacatcataaaagttctatctrt

SEQ ID NO: 4493 - DNA, 2437 bp, Homo sapiens
gtggcccatcccgtctgctctctgtcccgtctcccgacccgtacgcttttccctcaactcgcgcgcacgaatggttaaaaaaagggtgtgaggctcragcccgccagccaggccgctagcacctcgcgcgcgccctcagcgaggacccgcacgagctgcccggctctgtgcctgcgttgtttgaaactgtggaacccgttaggcttttggggaactacagtcccagctggctccggagcccgtgcgtgccaggggcgagtggccgtcgcgagacggctcctgcctttcgtgtctctgcagcgtggagactggaaccggcaatttcaaaggacgccacgttcaatcgcagcgctggcgcgggcggaggctaaaacacgggggtcctgagactgaggaaaacgcgccaagttcccctcggtggcggagtgctaaagaccctagcggttcaggcgttcggcgagcggggccgctgcttgttgcgctcytggctctcccggggcgggcgcagatgggcgccgctcccgggatgtagttggtgttggtgcaagrcgggagcgagcggcggtcggggttcccgctcttgggagcggatggtcactcccccgcggggagggcgagccgaccagattttcctggggccggggacccggcgggctcggggcagggactcacctgtcgcacccacactcattcgggttggacttgccggcgtcaccgccgcggacttcgctttgggccatgaccagatataattggtgattacaactttcctctataaattaactcttgacactccttgggatttgaagaaaaaaatgcctggtgtcatacctagtgaaagtaatggactttcaagaggtagcccttcaaagaaaaacagactttccttaaagttttttcagaaaaaggaaactaagagagctttggatttcacagattctcaagaaaatgaagaaaaagcttctgaatatagagcatctgaaattgatcaagttgttcctgcagcacagtcttcacctataaactgtgagaagagagaaaacttgttaccatttgtgggactgaataatctcggcaatacttgctatcttaatagtatacttcaggtattatatttttgtccsggttttaaatctggagtaaagcacttatttaatattatttcaaggaagaaagaagctctaaaggatgaagccaatcaaaaagacaagggaaattgcaaagaagattctttggcaagttatgaattgatatgcagtttacagtccttaatcatttcggttgaacagctccaggctagttttctcttaaatccagagaaatatactgatgaacttgccactcagccaaggcgactgcttaacacactgagggaactcaaccctatgtatgaaggatatctacagcatgatgcacaggaagtattacaatgtattttgggaaacattcaagaaacatgccaactcctaaaaaaagaagaagtaaaaaatgtggcagaattacctactaaggtagaagaaatacctcatccgaaagaggaaatgaatggtattaacagcatagagatggacagtatgaggcattctgaagactttaaagagaaactcccaaaaggaaatgggaaaagaaaaagtgacactgaatttggtaacatgaagaaaaaagttaaattatccaaggaacaccagtcattggaagagaaccagagacaaactagatcaaaaagaaaagctacaagtgatacattagagagtcctcctaaaataattcccaagtatatttctgaaaatgagagtccaagaccctcacaaaagaaatcaagagttaaaataaattggttaaagtctgcaactaagcaacccagcattctttctaaattttgtagtctgggaaaaataacaacaaaccaaggagtcaaaggacaatctaaagaaaatgaatgtgatcctgaagaggacttggggaagtgtgaaagtgataacacaactaatggttgtggacttgaatctccaggaaatactgttacacctgtaaatgttaatgaagttaaacccataaacaaaggtgaagaacaaattggttttgagctagtggagaaattatttcaaggtcagctggtattaaggacgcgttgcttggaatgtgaaagtttaacagaaagaagagaagattttcaagacatcagtgtgccagtacaagaagatgagctttccaaagtagaggagagttctgaaatttctccagagccaaaaacagaaatgaagaccctgagatgggcaatttcacaatttgcttcagtagaaaggattgtaggagaagataaatatttctgtgaaaactgccatcattatactgaagctgaacgaagtcttttgtttgacaaaatgcctgaagttataactattcatttgaagtgctttgctgctagtggtttgga

SEQ ID NO: 4494 - DNA, 4433 bp, Homo sapiens
gtggcccatcccgtctgctctctgtcccgtctcccgacccgtacgcttttccctcaactcgcgcgcacgaatggttaaaaaaagggtgtgaggctcragcccgccagccaggccgctagcacctcgcgcgcgccctcagcgaggacccgcacgagctgcccggctctgtgcctgcgttgtttgaaactgtggaacccgttaggcttttggggaactacagtcccagctggctccggagcccgtgcgtgccaggggcgagtggccgtcgcgagacggctcctgcctttcgtgtctctgcagcgtggagactggaaccggcaatttcaaaggacgccacgttcaatcgcagcgctggcgcgggcggaggctaaaacacgggggtcctgagactgaggaaaacgcgccaagttcccctcggtggcggagtgctaaagaccctagcggttcaggcgttcggcgagcggggccgctgcttgttgcgctcytggctctcccggggcgggcgcagatgggcgccgctcccgggatgtagttggtgttggtgcaagrcgggagcgagcggcggtcggggttcccgctcttgggagcggatggtcactcccccgcggggagggcgagccgaccagattttcctggggccggggacccggcgggctcggggcagggactcacctgtcgcacccacactcattcgggttggacttgccggcgtcaccgccgcggacttcgctttgggccatgaccagatataattggtgattacaactttcctctataaattaactcttgacactccttgggatttgaagaaaaaaatgcctggtgtcatacctagtgaaagtaatggactttcaagaggtagcccttcaaagaaaaacagactttccttaaagttttttcagaaaaaggaaactaagagagctttggatttcacagattctcaagaaaatgaagaaaaagcttctgaatatagagcatctgaaattgatcaagttgttcctgcagcacagtcttcacctataaactgtgagaagagagaaaacttgttaccatttgtgggactgaataatctcggcaatacttgctatcttaatagtatacttcaggtattatatttttgtccsggttttaaatctggagtaaagcacttatttaatattatttcaaggaagaaagaagctctaaaggatgaagccaatcaaaaagacaagggaaattgcaaagaagattctttggcaagttatgaattgatatgcagtttacagtccttaatcatttcggttgaacagctccaggctagttttctcttaaatccagagaaatatactgatgaacttgccactcagccaaggcgactgcttaacacactgagggaactcaaccctatgtatgaaggatatctacagcatgatgcacaggaagtattacaatgtattttgggaaacattcaagaaacatgccaactcctaaaaaaagaagaagtaaaaaatgtggcagaattacctactaaggtagaagaaatacctcatccgaaagaggaaatgaatggtattaacagcatagagatggacagtatgaggcattctgaagactttaaagagaaactcccaaaaggaaatgggaaaagaaaaagtgacactgaatttggtaacatgaagaaaaaagttaaattatccaaggaacaccagtcattggaagagaaccagagacaaactagatcaaaaagaaaagctacaagtgatacattagagagtcctcctaaaataattcccaagtatatttctgaaaatgagagtccaagaccctcacaaaagaaatcaagagttaaaataaattggttaaagtctgcaactaagcaacccagcattctttctaaattttgtagtctgggaaaaataacaacaaaccaaggagtcaaaggacaatctaaagaaaatgaatgtgatcctgaagaggacttggggaagtgtgaaagtgataacacaactaatggttgtggacttgaatctccaggaaatactgttacacctgtaaatgttaatgaagttaaacccataaacaaaggtgaagaacaaattggttttgagctagtggagaaattatttcaaggtcagctggtattaaggacgcgttgcttggaatgtgaaagtttaacagaaagaagagaagattttcaagacatcagtgtgccagtacaagaagatgagctttccaaagtagaggagagttctgaaatttctccagagccaaaaacagaaatgaagaccctgagatgggcaatttcacaatttgcttcagtagaaaggattgtaggagaagataaatatttctgtgaaaactgccatcattatactgaagctgaacgaagtcttttgtttgacaaaatgcctgaagttataactattcatttgaagtgctttgctgctagtggtttggagtttgattgttatggtggtggactttccaagatcaacactcctttattgacacctcttaaattgtcactagaagaatggagcacaaagccaactaacgacagctatggattatttgcggttgtgatgcatagtggcattacaattagtagtgggcattacactgcttctgttaaagtcactgaccttaacagtttagaactagataaaggaaattttgtggttgaccaaatgtgtgaaataggtaagccagaaccattgaatgaggaggaagcaaggggtgtggttgagaattataatgatgaagaagtgtcaattagagttggtggaaatacacagccaagtaaagttttgaacaaaaaaaatgtagaagctattggacttcttggaggacaaaagagcaaagcagattatgagctatacaacaaagcctctaatcctgataaggttgctagtacagcgtttgctgaaaatagaaattctgagactagtgatactactgggacccatgaatctgatagaaacaaggaatccagtgaccaaacaggcattaatattagtggatttgagaacaaaatttcatacgtagtgcaaagcttaaaggagtatgaggggaagtggttgctttttgatgattctgaagtcaaagttactgaagagaaggactttctgaattctctttccccttctacatctcctacttctactccttacttgctattttataagaaattatagagtgagtgtattttccttgtgtatatattaaacacacccatacaaacattgktaaagttgattacatcaaagaatctttagcttatcttttgaagctmctggatattattggtctctctaggtttttayataaatagtgaaatytgaattactgaaaaccatgttaatttttagaactcattttcctcagtagagactagtgatgcattagcttctgggaacaaacttgtatcggttcttaattaaattatccaaaacggaggcatttaaacacttggatttacaccagtcttttgtgtttgctttttaaaataaagtgctcgtatttgtattctccatattttggagtaattatctacatgatgtttatagttcctgtggtttttcacccaagaagcagaatctcattcagtacatttagttttataagagtcatgaagctaaatccttgggctatgtcagaggcacaaagtctagaatgtgtgtattcacaatggtgtatgtacattttgtgccttgattcacttagaagtgtctcagaaaacctggacagttcgcttctacacaagaattttatatgtatttatgaagatgattctgtaccctagtatatctttttgggcatggactaatttgtatctgtttaactcatattctgcacgatctgtatatagtacatcaaacttagaggtgtgaccttaaatttaactttttttaaaaactgggaggtcaataaaatttaaactgcttaactatgtatatgaatatttgaattttttacttgtatatttttataaatacagctgagttttcttaaagcgaataagtgtgtgtatatatatatgtatatatatgagagaataagcatgcataattacctttattactgaatactttctgacagtgcaggagtttttcaaagaggagaaattgtgcttagtccagccaagctgtcatacttaaaagaggtttataatgaaatctgttgcatctaattgtcctttaaagtagacatgatttaatggaatccaaaactggaaaagttaagatgatgctttgggcacacataaaaacttggttaaaatttcattttaaactagtatactgaagtggtaagtgatgaatgatttcatgacttgttaakggacattcttggtactaagtttttcctagaaatgattctaaatatgtaaatgctattgggrtaacactwtaataccccatttcaacaaggagtaccttctcaattaaaaaaaaatc

SEQ ID NO: 4495 - DNA, 3687 bp, Homo sapiens
atataattggtgattacaactttcctctataaattaactcttgacactccttgggatttgaagaaaaaaatgcctggtgtcatacctagtgaaagtaatggactttcaagaggtagcccttcaaagaaaaacagactttccttaaagttttttcagaaaaaggaaactaagagagctttggatttcacagattctcaagaaaatgaagaaaaagcttctgaatatagagcatctgaaattgatcaagttgttcctgcagcacagtcttcacctataaactgtgagaagagagaaaacttgttaccatttgtgggactgaataatctcggcaatacttgctatcttaatagtatacttcaggtattatatttttgtccsggttttaaatctggagtaaagcacttatttaatattatttcaaggaagaaagaagctctaaaggatgaagccaatcaaaaagacaagggaaattgcaaagaagattctttggcaagttatgaattgatatgcagtttacagtccttaatcatttcggttgaacagctccaggctagttttctcttaaatccagagaaatatactgatgaacttgccactcagccaaggcgactgcttaacacactgagggaactcaaccctatgtatgaaggatatctacagcatgatgcacaggaagtattacaatgtattttgggaaacattcaagaaacatgccaactcctaaaaaaagaagaagtaaaaaatgtggcagaattacctactaaggtagaagaaatacctcatccgaaagaggaaatgaatggtattaacagcatagagatggacagtatgaggcattctgaagactttaaagagaaactcccaaaaggaaatgggaaaagaaaaagtgacactgaatttggtaacatgaagaaaaaagttaaattatccaaggaacaccagtcattggaagagaaccagagacaaactagatcaaaaagaaaagctacaagtgatacattagagagtcctcctaaaataattcccaagtatatttctgaaaatgagagtccaagaccctcacaaaagaaatcaagagttaaaataaattggttaaagtctgcaactaagcaacccagcattctttctaaattttgtagtctgggaaaaataacaacaaaccaaggagtcaaaggacaatctaaagaaaatgaatgtgatcctgaagaggacttggggaagtgtgaaagtgataacacaactaatggttgtggacttgaatctccaggaaatactgttacacctgtaaatgttaatgaagttaaacccataaacaaaggtgaagaacaaattggttttgagctagtggagaaattatttcaaggtcagctggtattaaggacgcgttgcttggaatgtgaaagtttaacagaaagaagagaagattttcaagacatcagtgtgccagtacaagaagatgagctttccaaagtagaggagagttctgaaatttctccagagccaaaaacagaaatgaagaccctgagatgggcaatttcacaatttgcttcagtagaaaggattgtaggagaagataaatatttctgtgaaaactgccatcattatactgaagctgaacgaagtcttttgtttgacaaaatgcctgaagttataactattcatttgaagtgctttgctgctagtggtttggagtttgattgttatggtggtggactttccaagatcaacactcctttattgacacctcttaaattgtcactagaagaatggagcacaaagccaactaacgacagctatggattatttgcggttgtgatgcatagtggcattacaattagtagtgggcattacactgcttctgttaaagtcactgaccttaacagtttagaactagataaaggaaattttgtggttgaccaaatgtgtgaaataggtaagccagaaccattgaatgaggaggaagcaaggggtgtggttgagaattataatgatgaagaagtgtcaattagagttggtggaaatacacagccaagtaaagttttgaacaaaaaaaatgtagaagctattggacttcttggaggacaaaagagcaaagcagattatgagctatacaacaaagcctctaatcctgataaggttgctagtacagcgtttgctgaaaatagaaattctgagactagtgatactactgggacccatgaatctgatagaaacaaggaatccagtgaccaaacaggcattaatattagtggatttgagaacaaaatttcatacgtagtgcaaagcttaaaggagtatgaggggaagtggttgctttttgatgattctgaagtcaaagttactgaagagaaggactttctgaattctctttccccttctacatctcctacttctactccttacttgctattttataagaaattatagagtgagtgtattttccttgtgtatatattaaacacacccatacaaacattgktaaagttgattacatcaaagaatctttagcttatcttttgaagctmctggatattattggtctctctaggtttttayataaatagtgaaatytgaattactgaaaaccatgttaatttttagaactcattttcctcagtagagactagtgatgcattagcttctgggaacaaacttgtatcggttcttaattaaattatccaaaacggaggcatttaaacacttggatttacaccagtcttttgtgtttgctttttaaaataaagtgctcgtatttgtattctccatattttggagtaattatctacatgatgtttatagttcctgtggtttttcacccaagaagcagaatctcattcagtacatttagttttataagagtcatgaagctaaatccttgggctatgtcagaggcacaaagtctagaatgtgtgtattcacaatggtgtatgtacattttgtgccttgattcacttagaagtgtctcagaaaacctggacagttcgcttctacacaagaattttatatgtatttatgaagatgattctgtaccctagtatatctttttgggcatggactaatttgtatctgtttaactcatattctgcacgatctgtatatagtacatcaaacttagaggtgtgaccttaaatttaactttttttaaaaactgggaggtcaataaaatttaaactgcttaactatgtatatgaatatttgaattttttacttgtatatttttataaatacagctgagttttcttaaagcgaataagtgtgtgtatatatatatgtatatatatgagagaataagcatgcataattacctttattactgaatactttctgacagtgcaggagtttttcaaagaggagaaattgtgcttagtccagccaagctgtcatacttaaaagaggtttataatgaaatctgttgcatctaattgtcctttaaagtagacatgatttaatggaatccaaaactggaaaagttaagatgatgctttgggcacacataaaaacttggttaaaatttcattttaaactagtatactgaagtggtaagtgatgaatgatttcatgacttgttaakggacattcttggtactaagtttttcctagaaatgattctaaatatgtaaatgctattgggrtaacactwtaataccccatttcaacaaggagtaccttctcaattaaaaaaaaatc

SEQ ID NO: 4496 - DNA, 3955 bp, Homo sapiens
aacggaggcggggcttaccgcgagggcctcgctccggaagccgcacyctccgcggcgtcccaccgtcgaggattaacaaaacgccaaacaagattttaacagtcggcagcgaaagcgcgcactcgagcgccaatgagagcggaaggaggggcaccgcgcctgaggaacactccgtatgtcgaacaatgattggctggagcccacctttcttcttttttgctattagatgggcttgctgctcccgcccatctaattggctttggtctagatataattggtgattacaactttcctctataaattaactcttgacactccttgggatttgaagaaaaaaatgcctggtgtcatacctagtgaaagtaatggactttcaagaggtagcccttcaaagaaaaacagactttccttaaagttttttcagaaaaaggaaactaagagagctttggatttcacagattctcaagaaaatgaagaaaaagcttctgaatatagagcatctgaaattgatcaagttgttcctgcagcacagtcttcacctataaactgtgagaagagagaaaacttgttaccatttgtgggactgaataatctcggcaatacttgctatcttaatagtatacttcaggtattatatttttgtccsggttttaaatctggagtaaagcacttatttaatattatttcaaggaagaaagaagctctaaaggatgaagccaatcaaaaagacaagggaaattgcaaagaagattctttggcaagttatgaattgatatgcagtttacagtccttaatcatttcggttgaacagctccaggctagttttctcttaaatccagagaaatatactgatgaacttgccactcagccaaggcgactgcttaacacactgagggaactcaaccctatgtatgaaggatatctacagcatgatgcacaggaagtattacaatgtattttgggaaacattcaagaaacatgccaactcctaaaaaaagaagaagtaaaaaatgtggcagaattacctactaaggtagaagaaatacctcatccgaaagaggaaatgaatggtattaacagcatagagatggacagtatgaggcattctgaagactttaaagagaaactcccaaaaggaaatgggaaaagaaaaagtgacactgaatttggtaacatgaagaaaaaagttaaattatccaaggaacaccagtcattggaagagaaccagagacaaactagatcaaaaagaaaagctacaagtgatacattagagagtcctcctaaaataattcccaagtatatttctgaaaatgagagtccaagaccctcacaaaagaaatcaagagttaaaataaattggttaaagtctgcaactaagcaacccagcattctttctaaattttgtagtctgggaaaaataacaacaaaccaaggagtcaaaggacaatctaaagaaaatgaatgtgatcctgaagaggacttggggaagtgtgaaagtgataacacaactaatggttgtggacttgaatctccaggaaatactgttacacctgtaaatgttaatgaagttaaacccataaacaaaggtgaagaacaaattggttttgagctagtggagaaattatttcaaggtcagctggtattaaggacgcgttgcttggaatgtgaaagtttaacagaaagaagagaagattttcaagacatcagtgtgccagtacaagaagatgagctttccaaagtagaggagagttctgaaatttctccagagccaaaaacagaaatgaagaccctgagatgggcaatttcacaatttgcttcagtagaaaggattgtaggagaagataaatatttctgtgaaaactgccatcattatactgaagctgaacgaagtcttttgtttgacaaaatgcctgaagttataactattcatttgaagtgctttgctgctagtggtttggagtttgattgttatggtggtggactttccaagatcaacactcctttattgacacctcttaaattgtcactagaagaatggagcacaaagccaactaacgacagctatggattatttgcggttgtgatgcatagtggcattacaattagtagtgggcattacactgcttctgttaaagtcactgaccttaacagtttagaactagataaaggaaattttgtggttgaccaaatgtgtgaaataggtaagccagaaccattgaatgaggaggaagcaaggggtgtggttgagaattataatgatgaagaagtgtcaattagagttggtggaaatacacagccaagtaaagttttgaacaaaaaaaatgtagaagctattggacttcttggaggacaaaagagcaaagcagattatgagctatacaacaaagcctctaatcctgataaggttgctagtacagcgtttgctgaaaatagaaattctgagactagtgatactactgggacccatgaatctgatagaaacaaggaatccagtgaccaaacaggcattaatattagtggatttgagaacaaaatttcatacgtagtgcaaagcttaaaggagtatgaggggaagtggttgctttttgatgattctgaagtcaaagttactgaagagaaggactttctgaattctctttccccttctacatctcctacttctactccttacttgctattttataagaaattatagagtgagtgtattttccttgtgtatatattaaacacacccatacaaacattgktaaagttgattacatcaaagaatctttagcttatcttttgaagctmctggatattattggtctctctaggtttttayataaatagtgaaatytgaattactgaaaaccatgttaatttttagaactcattttcctcagtagagactagtgatgcattagcttctgggaacaaacttgtatcggttcttaattaaattatccaaaacggaggcatttaaacacttggatttacaccagtcttttgtgtttgctttttaaaataaagtgctcgtatttgtattctccatattttggagtaattatctacatgatgtttatagttcctgtggtttttcacccaagaagcagaatctcattcagtacatttagttttataagagtcatgaagctaaatccttgggctatgtcagaggcacaaagtctagaatgtgtgtattcacaatggtgtatgtacattttgtgccttgattcacttagaagtgtctcagaaaacctggacagttcgcttctacacaagaattttatatgtatttatgaagatgattctgtaccctagtatatctttttgggcatggactaatttgtatctgtttaactcatattctgcacgatctgtatatagtacatcaaacttagaggtgtgaccttaaatttaactttttttaaaaactgggaggtcaataaaatttaaactgcttaactatgtatatgaatatttgaattttttacttgtatatttttataaatacagctgagttttcttaaagcgaataagtgtgtgtatatatatatgtatatatatgagagaataagcatgcataattacctttattactgaatactttctgacagtgcaggagtttttcaaagaggagaaattgtgcttagtccagccaagctgtcatacttaaaagaggtttataatgaaatctgttgcatctaattgtcctttaaagtagacatgatttaatggaatccaaaactggaaaagttaagatgatgctttgggcacacataaaaacttggttaaaatttcattttaaactagtatactgaagtggtaagtgatgaatgatttcatgacttgttaakggacattcttggtactaagtttttcctagaaatgattctaaatatgtaaatgctattgggrtaacactwtaataccccatttcaacaaggagtaccttctcaattaaaaaaaaatc

SEQ ID NO: 4497 - DNA, 4017 bp, Homo sapiens
ttgtgacctctaggcttgacagaaagagattggggaaactgatgcaaggcaggtgagccccaaagtggagtttagcccacgagagttcttggctttgtccaggaaagaattcaagggcaagccagagctccccttgcttaagcatcatctgaatccagccccatgtactcttctgaagctcctgttggtacgtgcttgtctaggtcttacatcttctttggggaacagtcmtttacctctacccatcaggcagccttcttgaggagcaggtgcagagagagacaaagctggagcataagatgtgaaaggaagggagaggaagtaggactgatataattggtgattacaactttcctctataaattaactcttgacactccttgggatttgaagaaaaaaatgcctggtgtcatacctagtgaaagtaatggactttcaagaggtagcccttcaaagaaaaacagactttccttaaagttttttcagaaaaaggaaactaagagagctttggatttcacagattctcaagaaaatgaagaaaaagcttctgaatatagagcatctgaaattgatcaagttgttcctgcagcacagtcttcacctataaactgtgagaagagagaaaacttgttaccatttgtgggactgaataatctcggcaatacttgctatcttaatagtatacttcaggtattatatttttgtccsggttttaaatctggagtaaagcacttatttaatattatttcaaggaagaaagaagctctaaaggatgaagccaatcaaaaagacaagggaaattgcaaagaagattctttggcaagttatgaattgatatgcagtttacagtccttaatcatttcggttgaacagctccaggctagttttctcttaaatccagagaaatatactgatgaacttgccactcagccaaggcgactgcttaacacactgagggaactcaaccctatgtatgaaggatatctacagcatgatgcacaggaagtattacaatgtattttgggaaacattcaagaaacatgccaactcctaaaaaaagaagaagtaaaaaatgtggcagaattacctactaaggtagaagaaatacctcatccgaaagaggaaatgaatggtattaacagcatagagatggacagtatgaggcattctgaagactttaaagagaaactcccaaaaggaaatgggaaaagaaaaagtgacactgaatttggtaacatgaagaaaaaagttaaattatccaaggaacaccagtcattggaagagaaccagagacaaactagatcaaaaagaaaagctacaagtgatacattagagagtcctcctaaaataattcccaagtatatttctgaaaatgagagtccaagaccctcacaaaagaaatcaagagttaaaataaattggttaaagtctgcaactaagcaacccagcattctttctaaattttgtagtctgggaaaaataacaacaaaccaaggagtcaaaggacaatctaaagaaaatgaatgtgatcctgaagaggacttggggaagtgtgaaagtgataacacaactaatggttgtggacttgaatctccaggaaatactgttacacctgtaaatgttaatgaagttaaacccataaacaaaggtgaagaacaaattggttttgagctagtggagaaattatttcaaggtcagctggtattaaggacgcgttgcttggaatgtgaaagtttaacagaaagaagagaagattttcaagacatcagtgtgccagtacaagaagatgagctttccaaagtagaggagagttctgaaatttctccagagccaaaaacagaaatgaagaccctgagatgggcaatttcacaatttgcttcagtagaaaggattgtaggagaagataaatatttctgtgaaaactgccatcattatactgaagctgaacgaagtcttttgtttgacaaaatgcctgaagttataactattcatttgaagtgctttgctgctagtggtttggagtttgattgttatggtggtggactttccaagatcaacactcctttattgacacctcttaaattgtcactagaagaatggagcacaaagccaactaacgacagctatggattatttgcggttgtgatgcatagtggcattacaattagtagtgggcattacactgcttctgttaaagtcactgaccttaacagtttagaactagataaaggaaattttgtggttgaccaaatgtgtgaaataggtaagccagaaccattgaatgaggaggaagcaaggggtgtggttgagaattataatgatgaagaagtgtcaattagagttggtggaaatacacagccaagtaaagttttgaacaaaaaaaatgtagaagctattggacttcttggaggacaaaagagcaaagcagattatgagctatacaacaaagcctctaatcctgataaggttgctagtacagcgtttgctgaaaatagaaattctgagactagtgatactactgggacccatgaatctgatagaaacaaggaatccagtgaccaaacaggcattaatattagtggatttgagaacaaaatttcatacgtagtgcaaagcttaaaggagtatgaggggaagtggttgctttttgatgattctgaagtcaaagttactgaagagaaggactttctgaattctctttccccttctacatctcctacttctactccttacttgctattttataagaaattatagagtgagtgtattttccttgtgtatatattaaacacacccatacaaacattgktaaagttgattacatcaaagaatctttagcttatcttttgaagctmctggatattattggtctctctaggtttttayataaatagtgaaatytgaattactgaaaaccatgttaatttttagaactcattttcctcagtagagactagtgatgcattagcttctgggaacaaacttgtatcggttcttaattaaattatccaaaacggaggcatttaaacacttggatttacaccagtcttttgtgtttgctttttaaaataaagtgctcgtatttgtattctccatattttggagtaattatctacatgatgtttatagttcctgtggtttttcacccaagaagcagaatctcattcagtacatttagttttataagagtcatgaagctaaatccttgggctatgtcagaggcacaaagtctagaatgtgtgtattcacaatggtgtatgtacattttgtgccttgattcacttagaagtgtctcagaaaacctggacagttcgcttctacacaagaattttatatgtatttatgaagatgattctgtaccctagtatatctttttgggcatggactaatttgtatctgtttaactcatattctgcacgatctgtatatagtacatcaaacttagaggtgtgaccttaaatttaactttttttaaaaactgggaggtcaataaaatttaaactgcttaactatgtatatgaatatttgaattttttacttgtatatttttataaatacagctgagttttcttaaagcgaataagtgtgtgtatatatatatgtatatatatgagagaataagcatgcataattacctttattactgaatactttctgacagtgcaggagtttttcaaagaggagaaattgtgcttagtccagccaagctgtcatacttaaaagaggtttataatgaaatctgttgcatctaattgtcctttaaagtagacatgatttaatggaatccaaaactggaaaagttaagatgatgctttgggcacacataaaaacttggttaaaatttcattttaaactagtatactgaagtggtaagtgatgaatgatttcatgacttgttaakggacattcttggtactaagtttttcctagaaatgattctaaatatgtaaatgctattgggrtaacactwtaataccccatttcaacaaggagtaccttctcaattaaaaaaaaatk

SEQ ID NO: 4498 - DNA, 8499 bp, Homo sapiens
atcatggttcaacgtgggtcaattttttgtgaatgaggaggggaggttgtggggccgccgccgcggagcaccgtccccgccgccgcccgagcccgagcccgagcccgcgcacccgcccgcgccgccgccgccgccgcccgaacagcctcccagcctgggcccccggcggcgccgtggccgcgtcccggctgtcgccgcccgagcccgagcccgcgcgccggcgggtggcggcgcaggctgaggagatgcggcgcggagcgccggagcagggctagagccggccgccgccgcccgccgcggtaagcgcagccccggcccggcgcccgcgggccattgtccgccgcccgccccgcgccccgcgcagcctgcaggccttggagcccgcggcaggtggacgccgccggtccacacccgccccgcgcgcggccgtgggaggcgggggccagcgctggccgcgcgccgtgggacccgccggtccccagggccgcccggccccttctggacctttccacccgcgccgcgaggcggcttcgcccgccggggcgggggcgcgggggtgggcacggcaggcagcggcgccgtctcccggtgcggggcccgcgccccccgagcaggttcatctgcagaagccagcggacgcctctgttcaacttgtgggttacctggctcatgagaccttgccggcgaggctcggcgcttgaacgtctgtgacccagccctcaccgtcccggtacttgtatgtgttggtgggagtttggagctcgttggagctatcgtttccgtggaaattttgagccatttcgaatcacttaaaggagtggacattgctagcaatgagctcccaaagccatccagatggactttctggccgagaccagccagtggagctgctgaatcctgcccgcgtgaaccacatgcccagcacggtggatgtggccacggcgctgcctctgcaagtggccccctcggcagtgcccatggacctgcgcctggaccaccagttctcactgcctgtggcagagccggccctgcgggagcagcagctgcagcaggagctcctggcgctcaagcagaagcagcagatccagaggcagatcctcatcgctgagttccagaggcagcacgagcagctctcccggcagcaygaggcgcagctccacgagcacatcaagcaacaacaggagatgctggccatgaagcaccagcaggagctgctggaacaccagcggaagctggagaggcaccgccaggagcaggagctggagaagcagcaccgggagcagaagctgcagcagctcaagaacaaggagaagggcaaagagagtgccgtggccagcacagaagtgaagatgaagttacaagaatttgtcctcaataaaaagaaggcgctggcccaccggaatctgaaccactgcatttccagcgaccctcgctactggtacgggaaaacgcagcacagttcccttgaccagagttctccaccccagagcggagtgtcgacctcctataaccacccggtcctgggaatgtacgacgccaaagatgacttccctcttaggaaaacagcttctgaaccgaatctgaaattacggtccaggctaaagcagaaagtggccgaaagacggagcagccccytgttacgcaggaaagacgggccagtggtcactgctctaaaaaagcgtccgttggatgtcacagactccgcgtgcagcagcgccccaggctccggacccagctcacccaacaacagctccgggagcgtcagcgcggagaacggtatcgcgcccgccgtccccagcatcccggcggagacgagtttggcgcacagacttgtggcacgagaaggctcggccgctccacttcccctctacacatcgccatccttgcccaacatcacgctgggcctgcctgccaccggcccctctgcgggcacggcgggccagcaggacgccgagagactcacccttcccgccctccagcagaggctctcccttttccccggcacccacctcactccctacctgagcacctcgcccttggagcgggacggaggggcagcgcacagccctcttctgcagcacatggtcttactggagcagccrccggcacaagcacccctcgtcacaggcctgggagcactgcccctccacgcacagtccttggttggtgcagaccgggtgtccccctccatccacaagctgcggcagcaccgcccactggggcggacccagtcggccccgctgccccagaacgcccaggctctgcagcacctggtcatccagcagcagcatcagcagtttctggagaaacacaagcagcagttccagcagcagcaactgcagatgaacaagatcatccccaagccaagcgagccagcccggcagccggagagccacccggaggagacggaggaggagctccgtgagcaccaggctctgctggacgagccctacctggaccggctgccggggcagaaggaggcgcaygcacaggccggcgtgcaggtgaagcaggagcccattgagagcgatgaggaagaggcagagcccccacgggaggtggagccgggccagcgccagcccagtgagcaggagctgctcttcagacagcaagccctcctgctggagcagcagcggatccaccagctgaggaactaccaggcgtccatggaggccgccggcatccccgtgtccttcggcggccacaggcctctgtcccgggcgcagtcctcacccgcgtctgccaccttccccgtgtctgtgcaggagccccccaccaagccgaggttcacgacaggcctcgtgtatgacacgctgatgctgaagcaccagtgcacctgcgggagtagcagcagccaccccgagcacgccgggaggatccagagcatctggtcccgcctgcaggagacgggcctccggggcaaatgcgagtgcatccgcggacgcaaggccaccctggaggagctacagacggtgcactcrgaagcccacaccctcctgtatggcacgaaccccctcaaccggcagaaactggacagtaagaaacttctaggctcgctcgcctccgtgttcgtccggctcccttgcggtggtgttggggtggacagtgacaccatatggaacgaggtgcactcggcgggggcagcccgcctggctgtgggctgcgtggtagagctggtcttcaagrtggccacaggggagctgaagaatggctttgctgtggtccgcccccctggacaccatgcggaggagagcacgcccatgggcttttgctacttcaactccgtggccgtggcagccaagcttctgcagcagaggttgagcgtgagcaagatcctcatcgtggactgggacgtgcaccatggaaacgggacccagcaggctttctacagcgacccyagcgtcctgtacatgtccctccaccgctacgacgatgggaacttcttcccaggcagcggggctcctgatgaggtgggcacagggcccggcgtgggtttcaacgtcaacatggctttcaccggcggcctggacccccccatgggagacgctgagtacttggcggccttcagaacggtggtcatgccgatcgccagcgagtttgccccggatgtggtgctggtgtcatcaggcttcgatgccgtggagggccaccccacccctcttgggggctacaacctctccgccagatgcttcgggtacctgacgaagcagctgatgggcctggctggyggccggattgtcctggccctcgagggaggccacgacctgaccgccatttgcgacgcctcggaagcatgtgtttctgccttgctgggaaacgagcttgatcctctcccagaaaaggttttacagcaaagacccaatgcaaacgctgtccgttccatggagaaagtcatggagatccacagcaagtactggcgctgcctgcagcgcacaacctccacagcggggcgttctctgatcgaggctcagacttgcgagaacgaagaagccgagacggtcaccgccatggcctcgctgtccgtgggcgtgaagcccgccgaaaagagaccagatgaggagcccatggaagaggagccgcccctgtagcactccctcgaagctgctgttctcttgtctgtctgtctctgtcttgaagctcagccaagaaactttcccgtgtcaygcctgcgtcccaccgtggggctctcttggagcacccagggacacccagcgtgcaacagccacgggaagcctttctgccgcccaggcccacaggtctcgagacgcacatgcacgcctgggcgtggcagcctcacagggaacacgggacagacgccggcgacgcgcagacacacggacacgcggaagccaagcacactctggcgggtcccgcaagggacgccgtggaagaaaggagcctgtggcaacaggcggccgagctgccgaattcagttgacacgaggcacagaaaacaaatatcaaagatctaataatacaaaacaaacttgattaaaactggtgcttaaagtttattacccacaactccacagtctctgtgtaaaccactcgactcatcttgtagcttatttttttttaaagaggacgttttctacggctgtggcccgcctctgtgaaccatagcggtgtgcggcggggggtctgcacccgggtgggggacagagggacctttaaagaaaacaaaactggacagaaacaggaatgtgagctgggggagctggcttgagtttctcaaaagccatcggaagatgcgagtttgtgcctttttttttattgctctggtggatttttgtggctgggttttctgaagtctgaggaacaatgccttaagaaaaaacaaacagcaggaatcggtgggacagtttcctgtggccagccgagcctggcagtgctggcaccgcgagctggcctgaygcctcaagcacgggcaccagccgtcatctccggggccaggggctgcagcccggcggtccctgttttgctttattgctgtttaagaaaaatggaggtagttccaaaaaagtggcaaatcccgttggaggttttgaagtccaacaaattttaaacgaatccaaagtgttctcacacgtcacatacgattgagcatctccatctggtcgtgaagcatgtggtaggcacacttgcagtgttacgatcggaatgctttttattaaaagcaagtagcatgaagtattgcttaaattttaggtataaataaatatatatatgtataatatatattccaatgtattccaagctaagaaacttacttgattcttatgaaatcttgataaaatatttataatgcatttatagaaaaagtatatatatatatataaaatgaatgcagattgcgaaggtccctgcaaatggatggcttgtgaatttgctctcaaggtgcttatggaaagggatcctgattgattgaaattcatgttttctcaagctccagattggctagatttcagatcgccaacacattcgccactgggcaactaccctacaagtttgtactttcattttaattattttctaacagaaccgctcccgtctccaagccttcatgcacatatgtacctaatgagtttttatagcaaagaatataaatttgctgttgatttttgtatgaattttttcacaaaaagatcctgaataagcattgttttatgaattttacatttttcctcaccatttagcaattttctgaatggtaataatgtctaaatctttttcctttctgaattcttgcttgtacatttttttttacctttcaaaggtttttaattatttttgtttttatttttgtacgatgagttttctgcagcgtacagaattgttgctgtcagattctattttcagaaagtgagaggagggaccgtaggtcttttcggagtgacaccaacgattgtgtctttcctggtctgtcctaggagctgtataaagaagcccaggggctctttttaactttcaacactagtagtattacgaggggtggtgtrtttttcccctccgtggcaagggcagggagggttgcttaggatgcccggccaccctgggaggcttgccagatgccgggggcagtcagcattaatgaaactcatgtttaaacttctctgaccacatcgtcaggatagaattctaacttgagttttccaaagaccttttgagcatgtcagcaatgcatggggcacacgtggggctctttacccacttgggtttttccactgcagccacgtggccagccctggattttggagcctgtggctgcaaggaacccagggacccttgttgcctggtgaacctgcagggagggtatgattgcctgaccaggacagccagtctttactctttttctcttcaacagtaactgacagtcacgttttactggtaacttattttccagcacatgaagccaccagtttcattccaaagtgtatattgggttcagacttgggggcagaagttcagacacaccgtgctcaggagggacccagagccgagtttcggagtttggtaaagtttacagggtagcttctgaaattaactcaaacttttgaccaaatgagtgcagattcttggattcacttggtcactgggctgctgatggtcagctctgagacagtggtttgagagcaggcagaacggtcttgggacttgtttgactttcccctccctggtggccactctttgctctgaagcccagattggcaagaggagctggtccattccccattcatggcacagagcagtggcagggcccagctagcaggctcttctggcctccttggcctcattctctgcatagccctctggggatcctgccacctgccctcttaccccgccgtggcttatggggaggaatgcatcatctcactttttttttttaagcagatgatgggataacatggactgctcagtggccaggttatcagtggggggacttaattctaatctcattcaaatggagacgccctctgcaaaggcctggcagggggaggcaygtttcatctgtcagctcactccagcttcacaaatgtgctgagagcattactgtgtagccttttctttgaagacacactcggctcttctccacagcaagcgtccagggcagatggcagaggatctgcctcggcgtctgcaggcgggaccacgtcagggagggttccttcatgtgttctccctgtgggtccttggacctttagcctttttcttcctttgcaaaggccttgggggcactggctgggagtcagcaagcgagcactttatatccctttgagggaaaccctgatgacgccactgggcctcttggcgtctgccctgccctcgcggcttcccgccgtgccgcagcgtgcccacgtgcccacgccccaccagcaggcggctgtcccggaggccgtggcccgctgggactggccgcccctccccagcgtcccagggctctggttctggagggccactttgtcaaggtgtttcagtttttctttacttcttttgaaaatctgtttgcaaggggaaggaccatttcgtaatggtctgacacaaaagcaagtttgatttttgcagcactagcaatggactttgttgtttttctttttgatcagaacattccttctttactggtcacagccacgtgctcattccattcttctttttgtagactttgggcccacgtgttttatgggcattgatacatatataaatatatagatataaatatatatgaatatatttttttaagtttcctacacctggaggttgcatggactgtacgaccggcatgactttatattgtatacagattttgcacgccaaactcggcagctttggggaagaagaaaaatgcctttctgttcccctctcatgacatttgcagatacaaaagatggaaatttttctgtaaaacaaaaccttgaaggagaggagggcggggaagtttgcgtcttattgaacttattcttaagaaattgtactttttattgtaagaaaaataaaaaggactacttaaacatttgtcatattaagaaaaaaagtttatctagcacttgtgacataccaataatagagtttattgtatttatgtggaaacagtgttttagggaaactactcagaattcacagtgaactgcctgtctctctcgagttgatttggaggaattttgttttgttttgttttgtttgtttccttttatctccttccacgggccaggcgagcgccgcccgccctcactggycttgtgacggtttawtctgattgagaactgggcggactygaaagagtccccttttccgcacagctgtgttgactttttaattacttttaggtgatgtatggctaagatttcactttaagcagtcgtgaactgtgcgagcactgtggtttacaattatactttgcatcgaaaggaaaccatttcttcattgtaacgaagctgagcgkgttcttagctcggcctcactttgtctctggcattgattaaaagtctgctattgaaagaaaaag

SEQ ID NO: 4499 - DNA, 5125 bp, Homo sapiens
cagggcagttccctcagctccgggttggagccggagccggagccggatcccgcgcacaccgccacgtcaacctaaacctacaccgccctctccaccccaccgccgcagcgcccgctgggcccgcagcgggtctccccaggcagcgtcctccacgcctttcccacaatgctccgcgccaggccccgccccggctcgccgtggagaccggcgcgtgaggaacctaccggtaccggccgcgcgctggtagtcgccggtgtggctgcacctcaccaatcccgtgcgccgcggctgggccgtcggagagtgcgtgtgcttctctcctgcacgcggtgcttgggctcggccaggcggggtccgccgccagggtttgaggatgggggagtagctacaggaagcgaccccgcgatggcaaggtatatttttgtggaatgaaaaggaagtattagaaatgagctgaagaccattcacagattaatatttttggggacagatttgtgatgcttgattcacccttgaagtaatgtagacagaagttctcaaatttgcatattacatcaactggaaccagcagtgaatcttaatgttcacttaaatcagaacttgcataagaaagagaatgggagtctggttaaataaagatgactatatcagagacttgaaaaggatcattctctgttttctgatagtgtatatggccattttagtgggcacagatcaggatttttacagtttacttggagtgtccaaaactgcaagcagtagagaaataagacaagctttcaagaaattggcattgaagttacatcctgataaaaacccgaataacccaaatgcacatggcgattttttaaaaataaatagagcatatgaagtactcaaagatgaagatctacggaaaaagtatgacaaatatggagaaaagggacttgaggataatcaaggtggccagtatgaaagctggaactattatcgttatgattttggtatttatgatgatgatcctgaaatcataacattggaaagaagagaatttgatgctgctgttaattctggagaactgtggtttgtaaatttttactccccaggctgttcacactgccatgatttagctcccacatggagagactttgctaaagaagtggatgggttacttcgaattggagctgttaactgtggtgatgatagaatgctttgccgaatgaaaggagtcaacagctatcccagyctcttcatttttcggtctggaatggccccagtgaaatatcatggagacagatcaaaggagagtttagtgagttttgcaatgcagcatgttagaagtacagtgacagaactttggacaggaaattttgtcaactccatacaaactgcttttgctgctggtattggctggctgatcactttttgttcaaaaggaggagattgtttgacttcacagacacgactcaggcttagtggcatgttggatggtcttgttaatgtaggatggatggactgtgccacccaggataacctytgtaaaagcttagatattacaacaagtactactgcttattttcctcctggagccactttaaataacaaagagaaaaacagtattttgtttctcaactcattggatgctaaagaaatatatttggaagtaatacataatcttccagattttgaactactttcggcaaacacactagaggatcgtttggctcatcatcggtggctgttattttttcattttggaaaaaatgaaaattcaaatgatcctgagctgaaaaaactaaaaactctacttaaaaatgatcatattcaagttggcaggtttgactgttcctctgcaccagacatctgtagtaatctgtrtgtttttcagccgtctctagcagtatttaaaggacaaggaaccaaagaatatgaaattcatcatggaaagaagattctatatgatatacttgcctttgccaaagaaagtgtgaattctcatgttaccacgcttggacctcaraattttcctgccaatgacaaagaaccatggcttgttgatttctttgccccctggtgtccaccatgtcgagctttactaccagagttacgaagagcatcaaatcttctttatggtcagcttaagtttggtacactagattgtacagttcatgagggactctgtaacatgtataacattcaggcttatccaacaacagtggtattcaaccagtccaacattcatgagtatgaaggacatcactctgctgaacaaatcttggagttcatagaggatcttatgaatccttcagtggtctcccttacacccaccaccttcaacgaactagttacacaaagaaaacacaacgaagtctggatggttgatttctattctccgtggtgtcatccttgccaagtcttaatgccagaatggaaaagaatggcccggacattaactggactgatcaacgtgggcagtatagattgccaacagtatcattctttttgtgcccaggaaaacgttcaaagataccctgagataagattttttcccccaaaatcaaataaagcttatcaktatcacagttacaatggttggaatagggatgcttattccctgagaatctggggtctaggatttttacctcaagtatccacagatctaacacctcagactttcagtgaaaaagttctacaagggaaaaatcattgggtgattgatttctatsctccttggtgtggaccttgccagaattttgctccagaatttgagctcttggctaggatgattaaaggaaaagtgaaagctggaaaagtagactgtcaggcttatgctcagacatgccagaaagctgggatcagggcctatccaactgttaarttttatttctacgaaagagcaaagagaaattttcaagaagagcagataaataccagagatgcaaaagcaatcgctgccttaataagtgaaaaattggaaactctccgaaatcaaggcaagaggaataaggatgaactttgataatgttgaagatgaagaaaaagtttaaaagaaattctgacagatgacatcagaagacacctatttagaatgttacatttatgatgggaatgaatgaacattatcttagacttgcagttgtactgccagaattatctacagcactgstgtaaaagaagggtctgcaaactttttctgtaaagggccggtttataaatattttagactttgcaggctataatatatggttcacacatgagaacaagaatagagtcatcatgtattctttgttatttgcttttaacaacctttaaaaaatattaaaacgattcttagctcagagccatacaaaagtaggctggattcagtccatggaccatagattgctgtccccctcgacggacttataatgtttcaggtggctggcttgaacatgagtctgctgtgctatctacataaatgtctaagttgtataaagtccactttcccttcacgttttttggctgacctgaaaagaggtaacttagtttttggtcacttgttctcctaaaaatgctatccctaaccatatatttatatttcgttttaaaaacacccatgatgtggcacagtaaacaaaccctgttatgctgtattattatgaggagattcttcattgttttctttccttctcaaaggttgaaaaaatgcttttaatttttcacagccgagaaacagtgcagcagtatatgtgcacacagtaagtacacaaatttgagcaacagtaagtgcacaaattctgtagtttgcygtatcatccaggaaaacctgagggaaaaaaattatagcaattaactgggcattgtagagtatcctaaatatgttatcaagtatttagagttctatattttaaagatatatgtgttcatgtattttctgaaattgctttcatagaaattttcccactgatagttgatttttgaggcatctaatatttacatatttgccttctgaactttgttttgacctgtatcctttatttacattgggtttttctttcrtagttttggtttttcactcctgtccagtctatttattattcaaataggaaaaattactttacaggttgttttactgtagcttataatgatactgtagttattccagttactagtttactgtcagagggctgcctttttcagataaatattgacataataactgaagttatttttataagaaaatcaagtatataaatctaggaaagggatcttctagtttctgtgttgtttagactcaaagaatcacaaatttgtcagtaacatgtagttgtttagttataattcagagtgtacagaatggtaaaaattccaatcagtcaaaagaggtcaatgaattaaaaggcttgcaactttttcaaaaacctgttagaatatgctttattgtgttttgaggagttttcctttttttcttttcaatatcactttatcctgctcaccagtatttcctcataagggttattatagccataattaatgttaaaatagactttgttcttcatattctcccatctttttcgctactatatactctgtctggattctgctgtatgcctgttggcatatatggaacagtcaccacttgtcacacttaacaccagctttttgaattatgatcagtaatggcaagagcctttcattctcgaatgtttaaagcctaggagttctacaaaattggcttctttctacaagaatcccaaaatggaatgcctaaagaagtcttacttgggtaaatacttactaaaatatactggttatgtgcatatcaccacactggacactgaggagtgttcaaaaggaatctaagacatggtccccatcttccaactgtctgtaattcactgttttgtcattgagctcataaggtacttacattactacctataaatgtttcctgtacttgttagttgttgagaaacattttaggcagtaaataaaatagtaaatattatgtgtcctataatttgacctaagctgtgtgcctttggaatcagctctaagccagggcccccygggagtcatgttaagwaacacgtatcataaagtgacatacatcaaggttatcttatatagtcataacagtattattgggtctttcaaaaacagctgg

SEQ ID NO: 4500 - DNA, 3209 bp, Homo sapiens
cagggcagttccctcagctccgggttggagccggagccggagccggatcccgcgcacaccgccacgtcaacctaaacctacaccgccctctccaccccaccgccgcagcgcccgctgggcccgcagcgggtctccccaggcagcgtcctccacgcctttcccacaatgctccgcgccaggccccgccccggctcgccgtggagaccggcgcgtgaggaacctaccggtaccggccgcgcgctggtagtcgccggtgtggctgcacctcaccaatcccgtgcgccgcggctgggccgtcggagagtgcgtgtgcttctctcctgcacgcggtgcttgggctcggccaggcggggtccgccgccagggtttgaggatgggggagtagctacaggaagcgaccccgcgatggcaaggtatatttttgtggaatgaaaaggaagtattagaaatgagctgaagaccattcacagattaatatttttggggacagatttgtgatgcttgattcacccttgaagtaatgtagacagaagttctcaaatttgcatattacatcaactggaaccagcagtgaatcttaatgttcacttaaatcagaacttgcataagaaagagaatgggagtctggttaaataaagatgactatatcagagacttgaaaaggatcattctctgttttctgatagtgtatatggccattttagtgggcacagatcaggatttttacagtttacttggagtgtccaaaactgcaagcagtagagaaataagacaagctttcaagaaattggcattgaagttacatcctgataaaaacccgaataacccaaatgcacatggcgattttttaaaaataaatagagcatatgaagtactcaaagatgaagatctacggaaaaagtatgacaaatatggagaaaagggacttgaggataatcaaggtggccagtatgaaagctggaactattatcgttatgattttggtatttatgatgatgatcctgaaatcataacattggaaagaagagaatttgatgctgctgttaattctggagaactgtggtttgtaaatttttactccccaggctgttcacactgccatgatttagctcccacatggagagactttgctaaagaagtggatgggttacttcgaattggagctgttaactgtggtgatgatagaatgctttgccgaatgaaaggagtcaacagctatcccagyctcttcatttttcggtctggaatggccccagtgaaatatcatggagacagatcaaaggagagtttagtgagttttgcaatgcagcatgttagaagtacagtgacagaactttggacaggaaattttgtcaactccatacaaactgcttttgctgctggtattggctggctgatcactttttgttcaaaaggaggagattgtttgacttcacagacacgactcaggcttagtggcatgttggatggtcttgttaatgtaggatggatggactgtgccacccaggataacctytgtaaaagcttagatattacaacaagtactactgcttattttcctcctggagccactttaaataacaaagagaaaaacagtattttgtttctcaactcattggatgctaaagaaatatatttggaagtaatacataatcttccagattttgaactactttcggcaaacacactagaggatcgtttggctcatcatcggtggctgttattttttcattttggaaaaaatgaaaattcaaatgatcctgagctgaaaaaactaaaaactctacttaaaaatgatcatattcaagttggcaggtttgactgttcctctgcaccagacatctgtagtaatctgtrtgtttttcagccgtctctagcagtatttaaaggacaaggaaccaaagaatatgaaattcatcatggaaagaagattctatatgatatacttgcctttgccaaagaaagtgtgaattctcatgttaccacgcttggacctcaraattttcctgccaatgacaaagaaccatggcttgttgatttctttgccccctggtgtccaccatgtcgagctttactaccagagttacgaagagcatcaaatcttctttatggtcagcttaagtttggtacactagattgtacagttcatgagggactctgtaacatgtataacattcaggcttatccaacaacagtggtattcaaccagtccaacattcatgagtatgaaggacatcactctgctgaacaaatcttggagttcatagaggatcttatgaatccttcagtggtctcccttacacccaccaccttcaacgaactagttacacaaagaaaacacaacgaagtctggatggttgatttctattctccgtggtgtcatccttgccaagtcttaatgccagaatggaaaagaatggcccggacattaactggactgatcaacgtgggcagtatagattgccaacagtatcattctttttgtgcccaggaaaacgttcaaagataccctgagataagattttttcccccaaaatcaaataaagcttatcaktatcacagttacaatggttggaatagggatgcttattccctgagaatctggggtctaggatttttacctcaagtatccacagatctaacacctcagactttcagtgaaaaagttctacaagggaaaaatcattgggtgattgatttctatsctccttggtgtggaccttgccagaattttgctccagaatttgagctcttggctaggatgattaaaggaaaagtgaaagctggaaaagtagactgtcaggcttatgctcagacatgccagaaagctgggatcagggcctatccaactgttaarttttatttctacgaaagagcaaagagaaattttcaagaagagcagataaataccagagatgcaaaagcaatcgctgccttaataagtgaaaaattggaaactctccgaaatcaaggcaagaggaataaggtatggactaagcctagagttgactttggcaaaagttggcaaaagttagcaaaatctatttttcctatacattacatgcatccagagacaacaaaatgaggcatcaaaaaatagtaagatagctgaaaattctactttgggaaataggacaatcaaaatgtagcctagacactgaaatgcttttaaaaatttggacaagtaaamccacttaacaaaaaatagt

SEQ ID NO: 4501 - DNA, 4987 bp, Homo sapiens
cagggcagttccctcagctccgggttggagccggagccggagccggatcccgcgcacaccgccacgtcaacctaaacctacaccgccctctccaccccaccgccgcagcgcccgctgggcccgcagcgggtctccccaggcagcgtcctccacgcctttcccacaatgctccgcgccaggccccgccccggctcgccgtggagaccggcgcgtgaggaacctaccggtaccggccgcgcgctggtagtcgccggtgtggctgcacctcaccaatcccgtgcgccgcggctgggccgtcggagagtgcgtgtgcttctctcctgcacgcggtgcttgggctcggccaggcggggtccgccgccagggtttgaggatgggggagtagctacaggaagcgaccccgcgatggcaaggtatatttttgtggaatgaaaaggaagtattagaaatgagctgaagaccattcacagattaatatttttggggacagatttgtgatgcttgattcacccttgaagtaatgtagacagaagttctcaaatttgcatattacatcaactggaaccagcagtgaatcttaatgttcacttaaatcagaacttgcataagaaagagaatgggagtctggttaaataaagatgactatatcagagacttgaaaaggatcattctctgttttctgatagtgtatatggccattttagtgggcacagatcaggatttttacagtttacttggagtgtccaaaactgcaagcagtagagaaataagacaagctttcaagaaattggcattgaagttacatcctgataaaaacccgaataacccaaatgcacatggcgattttttaaaaataaatagagcatatgaagtactcaaagatgaagatctacggaaaaagtatgacaaatatggagaaaagggacttgaggataatcaaggtggccagtatgaaagctggaactattatcgttatgattttggtatttatgatgatgatcctgaaatcataacattggaaagaagagaatttgatgctgctgttaattctggagaactgtggtttgtaaatttttactccccaggctgttcacactgccatgatttagctcccacatggagagactttgctaaagaagtggatgggttacttcgaattggagctgttaactgtggtgatgatagaatgctttgccgaatgaaaggagtcaacagctatcccagyctcttcatttttcggtctggaatggccccagtgaaatatcatggagacagatcaaaggagagtttagtgagttttgcaatgcagcatgttagaagtacagtgacagaactttggacaggaaattttgtcaactccatacaaactgcttttgctgctggtattggctggctgatcactttttgttcaaaaggaggagattgtttgacttcacagacacgactcaggcttagtggcatgttgtttctcaactcattggatgctaaagaaatatatttggaagtaatacataatcttccagattttgaactactttcggcaaacacactagaggatcgtttggctcatcatcggtggctgttattttttcattttggaaaaaatgaaaattcaaatgatcctgagctgaaaaaactaaaaactctacttaaaaatgatcatattcaagttggcaggtttgactgttcctctgcaccagacatctgtagtaatctgtrtgtttttcagccgtctctagcagtatttaaaggacaaggaaccaaagaatatgaaattcatcatggaaagaagattctatatgatatacttgcctttgccaaagaaagtgtgaattctcatgttaccacgcttggacctcaraattttcctgccaatgacaaagaaccatggcttgttgatttctttgccccctggtgtccaccatgtcgagctttactaccagagttacgaagagcatcaaatcttctttatggtcagcttaagtttggtacactagattgtacagttcatgagggactctgtaacatgtataacattcaggcttatccaacaacagtggtattcaaccagtccaacattcatgagtatgaaggacatcactctgctgaacaaatcttggagttcatagaggatcttatgaatccttcagtggtctcccttacacccaccaccttcaacgaactagttacacaaagaaaacacaacgaagtctggatggttgatttctattctccgtggtgtcatccttgccaagtcttaatgccagaatggaaaagaatggcccggacattaactggactgatcaacgtgggcagtatagattgccaacagtatcattctttttgtgcccaggaaaacgttcaaagataccctgagataagattttttcccccaaaatcaaataaagcttatcaktatcacagttacaatggttggaatagggatgcttattccctgagaatctggggtctaggatttttacctcaagtatccacagatctaacacctcagactttcagtgaaaaagttctacaagggaaaaatcattgggtgattgatttctatsctccttggtgtggaccttgccagaattttgctccagaatttgagctcttggctaggatgattaaaggaaaagtgaaagctggaaaagtagactgtcaggcttatgctcagacatgccagaaagctgggatcagggcctatccaactgttaarttttatttctacgaaagagcaaagagaaattttcaagaagagcagataaataccagagatgcaaaagcaatcgctgccttaataagtgaaaaattggaaactctccgaaatcaaggcaagaggaataaggatgaactttgataatgttgaagatgaagaaaaagtttaaaagaaattctgacagatgacatcagaagacacctatttagaatgttacatttatgatgggaatgaatgaacattatcttagacttgcagttgtactgccagaattatctacagcactgstgtaaaagaagggtctgcaaactttttctgtaaagggccggtttataaatattttagactttgcaggctataatatatggttcacacatgagaacaagaatagagtcatcatgtattctttgttatttgcttttaacaacctttaaaaaatattaaaacgattcttagctcagagccatacaaaagtaggctggattcagtccatggaccatagattgctgtccccctcgacggacttataatgtttcaggtggctggcttgaacatgagtctgctgtgctatctacataaatgtctaagttgtataaagtccactttcccttcacgttttttggctgacctgaaaagaggtaacttagtttttggtcacttgttctcctaaaaatgctatccctaaccatatatttatatttcgttttaaaaacacccatgatgtggcacagtaaacaaaccctgttatgctgtattattatgaggagattcttcattgttttctttccttctcaaaggttgaaaaaatgcttttaatttttcacagccgagaaacagtgcagcagtatatgtgcacacagtaagtacacaaatttgagcaacagtaagtgcacaaattctgtagtttgcygtatcatccaggaaaacctgagggaaaaaaattatagcaattaactgggcattgtagagtatcctaaatatgttatcaagtatttagagttctatattttaaagatatatgtgttcatgtattttctgaaattgctttcatagaaattttcccactgatagttgatttttgaggcatctaatatttacatatttgccttctgaactttgttttgacctgtatcctttatttacattgggtttttctttcrtagttttggtttttcactcctgtccagtctatttattattcaaataggaaaaattactttacaggttgttttactgtagcttataatgatactgtagttattccagttactagtttactgtcagagggctgcctttttcagataaatattgacataataactgaagttatttttataagaaaatcaagtatataaatctaggaaagggatcttctagtttctgtgttgtttagactcaaagaatcacaaatttgtcagtaacatgtagttgtttagttataattcagagtgtacagaatggtaaaaattccaatcagtcaaaagaggtcaatgaattaaaaggcttgcaactttttcaaaaacctgttagaatatgctttattgtgttttgaggagttttcctttttttcttttcaatatcactttatcctgctcaccagtatttcctcataagggttattatagccataattaatgttaaaatagactttgttcttcatattctcccatctttttcgctactatatactctgtctggattctgctgtatgcctgttggcatatatggaacagtcaccacttgtcacacttaacaccagctttttgaattatgatcagtaatggcaagagcctttcattctcgaatgtttaaagcctaggagttctacaaaattggcttctttctacaagaatcccaaaatggaatgcctaaagaagtcttacttgggtaaatacttactaaaatatactggttatgtgcatatcaccacactggacactgaggagtgttcaaaaggaatctaagacatggtccccatcttccaactgtctgtaattcactgttttgtcattgagctcataaggtacttacattactacctataaatgtttcctgtacttgttagttgttgagaaacattttaggcagtaaataaaatagtaaatattatgtgtcctataatttgacctaagctgtgtgcctttggaatcagctctaagccagggcccccygggagtcatgttaagwaacacgtatcataaagtgacatacatcaaggttatcttatatagtcataacagtattattgggtctttcaaaaacagctgg

SEQ ID NO: 4502 - DNA, 3564 bp, Homo sapiens
  misc_feature (1)...(3564): n = A,T,C or G
gtcagactcgattccccctcttcctcctcctcaagggaaagctgcccacttctagctgccctgccatcccctttaaagggcgacttgctcagcgccaaaccgcggctccagccctctccagcctccggctcagccggctcatcagtcggtccgcgccttgcagctcctccagagggacgcgccccgagatggagagcaaagccctgctcgtgctgactctggccgtgtgrctccagagtctgaccgcctcccgcggaggggtggccgccgccgaccaaagaagagattttatcracatcgaaagtaaatttgccctaaggacccctgaagacacagctgaggacacttgccacctcattcccggagtagcagagtccgtggctacctgtcatttcartcacagcagcaaaaccttcatggtgatccatggctggacggtaacaggaatgtawgagagttrggtgccaaaacttgtggccrccctgtamaagagmgaaccagactccaatgtcattgtggtggacbggctgtcacgggctcaggagcattacccagtgtccrcgggctacrccaaactggtgggacaggatgtngcccggtttatcaactggatggaggaggartttaactaccctctggacaatgtccatctcttgggatacagccttggagcccrtgctgctrgcattgcaggaagtctgaccaataagaaagtcaacagaattactrkcctcvrtcsarctggacctaactttgagtatgcagaagccccgagtcgtctttstcctgatgatrcagattttgtagasrtcttasasacattcaccagarrgtcccctggtcgamgcaytgraatccagaaaccagttgggcatgttgasakttaccygaatggaggtacttttcagccaggawgtaacattggagaagctatccgcgtgaytgcagagagaggacttggagatgtggaccagctagtgaagtgctcccacgagcgctccattcatctcttcaycractstskgttgaatgaagaaaatccargwaagrccyacaggtgmagtyccaaggaagccttkgagaaagggctctgcttgagttgtagaaagaaccgctrcaacaatcygggctawgagatcartaaagtcagagccaaaagaagcagcaaaatgtacctgaagactcgttctcagatgccctacaaagtcttccattaccaagtaaagattcatttttctgggactgagagtgaaacccataccaatcagrcctttgagatttytctgtatggcaccrtggccgagagtgagaacatyccattcrytctgcctgaagtttccacaaataagacmtactccttcctaatttacacagaggtagatattggagaactactcatgttgaagctcaaatrraagagtgattcatactttagctggtcagactggtggagcagtcccggcttcrccattcagaagatcagagtaaaagcaggarwgactcagaaaaaggtgatcttctrttctaggragaaagtgtctcatttgcagaaaggaaaggcacctgcggtatttgtgaaatgccatgacaagtctctgaataagaagtsaggctgaaactgggcraatctacagaacaaagaacggcatgtgaattctgtgaagaatgaagtggaggaagtaacttttacaaaacatacccagtgtttggggtgtttcaaaagtggattttcctgaatattaatcccagccctacccttgttagttattttaggagacagtctcaagcactaaaaagtggctaattcaatttatggggtatagtggccaaatagcacatcctccaacgttaaaagacagtggatcatgaaaagtgctgttttgtcctttgagaaagaaataattgtttgagcgcagagtaaaataaggctccttcatgtggcgtattgggccatagcctataattggttagaacctcctattttaaytggaattctggatctttcggactgaggccttctcaaactttactctaagtctccaagaatacagaaaatgcttttccgcggcacgaatcagactcatctacacagcagtatgaatgatgttttagaatgattccctcttgctattggaatgtggtccagacgtcaaccaggaacatgtaacttggagagggacgaagaaagggtctgataaacacagaggttttaaacagtccctaccattggcctgcatcatgacaaagttacaaattcaaggagatataaaatctagatcaattaattcttaataggctttatcgtttattgcttaatccctctctcccccttcttttttgtctcaagattatattataataatgttctctgggtaggtgttgaaaatgagcctgtaatcctcagctgacacataatttgaatggtgcagaaaaaaaaaargataccgtaattttattattagattctcyaaatgattttcatcaatttaaaatcattcaatatctgacagttactcttcagttttaggcttaccttggtcatgcttcagttgtacttccagtgcgtctcttttgttcctggctttgacatgaaaagataggtttgagttcaaattttgcattgtgtgagcttctacagattttagacaaggaccgtttttactaagtaaaagggtggagaggttcctggggtggattcctaagcagtgcttgtaaaccatcgcgtgcaatgagccagatggagtaccatgagggttgytatttgttgtttttaacaactaatcaagagtgagtgaacaactatttataaactagatctcctatttttcagaatgctcttmtacgtataaatatgaaatgataaagrtgtcaaatatctcagaggctatagctgggaacccgactgtgaaagtatgtgatatctgaacacatactagaaagctctgcatgtgtgttgtccttcagcataattcggaagggaaaacagtcgatcaagggatgtaytggaacatgtcggagtagaaattgttcctgatgtgccagaacttcgaccctttctctgagagagatgatcgtgcctataaatagtaggaccaatgttgtgattaacatcatcaggcttggaatgaattctctctaaaaataaaatgatgtatgatttgttgttggcatcccctttattaattcattaaatttctggatttgggttgtgacccagggtgcattaacttaaaagattcactaaagcagcacatagcactgggaactctggctccgaaaaactttgytatatatatcaaggatgttctggctttacattttatttattagctgtaaatacatgtgtggatgtgtaaayggagcttgtacatattggaaaggtcattgtggctatctgcatttataaatgtgtggtgctaactgtatgtgtctttatcagtgatggtctcacagagccaactyamtcttatgaaatgggctttaacaaaacaagaaagaaacgtacttaactgtgtgaagaaatggaatcagcttttaataaaattgacaacattttattaccac

SEQ ID NO: 4503 - DNA, 8146 bp, Homo sapiens
ccttggccgagaccggtcctctgcggagagggccccgccctctgtgaaggcccgcccgggaattggcggcggcgctgcagccatttccggtttcggggaggtgggtggggtgcggagcgggacttggagcagccgccgccgctgccaccgcytacagakcctgccttgcgcctggtgctgccaggaagatgcggccggagcccggaggctgctgctgccgccgcacggtgcgggcgaatggctgcgtggcgaacggggaagtacggaacgggtacgtgaggagcagcgctgcagccgcagccgcagccgccgccggccagatccatcatgttacacaaaatggaggactatataaaagaccgtttaatgaagcttttgaagaaacaccaatgctggttgctgtgctcacgtatgtggggtatggcgtactcaccctctttggatatcttcgagatttcttgaggtattggagaattgaaaagtgtcaccatgcaacagaaagagaagaacaaaaggactttgtgtcattgtatcaagattttgaaaacttttatacaaggaatctgtacatgaggataagagacaactggaatcggccaatctgtagtgtgcctggagccagggtggacatcatggagagacagtctcatgattataactggtccttcaagtatacagggaatataataaagggtgttataaacatgggttcctacaactatcttggatttgcacggaatactggatcatgtcaagaagcagccgccaaagtccttgaggagtatggagctggagtgtgcagtactcggcaggaaattggaaacctggacaagcatgaagaactagaggagcttgtagcaaggttcttaggagtagaagctgctatggcgtatggcatgggatttgcaacgaattcaatgaacattcctgctcttgttggcaaaggttgcctgattctgagtgatgaactgaaycatgcatcactggttctgggagccagactgtcaggagcaaccattagaatcttcaaacacaacaatatgcaaagcctagagaagctattgaaagatgccattgtttatggtcagcctcggacacgaaggccctggaagaaaattctcatccttgtggaaggaatatatagcatggagggatctattgttcgtcttcctgaagtgattgccctcaagaagaaatacaaggcatacttgtatctggatgaggctcacagcattggcgccctgggccccacaggccggggtgtggtggagtactttggcctggatcccgaggatgtggatgttatgatgggaacgttcacaaagagttttggtgcttctggaggatatattggaggcaagaaggagctgatagactacctgcgaacacattctcatagtgcagtgtatgccacrtcattgtcacctcctgtagtggagcagatcatcacctccatgaagtgcatcatggggcaggatggcaccagccttggtaaagagtgtgtacaacagttagctgaaaacaccaggtatttcaggagacgcctgaaagagatgggcttcatcatctatggaaatgaagactctccagtagtgccyttgatgctctacatgcckgccaaaattggcgcctttggacgggagatgctgaagcggaacatcggtgtcgttgtggttggatttcctgccaccccaattattgagtccagagccaggttttgcctgtcagcagctcataccaaagaaatacttgatactgctttaaaggagatagatgaagttggggacctaytgcagctgaagtattcccgtyatcggttggtacctctactggacaggccctttgacgagacgacgtatgaagaaacagaagactgagccttkttggtgctccctcagaggaactctccctcacccaggacagcctgtggcctttgtgagccagttccaggaaccacacttctgtggccatctcacgtgaaagacattgcctcagctactgaaggtggccacctccactctaaatgacattttgtaaatagtaaaaaactgcttctaatccttcctttgctaaatctcacctttaaaaacgaaggtgactcactttgctttttcagtccattaaaaaaacattttattttgcaaccattctacttgtgaaaycacgctgaccctagcctgtctctggctaaccacacaggccattcccctctcccagcaccttgcagacttgggcccatcaagagctactgctggccctggctccgcagcctggatacttacctggccctcctccctagggagcaagtgccttccacttacttcccatccaggtctcagaggtctcaaggccaaccttggaatccttatttaaccattcaagtaatcaacggaagttttcaccctttaatcttaagtttagccttttaagaaaaacagtaagcgatgactgctgaaaggctcattgtgtaatctcccaagggtttggtcttattccattttcttctggtcaccagatgatttcttcctttaccatcaaatacttcttcataatggtcacagtctgaggatgtgcgcaaattctggttcttcccaagctctaaccgtaacacgtcccaccccctttttaaagcacttactgttttcagagcacccatatcccaccctggtgagaaggccactctcacatctgagtgttgggtacaaagctgctccgtagagtgatgtgcactcctggtgggtgaggggcaggggcagtggcagtgtgcaaagaattgattactccttgcagagcctgtggcttgcatttcctactgctttctacgtttgaaaattatgacagtctctggctaggtctgggtccagattaggatttaaactgataaaggaaactgttggtaaatcctctgctcagaaagcatttatcatgttcctatttaaggattaggtttattaatttaggcctcttagaagctaacccacttaaatattactcttctgaatgctagttctcttttattcttgatgtcctaagtcaattgaatctggcatctggggctagggtctgcctgtctacatattttttatttttttctgagaaattctgaacacatagatctctttcctaaactgacattttctattttgactgttttcatactataaccaggtaaagggacttctttcagagagctttatactgcctgaccaaagaacaaatctgaaaatcaccattttaaagttattttttcagttgaaccaaagtttaagtgaagaggacttttggcatattatacccaggatcagtttgtctttttgtatccatcaagtattacaggagaaggattgggaacagaatggaaaaacagtgtatgaaagtcatgttacaggccgagtgcggtggctcacacctgtaatcctagcactttgggaggctgaggcaggtggctcacttgaggtcaggaattcaagaccagcctggccaacatggtgaaaccccgtctctactaaaaagacaaaaaattagctgggcgtggtggcgggcacctataatcccacctacttggtaggctgaggcaggagaatcgcttgaacccaggaggcggaggttgcagtgagacgagattgtgccactgcactctagcctgggtgacagagcaaaactgtgtctcaaaaaaaaaagtcatgttacacatttaagtttttgaaattgctccttttatcggtaaagattctcaatccaaattctcctgggtgtgttgtcatcagctgtgatatgtttgtgcacattacgtatagcagaggatgtaagcaatattattgtttgtgaagttttgtttttaatgtcttgagtatgagttatgtttagtcactgtcagcatctgagaactttaataagcccttgagatattccaaagttttattttacttttttaaagaacagaaaaagatgaatgaaagaaccaaggagagatgcagagactatatttagcatgtataggttaaagtaagaaggaggttgtggtaactaaataggagtcctataaaatcaaatacattgtcaaccttttctgcacatctagtttcctaccatagaatcccactggaataccacatagcttttgcactgcagttactatttactaatgtaaacgtagggtttgtaaaagtcacaaacttgtaagcaatgaacttacctgctagtctttttattttggcttgcatgaagtcactgcaaattcaaatgtcagtaccggcatttaaaatatatctatatcactttgttggtacaaagttatttcaagataagtgtaattttgttacaagtttattttgaagagacaaatctcctgtgatctatgcaggacctctgtactttctaaagaacaaaatgttatgtagacattatacatggttggttgtctcttcttgaaactgtaatgtaaatctagggtccagtcatatcctaggtatcatcatttatccaagtacttggaggaatacaagtatatataaatacagtcattgagaataagtcgatttgaggcatacaagagtagtttcttacacagtttaacacggcctgattcaagactctgataggattcaaacagataccggttaaccatgactaccaaaactgatcatctgagtcgattgatagaggtgtgactagtccttagcactttttctcattcctctttttattcagcattgctgttacctatttcaggtttataagacctctttcagcagatcacatcagaagccaggaaatgcatagctaggagatgtcaaaagcccatatgaggagtggaccaagcagcagtggcggtttctcctcgcatctttttttttttaagctttaacttagcaggggcatggactttatagcactttttcaactttttgctttgctttggataagaaatccttacctttaaaaaaagcttctagtctccataacccccaaagtactgcttatttgtttgaagaatccagccatcgtagtgctttagtcactatcgtaaacattcatgatagggcaaggattttaaaacaggattcttgcttctgtagtcatcaaggtgaacagaagcatcctacacaaccactaagggctctatgtttgtgtcatgcctcttcaaacaccaaggagttgaacatgcttccagtgatttgtctccgtaatgccttcttcctttatttggcctttctttctttctgtaccttcaagttcttgatttttaaaattccaactctagagaaaaccaatatatggtggtgctgggctttgaagatagcatatcagacgccttggttctgtttgtacacttagccttacatttcaggaggaggcttttcattaggggcttaagctagctcctttggcttttaaaaamaattttttttcaaatttcttcattacctaagggagcctgcatctaaatttctcaactagttcagcctagctgaattttctagtgtgtwatacactttgcttccttcttattgrtgaaaaccagggggatgagtggcttccatggagagatttcctgatttctcagggaggaaaaaagtgatgacatttaccactacttttatgtttttcccctttttccaaattgataaggatttctggttcctagtgatccgggattgggcaacagtgcagaactgccagtcatgccgtaggccgtgaagaaagaatgtgagtaactgttgttttgcaaggatttgtagggttatgggcagttgttgtttgaagcattgctatgacctaattcccaaggtatctttcctctcttggtgttctaggtaagccaatgagctttaatctctacttgctataaccgtgtgcttagaaaaagaggtgagagtagtggttttccttcaaactgtccacattcatgaagattatgaattgttaggacagccagggcaagatagaccctgtctctacaaaaatttttttctaaattaaccgggcatggtggtgcctgcctgtagtcccacctgtgtgggagaatcacttgagcctgggaggtcaaggctgcagtgagccatgattgcacccctgcactccagcctgggtgacagagtgagaccctggctcaataagagggggaaaaaaaattgttaggagctgggtgcggatgcagcctgcaatcccagctacttgagaggctgaggccggaggattgcttaaacccaagaatttgagcgtagcctgggcaacacagcaagaccccatctaagaaaaaaatgttttttaaatcagcttagcccaaaggggttgtgaatggggaggtataaaaagcaaakattattttttggctactaagccaagaacttacagggattttttttttcagtcccagaacctacagataccctgctacttgcttcacgtggatgctcagtgcccagcagccatcttaatacattaaaccagtttaaaaaataccttccatgtggagaaaaacatgtctttttctcgcctcaactttatccacatgaaatgtgtgcccatggctgggcgcagtggctcatgcctgtaatcccaacactttgggaggctgaagcaggcagattgcttgaggccaggagttcgagaacagtctggccaacatggcgaaacctcatctctactaaaattacaaaaattagccgggcatggtggcacatgcctgtaatcccagctacgtcaggaggctgaggcacaggaattgcttgaacccaagaggcagaggatgcaatgagccaagatcacaccactgcactccagccttggygacagagggagactctgtctcaaaaaaaaaaaaaaaaggtgtgcccaggcccctagccattgccatgtgcccagccagagagccaaattagagggctggcttccctatcacacagaataaatgctagtgctagccaatgatccctttgcttttaatgtatagaaaatactgttgttccttttgtcatttccagtgacatctgttttctaagcagctcttttctagggaggaaaccaaaggggctaggttaagaccctaatagaaatgttttttctaatctctggtgagtctggaagtgtcacattcacagtccacccttgggagtggcttggtggagctggggacaaggttttgtttactacatagtgcacatgataaatggccttaaactgtgattctttctggtaggataagttataataaactgaccctaaagaatgcaatggcttttaaactgcagttactgtgttcttaatgaagsaatacccaaagctctgttcttttggagcacttgaggggagcttgaatgaaaggtgcagataagagcagtaccttgatcttatgctttctgagtgtcctgccttgttgccatctgcatggatgagtgaatgcttctatgcacgaggagactcaagccaactcrgagtctgctttttccaacgctcttcccaggtttcttttgcaaagcttggtcatttggcccaggtcttcctggaaagtggagtacatgtcactgactagggtggcgtggtgtctttacccttaacattaagtcttgttacctcagtgatgtgaagccaatggttggaattataaaaagcatccttgctggttcttcacaggacactggaacccaccctgtcaattcagctagcatgtccacacagtcttgatgatccctctctgtaacaggcagctaacattaagagaagggggaaagagaagaagagagcaatagcttatgggagagctgagatcttacttcgttgacccatatttttcccctgaccaagttacctgtaaactggaatttgcaaggggatgctgtgatgataacccctttctattgctgtaatgttcatataacctgggaaactgagagaaggggatgtgtaaataaaagcttaaacattttagtaatgtgttaaaatgtcactctctcttaccctgtttcccttttttgccagatgatgatttttttatttttattttgtactttactggatgacttattgggttggggtaggtgtgttgattttgagagtgcatgttaagaactgaaggggaactacttgagatgacttaagaagcatcccatgcaaatatcttkttttgccctaataaaatattcag

SEQ ID NO: 4504 - DNA, 1598 bp, Homo sapiens
ccttggccgagaccggtcctctgcggagagggccccgccctctgtgaaggcccgcccgggaattggcggcggcgctgcagccatttccggtttcggggaggtgggtggggtgcggagcgggacttggagcagccgccgccgctgccaccgcytacagakcctgccttgcgcctggtgctgccaggaagatgcggccggagcccggaggctgctgctgccgccgcacggtgcgggcgaatggctgcgtggcgaacggggaagtacggaacgggtacgtgaggagcagcgctgcagccgcagccgcagccgccgccggccagatccatcatgttacacaaaatggaggactatataaaagaccgtttaatgaagcttttgaagaaacaccaatgctggttgctgtgctcacgtatgtggggtatggcgtactcaccctctttggatatcttcgagatttcttgaggtattggagaattgaaaagtgtcaccatgcaacagaaagagaagaacaaaaggactttgtgtcattgtatcaagattttgaaaacttttatacaaggaatctgtacatgaggataagagacaactggaatcggccaatctgtagtgtgcctggagccagggtggacatcatggagagacagtctcatgattataactggtccttcaagtatacagggaatataataaagggtgttataaacatgggttcctacaactatcttggatttgcacggaatactggatcatgtcaagaagcagccgccaaagtccttgaggagtatggagctggagtgtgcagtactcggcaggaaattggaaacctggacaagcatgaagaactagaggagcttgtagcaaggttcttaggagtagaagctgctatggcgtatggcatgggatttgcaacgaattcaatgaacattcctgctcttgttggcaaaggttgcctgattctgagtgatgaactgaaycatgcatcactggttctgggagccagactgtcaggagcaaccattagaatcttcaaacacaacaatatgcaaagcctagagaagctattgaaagatgccattgtttatggtcagcctcggacacgaaggccctggaagaaaattctcatccttgtggaaggaatatatagcatggagggatctattgttcgtcttcctgaagtgattgccctcaagaagaaatacaaggcatacttgtatctggatgaggctcacagcattggcgccctgggccccacaggccggggtgtggtggagtactttggcctggatcccgaggatgtggatgttatgatgggaacgttcacaaagagttttggtgcttctggaggatatattggaggcaagaaggagctgatagactacctgcgaacacattctcatagtgcagtgtatgccacrtcattgtcacctcctgtagtggagcagatcatcacctccatgaagtgcatcatggggcaggatggcaccagccttggtaatggcatcactattcatgaagttgtccaaacaagaaatacctatcatcgtttctctcctttatcccctgtatttagtcaccagtgcctatggatcatgcttcct

SEQ ID NO: 4505 - DNA, 8165 bp, Homo sapiens
ccttggccgagaccggtcctctgcggagagggccccgccctctgtgaaggcccgcccgggaattggcggcggcgctgcagccatttccggtttcggggaggtgggtggggtgcggagcgggacttggagcagccgccgccgctgccaccgcytacagakcctgccttgcgcctggtgctgccaggaagatgcggccggagcccggaggctgctgctgccgccgcacggtgcgggcgaatggctgcgtggcgaacggggaagtacggaacgggtacgtgaggagcagcgctgcagccgcagccgcagccgccgccggccagatccatcatgttacacaaaatggaggactatataaaagaccgtttaatgaagcttttgaagaaacaccaatgctggttgctgtgctcacgtatgtggggtatggcgtactcaccctctttggatatcttcgagatttcttgaggtattggagaattgaaaagtgtcaccatgcaacagaaagagaagaacaaaaggactttgtgtcattgtatcaagattttgaaaacttttatacaaggaatctgtacatgaggataagagacaactggaatcggccaatctgtagtgtgcctggagccagggtggacatcatggagagacagtctcatgattataactggtccttcaagtatacagggaatataataaagggtgttataaacatgggttcctacaactatcttggatttgcacggaatactggatcatgtcaagaagcagccgccaaagtccttgaggagtatggagctggagtgtgcagtactcggcaggaaattggaaacctggacaagcatgaagaactagaggagcttgtagcaaggttcttaggagtagaagctgctatggcgtatggcatgggatttgcaacgaattcaatgaacattcctgctcttgttggcaaaggttgcctgattctgagtgatgaactgaaycatgcatcactggttctgggagccagactgtcaggagcaaccattagaatcttcaaacacaacaatatgcaaagcctagagaagctattgaaagatgccattgtttatggtcagcctcggacacgaaggccctggaagaaaattctcatccttgtggaaggaatatatagcatggagggatctattgttcgtcttcctgaagtgattgccctcaagaagaaatacaaggcatacttgtatctggatgaggctcacagcattggcgccctgggccccacaggccggggtgtggtggagtactttggcctggatcccgaggatgtggatgttatgatgggaacgttcacaaagagttttggtgcttctggaggatatattggaggcaagaaggagctgatagactacctgcgaacacattctcatagtgcagtgtatgccacrtcattgtcacctcctgtagtggagcagatcatcacctccatgaagtgcatcatggggcaggatggcaccagccttggtaaagagtgtgtacaacagttagctgaaaacaccaggtatttcaggagacgcctgaaagagatgggcttcatcatctatggaaatgaagactctccagtagtgccyttgatgctctacatgcckgccaaaattggcgcctttggacgggagatgctgaagcggaacatcggtgtcgttgtggttggatttcctgccaccccaattattgagtccagagccaggttttgcctgtcagcagctcataccaaagaaatacttgatactgctttaaaggagatagatgaagttggggacctaytgcagctgaagtattcccgtyatcggttggtacctctactggacaggccctttgacgagacgacgtatgaagaaacagaagactgagccttkttggtgctccctcagaggaactctccctcacccaggacagcctgtggcctttgtgagccagttccaggaaccacacttctgtggccatctcacgtgaaagacattgcctcagctactgaaggtggccacctccactctaaatgacattttgtaaatagtaaaaaactgcttctaatccttcctttgctaaatctcacctttaaaaacgaaggtgactcactttgctttttcagtccattaaaaaaacattttattttgcaaccattctacttgtgaaaycacgctgaccctagcctgtctctggctaaccacacaggccattcccctctcccagcaccttgcagacttgggcccatcaagagctactgctggccctggctccgcagcctggatacttacctggccctcctccctagggagcaagtgccttccacttacttcccatccaggtctcagaggtctcaaggccaaccttggaatccttatttaaccattcaagtaatcaacggaagttttcaccctttaatcttaagtttagccttttaagaaaaacagtaagcgatgactgctgaaaggctcattgtgtaatctcccaagggtttggtcttattccattttcttctggtcaccagatgatttcttcctttaccatcaaatacttcttcataatggtcacagtctgaggatgtgcgcaaattctggttcttcccaagctctaaccgtaacacgtcccaccccctttttaaagcacttactgttttcagagcacccatatcccaccctggtgagaaggccactctcacatctgagtgttgggtacaaagctgctccgtagagtgatgtgcactcctggtgggtgaggggcaggggcagtggcagtgtgcaaagaattgattactccttgcagagcctgtggcttgcatttcctactgctttctacgtttgaaaattatgacagtctctggctaggtctgggtccagattaggatttaaactgataaaggaaactgttggtaaatcctctgctcagaaagcatttatcatgttcctatttaaggattaggtttattaatttaggcctcttagaagctaacccacttaaatattactcttctgaatgctagttctcttttattcttgatgtcctaagtcaattgaatctggcatctggggctagggtctgcctgtctacatattttttatttttttctgagaaattctgaacacatagatctctttcctaaactgacattttctattttgactgttttcatactataaccaggtaaagggacttctttcagagagctttatactgcctgaccaaagaacaaatctgaaaatcaccattttaaagttattttttcagttgaaccaaagtttaagtgaagaggacttttggcatattatacccaggatcagtttgtctttttgtatccatcaagtattacaggagaaggattgggaacagaatggaaaaacagtgtatgaaagtcatgttacaggccgagtgcggtggctcacacctgtaatcctagcactttgggaggctgaggcaggtggctcacttgaggtcaggaattcaagaccagcctggccaacatggtgaaaccccgtctctactaaaaagacaaaaaattagctgggcgtggtggcgggcacctataatcccacctacttggtaggctgaggcaggagaatcgcttgaacccaggaggcggaggttgcagtgagacgagattgtgccactgcactctagcctgggtgacagagcaaaactgtgtctcaaaaaaaaaagtcatgttacacatttaagtttttgaaattgctccttttatcggtaaagattctcaatccaaattctcctgggtgtgttgtcatcagctgtgatatgtttgtgcacattacgtatagcagaggatgtaagcaatattattgtttgtgaagttttgtttttaatgtcttgagtatgagttatgtttagtcactgtcagcatctgagaactttaataagcccttgagatattccaaagttttattttacttttttaaagaacagaaaaagatgaatgaaagaaccaaggagagatgcagagactatatttagcatgtataggttaaagtaagaaggaggttgtggtaactaaataggagtcctataaaatcaaatacattgtcaaccttttctgcacatctagtttcctaccatagaatcccactggaataccacatagcttttgcactgcagttactatttactaatgtaaacgtagggtttgtaaaagtcacaaacttgtaagcaatgaacttacctgctagtctttttattttggcttgcatgaagtcactgcaaattcaaatgtcagtaccggcatttaaaatatatctatatcactttgttggtacaaagttatttcaagataagtgtaattttgttacaagtttattttgaagagacaaatctcctgtgatctatgcaggacctctgtactttctaaagaacaaaatgttatgtagacattatacatggttggttgtctcttcttgaaactgtaatgtaaatctagggtccagtcatatcctaggtatcatcatttatccaagtacttggaggaatacaagtatatataaatacagtcattgagaataagtcgatttgaggcatacaagagtagtttcttacacagtttaacacggcctgattcaagactctgataggattcaaacagataccggttaaccatgactaccaaaactgatcatctgagtcgattgatagaggtgtgactagtccttagcactttttctcattcctctttttattcagcattgctgttacctatttcaggtttataagacctctttcagcagatcacatcagaagccaggaaatgcatagctaggagatgtcaaaagcccatatgaggagtggaccaagcagcagtggcggtttctcctcgcatctttttttttttaagctttaacttagcaggggcatggactttatagcactttttcaactttttgctttgctttggataagaaatccttacctttaaaaaaagcttctagtctccataacccccaaagtactgcttatttgtttgaagaatccagccatcgtagtgctttagtcactatcgtaaacattcatgatagggcaaggattttaaaacaggattcttgcttctgtagtcatcaaggtgaacagaagcatcctacacaaccactaagggctctatgtttgtgtcatgcctcttcaaacaccaaggagttgaacatgcttccagtgatttgtctccgtaatgccttcttcctttatttggcctttctttctttctgtaccttcaagttcttgatttttaaaattccaactctagagaaaaccaatatatggtggtgctgggctttgaagatagcatatcagacgccttggttctgtttgtacacttagccttacatttcaggaggaggcttttcattaggggcttaagctagctcctttggcttttaaaaamaattttttttcaaatttcttcattacctaagggagcctgcatctaaatttctcaactagttcagcctagctgaattttctagtgtgtwatacactttgcttccttcttattgrtgaaaaccagggggatgagtggcttccatggagagatttcctgatttctcagggaggaaaaaagtgatgacatttaccactacttttatgtttttcccctttttccaaattgataaggatttctggttcctagtgatccgggattgggcaacagtgcagaactgccagtcatgccgtaggccgtgaagaaagaatgtgagtaactgttgttttgcaaggatttgtagggttatgggcagttgttgtttgaagcattgctatgacctaattcccaaggtatctttcctctcttggtgttctaggtaagccaatgagctttaatctctacttgctataaccgtgtgcttagaaaaagaggtgagagtagtggttttccttcaaactgtccacattcatgaagattatgaattgttaggacagccagggcaagatagaccctgtctctacaaaaatttttttctaaattaaccgggcatggtggtgcctgcctgtagtcccacctgtgtgggagaatcacttgagcctgggaggtcaaggctgcagtgagccatgattgcacccctgcactccagcctgggtgacagagtgagaccctggctcaataagagggggaaaaaaaattgttaggagctgggtgcggatgcagcctgcaatcccagctacttgagaggctgaggccggaggattgcttaaacccaagaatttgagcgtagcctgggcaacacagcaagaccccatctaagaaaaaaatgttttttaaatcagcttagcccaaaggggttgtgaatggggaggtataaaaagcaaakattattttttggctactaagccaagaacttacagggattttttttttcagtcccagaacctacagataccctgctacttgcttcacgtggatgctcagtgcccagcagccatcttaatacattaaaccagtttaaaaaataccttccatgtggagaaaaacatgtctttttctcgcctcaactttatccacatgaaatgtgtgcccatggctgggcgcagtggctcatgcctgtaatcccaacactttgggaggctgaagcaggcagattgcttgaggccaggagttcgagaacagtctggccaacatggcgaaacctcatctctactaaaattacaaaaattagccgggcatggtggcacatgcctgtaatcccagctacgtcaggaggctgaggcacaggaattgcttgaacccaagaggcagaggatgcaatgagccaagatcacaccactgcactccagccttggygacagagggagactctgtctcaaaaaaaaaaaaaaaaggtgtgcccaggcccctagccattgccatgtgcccagccagagagccaaattagagggctggcttccctatcacacagaataaatgctagtgctagccaatgatccctttgcttttaatgtatagaaaatactgttgttccttttgtcatttccagtgacatctgttttctaagcagctcttttctagggaggaaaccaaaggggctaggttaagaccctaatagaaatgttttttctaatctctggtgagtctggaagtgtcacattcacagtccacccttgggagtggcttggtggagctggggacaaggttttgtttactacatagtgcacatgataaatggccttaaactgtgattctttctggtaggataagttataataaactgaccctaaagaatgcaatggcttttaaactgcagttactgtgttcttaatgaagsaatacccaaagctctgttcttttggagcacttgaggggagcttgaatgaaaggtgcagataagagcagtaccttgatcttatgctttctgagtgtcctgccttgttgccatctgcatggatgagtgaatgcttctatgcacgaggagactcaagccaactcrgagtctgctttttccaacgctcttcccaggtttcttttgcaaagcttggtcatttggcccaggtcttcctggaaagtggagtacatgtcactgactagggtggcgtggtgtctttacccttaacattaagtcttgttacctcagtgatgtgaagccaatggttggaattataaaaagcatccttgctggttcttcacaggacactggaacccaccctgtcaattcagctagcatgtccacacagtcttgatgatccctctctgtaacaggcagctaacattaagagaagggggaaagagaagaagagagcaatagcttatgggagagctgagatcttacttcgttgacccatatttttcccctgaccaagttacctgtaaactggaatttgcaaggggatgctgtgatgataacccctttctattgctgtaatgttcatataacctgggaaactgagagaaggggatgtgtaaataaaagcttaaacattttagtaatgtgttaaaatgtcactctctcttaccctgtttcccttttttgccagatgatgatttttttatttttattttgtactttactggatgactgtgaagcgatgagtattgggttggggtaggtgtgttgattttgagagtgcatgttaagaactgaaggggaactacttgagatgacttaagaagcatcccatgcaaatatcttkttttgccctaataaaatattcagaaagat

SEQ ID NO: 4506 - DNA, 1348 bp, Homo sapiens
aggcgcagagcatgtcgggaccgggagggccggccggcccggggcgggggggactgggcaggaggggtcgggctcagggaactgcaactcccagcagcccccaggtacggggcgtggcgggagagctgggcgagccagaggcgaccggaaggatctttctagtccagcccctcgctttacccggacgaaagacacgggcctgattcgtcgagtctcactgagccttagtcgtcggcaggtcccaggcgcgaastttctcggcctggaggagggggtcgcgygaagtgccagatgcaggcggggaagcccatcctctattcctatttccgaagctcctgctcatggagagttcgaattgctctggccttgaaaggcatcgactacragacggtgcccatcaatctcataaaggatrgrggccaacagttttctaaggacttccaggcactgaatcctatgaagcaggtgccaaccctgaagattgatggaatcaccattcaccagtcactggccatcattgagtatctagaggagaygcgtcccactccgcgacttctgcctcaggacccaaagaagagggccagcgtgcgtatgatttctgacctcatcgctggtggcatccagcccctgcagaacctgtctgtcctgaagcaagtgggagaggagatgcagctgacctgggcccagmacgccatcacttgtggctttaacgccctggagcagatcctacagagcacagcgggcatatactgtgtaggagacgaggtgaccatggctgatctgtgcttggtgcctcaggtggcaaatgctgaaagattcaaggtggatctcaccccctaccctaccatcagctccatcaacaagaggctgctggtcttggaggccttccaggtgtctcacccctgccggcagccagatacacccactgagctgagggcctagctcccaaatcctgccccgttggcacagggccacaggagcagaagctgggtgggctgaagaggcctggaaacgagagtcttaattgaggagrtgggagactcgaactctagccctggatctgccttcctgctgaaacttgttccacctcagtcccctcatctgtcacacgcatgtggggtggagtagggagatgcggggagcagggtgggcaggaatactgttatctatgtgacggggcagtcgtgaggctgagatgagaatgcggattaaaatgcctggcgtgctcaccgtaacaccacggggaaggctgtgtgccttttctcatccgcttttgttrtgtgtgactccaaagaatgcccgcgctgaaatttggcgtgaattaaactgaagcccaggcctctacctt

SEQ ID NO: 4507 - DNA, 5232 bp, Homo sapiens
cccagggtctccaggtgtctaaccagcttycctccacccgggtgcgcgtcacagaccttccccgcctgcatctggcacttcrcgcgaccccctcctccaggccgagaaasttcgcgcctgggacctgccgacgactaaggctcagtgagactcgacgaatcaggcccgtgtctttcgtccgggtaaagcgaggggctggactagaaagatccttccggtcgcctctggctcgcccagctctcccgccacgccccgtacctgggggctgctgggagttgcagttccctgagcccgacccctcctgcccagtcccccccgccccgggccggccggccctcccggtcccgacatgctctgcgcctcctgccgcctcctagcggcccgggccgcgaccacgctgcccgccccgccccgagcccggggccccgcgctccgctgcagtgaagggcgttgcatttcccggggtaccccgagctgccctcttgtgactccttrgcggggcggctggtcagacaaagtgtgcctccgggccggagggcgacccagaggagggggaagatgccgccggccacgggcggaggcctggcagagtccgagctgcgtccccggaggggccgctrtggcccccaggctgctagggccgcaggccgggacgtggccgctgaggctgtggcgcgaagccccaaacggcctgcttggggctcacggcgcttcgaggmkgtcggctggtgggccctgctggccttggtgacgctgctgtccttcgccacccgcttccaccgcttggacgagccgccgcacatctgttgggatgagactcactttggaaaaatgggaagttactatatcaaccgtacatttttctttgatgtgcacccgcccctgggaaagatgctgataggtcttgctggctacctgagtggatatgatggtacctttttgttccagaagcctggggataaatatgagcatcacagctacatgggaatgagaggattctgtgcattccttggctcctggctggtcccctttgcctacctcactgtactggatctgtccaagtccctctcggcagcactgctcacagctgccctcctcacctttgacacgggatgcctcactctgtcccagtacatcctccttgaccccatcctgatgttcttcatcatggctgccatgctgagcatggtcaagtacaactcttgcgccgacaggcccttctctgccccctggtggttctggctcagcctgactggcgttagtcttgctggtgctttaggggtcaagtttgttggcctctttatcatccttcaagtggggctgaacaccattgcagacctttggtacctgttcggagacctcagtctttcattggtgactgtgggaaaacacctgactgctcgtgtcctgtgcctcatagtgctgcccctggctctctatacagccacctttgctgttcacttcatggtgctgagtaaaagtggccctggtgacggtttcttcagttctgccttccaggcccggctttcagggaacaacctgcacaatgcttccatcccctgaacacctggcctacggctctgtgatcactgtgaagaacctccggatggccatcggctatctgcactcccacaggcacctctaccccgagggcattggtgcccgtcagcagcaggtcaccacctatttgcacaaggactacaacaacctgtggattatcaagaaacataacacaaactcagatcccctagacccttccttcccagtggagtttgtaagacatggagacattattcgactagaacacaaagaaacttcccggaacttgcacagtcactatcatgaggcccccatgacccggaagcactatcaggtcaccggctatggcataaatggaacaggggactcaaatgatttctggcggattgaggtcgtaaacagraaatttggaaaccggatcaaagtgctgagaagtcgaattcgcttcatccatttggtcacaggttgtgtcctgggctcctcgggaaaggttctgcccaagtggggctgggagcagttggaagttacttgcaccccatacctgaaagaaaccctcaactccatctggaatgtggaggaccatatcaatcccaagttgccaaacatcagcctggatgtgctacagcccagttttcctgagatcttgctggaatcccacatggtcatgatccgggggaacagtggcctcaaacccaaggacaatgagttcacgtccaaaccctggcactggcctatcaactatcagggcctacgcttctcaggggtcaatgacacagatttccgagtctatctgcttggcaacccggtggtttggtggctgaatctgttgagcatcgccctctacctcctctcagggagcatcattgctgtagccatgcagagaggggcacggctgccagcggaggttgcagggttgtcccaggtcctgctkcgaggaggcggccaggtcctgctcggctggacactccattacttcccgtttttcctgatgggccgggtcctctacttccaccactacttcccagccatgctcttctcaagcatgttgacaggcattctgtgggacaccctcctgcggctctgtgcctggggcttggcctcatggcccctggcgaggggcatacatgtggcgggaatcctgagcctgctcctgggaactgcctacagcttctacctcttccaccctctggcttacgggatggttggtcccctggcccaggacccccaaagtccaatggcaggactaaggtggctggactcatgggacttttgaggccactgcaaagattccagcctgggtccaggaacttcccaggagagccagctgggaagcagtactggaccatcyggccatgaggaagctgcctaaggagcccgaagaattctgctgctcaccaggacccagctctgggagtgcagctggaatggaacccagcattggagagagccgggagagagccgcagctccgtccacagcaccacggagaggacagcgcctcttgggctgctccctcgtgcacagcgcaggggaggatgggtgccagagggtgggagtgggtgcgcgtgtgtgtatgtgagggcatgttgtccatatccctgtggaatacagaccgtgtaactggacagctgagtgtcataaactctaaaatagtccaggctatagtaatattttctggtatttttttctgttggatttctttggttttggtttgtaagatccatcaaaaattctcagacctctgagagggccttgagggcagagaatactgacctcaccttgggatgtcaccaaaggcagagcagatgggactgtcaaagttgtgctgccctccctcccacaaacaaatgaatccagcgtggaggaaggcgcgccgccccgagctggagggcctggctcccaccatgccccccagtggctgcaggtagctggacttcctgcctgtgacgcacagagagcagcggactccggagcgtcagcctgccttagcccttggttcctcgttttttgggattgtcacactgtgacactcgggaggaacgatgtcctatcctgggctgctcartgttcccaggccctgtgtgccagaggccaggtctctccaagtgcatctagcctggcctggagggcaaggcagatgcattctcctggctgctgggagagcccatgggaaccttgcttagcgcccaaggtagatgagagacagggcagggaatctgcgtggtgctgggatgtggggactctggcctctccagactaatgttcctgtcacctgctgagctttcccagtgtcacttctgcagtcctcctctgctcacccctccctcactccrtgggcaattccctttctctctgtcactgcttcagcagtgaagacccatggcacctagaaatgcatgccagcttcctgcrtctaccactctgcagctcaaacaagaagctcagagctgccccttccacttcctccccaaaagggatgaagaaaaccctgtggtagaaccaaaccacccaaggccagcccttaagcctgcctccaccttcctggtgcatgacaaaatatttcttttgtctcagaggactttgatgcttcaatatttaatgatgaatccgccacactccattttccctcctctgaagctcccaacaactctgacagggtcagatctctttaaagcatcttcaggaggcggttgccacggagactggatattggtcccagggacaggctgtgctacctactgggtggtggggagggaagcttctggccatgcttgggcattcagaccaaccatcattaatgttaatagaggaaatgcagcaacgtcaaaagcaaggcaggttggttaattagatctggggcccgatgacctccctttcccactgctacagcccttttgacttcccccagcaggaagcgctgtctgtgcggctgagtctgggccacttgcttaattgcatttctggcagggaaggagaggagggatggagaagctctgctcgctgcttccacctcaccgtgtgtcctcccctcccctcccttcctctcctccccacaggcggaattgctttcttctgagccgggtgggctctcctgcagggagaatgcaggggtctgtgcttggctcttagcaaagcaggtggcccacagtgacctccaggaggtggctgattttcctttgtgccttcttatttctcagtaggaacttggaagggaagagctctgaaggagccagaggggcagccaccttgcatgagggtgaggaaggagaagcccagccagcctctacccatccctccctcccaattaggctgcactggggccgaacgcttccctgggctcccactgccttctaaggagccaaggagaattccctgcccactttctgttcctccatgcccaaactggcagatgcttctctgggagcaaggccacatgggctgatgcagctttgagtgctcaggttctgttttctggaagttgctggagaagggctgtcagggtgcttctatgaatatgggcttcagctgtagcacttggcagaaacgtgatgtgtcccacaaactgctggtggaggaagaagatgttcgtcagccaattcracctccagccagcttcttgagcctatttggtttaaaaaaaaaaagtcttctaatcagaagccactgattttataataaataacacttgttttgaa

SEQ ID NO: 4508 - DNA, 5580 bp, Homo sapiens
cccagggtctccaggtgtctaaccagcttycctccacccgggtgcgcgtcacagaccttccccgcctgcatctggcacttcrcgcgaccccctcctccaggccgagaaasttcgcgcctgggacctgccgacgactaaggctcagtgagactcgacgaatcaggcccgtgtctttcgtccgggtaaagcgaggggctggactagaaagatccttccggtcgcctctggctcgcccagctctcccgccacgccccgtacctgggggctgctgggagttgcagttccctgagcccgacccctcctgcccagtcccccccgccccgggccggccggccctcccggtcccgacatgctctgcgcctcctgccgcctcctagcggcccgggccgcgaccacgctgcccgccccgccccgagcccggggccccgcgctccgctgcagtgaagggcgttgcatttcccggggtaccccgagctgccctcttgtgactccttrgcggggcggctggtcagacaaagtgtgcctccgggccggagggcgacccagaggagggggaagatgccgccggccacgggcggaggcctggcagagtccgagctgcgtccccggaggggccgctrtggcccccaggctgctagggccgcaggccgggacgtggccgctgaggctgtggcgcgaagccccaaacggcctgcttggggctcacggcgcttcgaggmkgtcggctggtgggccctgctggccttggtgacgctgctgtccttcgccacccgcttccaccgcttggacgagccgccgcacatctgttgggatgagactcactttggaaaaatgggaagttactatatcaaccgtacatttttctttgatgtgcacccgcccctgggaaagcacatgaagatgcgcttcattctgtttaatggccgtgtgtcattctattatgtagatgtgccatgctgataggtcttgctggctacctgagtggatatgatggtacctttttgttccagaagcctggggataaatatgagcatcacagctacatgggaatgagaggattctgtgcattccttggctcctggctggtcccctttgcctacctcactgtactggatctgtccaagtccctctcggcagcactgctcacagctgccctcctcacctttgacacgggatgcctcactctgtcccagtacatcctccttgaccccatcctgatgttcttcatcatggctgccatgctgagcatggtcaagtacaactcttgcgccgacaggcccttctctgccccctggtggttctggctcagcctgactggcgttagtcttgctggtgctttaggggtcaagtttgttggcctctttatcatccttcaagtggggctgaacaccattgcagacctttggtacctgttcggagacctcagtctttcattggtgactgtgggaaaacacctgactgctcgtgtcctgtgcctcatagtgctgcccctggctctctatacagccacctttgctgttcacttcatggtgctgagtaaaagtggccctggtgacggtttcttcagttctgccttccaggcccggctttcagggaacaacctgcacaatgcttccatcccctgaacacctggcctacggctctgtgatcactgtgaagaacctccggatggccatcggctatctgcactcccacaggcacctctaccccgagggcattggtgcccgtcagcagcaggtcaccacctatttgcacaaggactacaacaacctgtggattatcaagaaacataacacaaactcagatcccctagacccttccttcccagtggagtttgtaagacatggagacattattcgactagaacacaaagaaacttcccggaacttgcacagtcactatcatgaggcccccatgacccggaagcactatcaggtcaccggctatggcataaatggaacaggggactcaaatgatttctggcggattgaggtcgtaaacagraaatttggaaaccggatcaaagtgctgagaagtcgaattcgcttcatccatttggtcacaggttgtgtcctgggctcctcgggaaaggttctgcccaagtggggctgggagcagttggaagttacttgcaccccatacctgaaagaaaccctcaactccatctggaatgtggaggaccatatcaatcccaagttgccaaacatcagcctggatgtgctacagcccagttttcctgagatcttgctggaatcccacatggtcatgatccgggggaacagtggcctcaaacccaaggacaatgagttcacgtccaaaccctggcactggcctatcaactatcagggcctacgcttctcaggggtcaatgacacagatttccgagtctatctgcttggcaacccggtggtttggtggctgaatctgttgagcatcgccctctacctcctctcagggagcatcattgctgtagccatgcagagaggggcacggctgccagcggaggttgcaggtcaggtcctctgggctctccctcccctgacctggcggcagcagggcacctgcrcccctggggagggccggctgcctgctgatgggccatcctttgcgtttaccaccccacaccttcccttatcctttgcttttgaaaggtaacaacccccaagtacccagtgctgtgttaaacactttacttcctcccaacaacactagagcgttggctattatgacccccattttatggattaggaaaccaaggaaccatgagattaagaaacttgccccaggacatacagctaggttgtcccaggtcctgctkcgaggaggcggccaggtcctgctcggctggacactccattacttcccgtttttcctgatgggccgggtcctctacttccaccactacttcccagccatgctcttctcaagcatgttgacaggcattctgtgggacaccctcctgcggctctgtgcctggggcttggcctcatggcccctggcgaggggcatacatgtggcgggaatcctgagcctgctcctgggaactgcctacagcttctacctcttccaccctctggcttacgggatggttggtcccctggcccaggacccccaaagtccaatggcaggactaaggtggctggactcatgggacttttgaggccactgcaaagattccagcctgggtccaggaacttcccaggagagccagctgggaagcagtactggaccatcyggccatgaggaagctgcctaaggagcccgaagaattctgctgctcaccaggacccagctctgggagtgcagctggaatggaacccagcattggagagagccgggagagagccgcagctccgtccacagcaccacggagaggacagcgcctcttgggctgctccctcgtgcacagcgcaggggaggatgggtgccagagggtgggagtgggtgcgcgtgtgtgtatgtgagggcatgttgtccatatccctgtggaatacagaccgtgtaactggacagctgagtgtcataaactctaaaatagtccaggctatagtaatattttctggtatttttttctgttggatttctttggttttggtttgtaagatccatcaaaaattctcagacctctgagagggccttgagggcagagaatactgacctcaccttgggatgtcaccaaaggcagagcagatgggactgtcaaagttgtgctgccctccctcccacaaacaaatgaatccagcgtggaggaaggcgcgccgccccgagctggagggcctggctcccaccatgccccccagtggctgcaggtagctggacttcctgcctgtgacgcacagagagcagcggactccggagcgtcagcctgccttagcccttggttcctcgttttttgggattgtcacactgtgacactcgggaggaacgatgtcctatcctgggctgctcartgttcccaggccctgtgtgccagaggccaggtctctccaagtgcatctagcctggcctggagggcaaggcagatgcattctcctggctgctgggagagcccatgggaaccttgcttagcgcccaaggtagatgagagacagggcagggaatctgcgtggtgctgggatgtggggactctggcctctccagactaatgttcctgtcacctgctgagctttcccagtgtcacttctgcagtcctcctctgctcacccctccctcactccrtgggcaattccctttctctctgtcactgcttcagcagtgaagacccatggcacctagaaatgcatgccagcttcctgcrtctaccactctgcagctcaaacaagaagctcagagctgccccttccacttcctccccaaaagggatgaagaaaaccctgtggtagaaccaaaccacccaaggccagcccttaagcctgcctccaccttcctggtgcatgacaaaatatttcttttgtctcagaggactttgatgcttcaatatttaatgatgaatccgccacactccattttccctcctctgaagctcccaacaactctgacagggtcagatctctttaaagcatcttcaggaggcggttgccacggagactggatattggtcccagggacaggctgtgctacctactgggtggtggggagggaagcttctggccatgcttgggcattcagaccaaccatcattaatgttaatagaggaaatgcagcaacgtcaaaagcaaggcaggttggttaattagatctggggcccgatgacctccctttcccactgctacagcccttttgacttcccccagcaggaagcgctgtctgtgcggctgagtctgggccacttgcttaattgcatttctggcagggaaggagaggagggatggagaagctctgctcgctgcttccacctcaccgtgtgtcctcccctcccctcccttcctctcctccccacaggcggaattgctttcttctgagccgggtgggctctcctgcagggagaatgcaggggtctgtgcttggctcttagcaaagcaggtggcccacagtgacctccaggaggtggctgattttcctttgtgccttcttatttctcagtaggaacttggaagggaagagctctgaaggagccagaggggcagccaccttgcatgagggtgaggaaggagaagcccagccagcctctacccatccctccctcccaattaggctgcactggggccgaacgcttccctgggctcccactgccttctaaggagccaaggagaattccctgcccactttctgttcctccatgcccaaactggcagatgcttctctgggagcaaggccacatgggctgatgcagctttgagtgctcaggttctgttttctggaagttgctggagaagggctgtcagggtgcttctatgaatatgggcttcagctgtagcacttggcagaaacgtgatgtgtcccacaaactgctggtggaggaagaagatgttcgtcagccaattcracctccagccagcttcttgagcctatttggtttaaaaaaaaaaagtcttctaatcagaagccactgattttataataaataacacttgttttgaa

SEQ ID NO: 4509 - DNA, 831 bp, Homo sapiens
tccaggatcagaagtactgaggagcagagccaatcttctctgtttggaaatagtggcttggaaatggacatgctccaggaccttgagtccctgcagtttgagtatggggttccagaggaagatcgtatctggctgtatttgcagggccgttctcggggactgatgatcgaggcttgtgcccatgcaaccttcttctgcaaactattatataatttgagagcatcattaaataagaatcaaagttccagacatctctcaattggctcccttaattcagccactcctgaagagtttaaggtgggcatcattggaggtggccaccttgggaagcagctggctggcacactgctgcagcttggccccatccctgctgaaagcctgcgratctccactcggaggccagagactctgggtgagctccagaagctgggaatcaaatgcttttaccataacgctgatctggtgagttgggccgatgtgatattcctctgctgcttgccrtctcagctgcctaatatctgcgtagaaatttacaccagccttgagaaggccagcattgtgtacagctttgtagctgccatcccactacccaggctgaaactactgttgaaccacaccaatatcttgcggcctcagtatcagtatgatgaagattctgtcagcgtctggggggccaataagggagtcatagctgctctccaagatcctacgattcttcaagctacctgtccctacagtcctgctggtcayggctcaacatatttctggcattcttttgaaaattactttcctgttggcccattgctatcttattaaatcaatctctctctc

SEQ ID NO: 4510 - DNA, 1482 bp, Homo sapiens
atggagatgggaggggctgtcaccatctttctggcactctgcttgtcttgcctgctcatcctcattgcctggaaaygaatgaataaggcaggaaagctgyccccaggtcctacaccaattcctttcctggggaasctgctgcaagttcgaactgacgctacgwttcagtctttcatgaagctcagggagaaatacagccctgtgttcactgtgtacatgggtccccggccagtggtggttttatgtggacaygaagcagtgaaggaagccttgrtagaccaagcggatgagttcagtggccgtggagaactggcttcaataaagcaaaacttccaaggtcatggtgtagctctggccaatggagaaygatggaggattctcygacgcttccccctgaccatccttcgggacttcgggatgggaaagcggagcattgaggagcgaattcaggaggaggccagctacctactggaggagttccggaagaccaagggtgcccccatcgaccccatcttcttgctgagccgcaccgtttccaacgtcaycagttccgttgtcttcagaagtcgcttcgactatgaggacaagcagttcctgaatctgctgcggttgatcaatgagagtttcattgagatgagcactccctgggcacagctatatgacatgtactctggaatcatgcagtatttkccaggaagacacaatctcatctactacttggtagaagagctcaaggacttcattgcctccagggtcaagatcaacgaagcatcctttgacccccaaaaccctcgggacttcattgactgctttctcatcaagatgcaccaggataaaaataatcctcgtacagaattcaacctcaagaacttggtcctcaccactctgaacctcttctttgctggcacggagacggtgagctctacactgcgctatggattcttgctgttaatgaagcatcctgaagtggaagctaagatccatgaagagattaaccargtgattggaccacaccggctcccaagggtggatgaccgggtcaagatgccctacacagatgcygtcatccacraaatacagagactggtagacatcgtgcccatgggtgtcccccacaacctcatccgggacactcagtttcgaggctaccttctgcccaagggcacagatgtatttcccctgcttggctctgtcctcaaagaccccaaatacttccgctacccagatgccttctatccccagcactttctggatgagcagggccgcttcaagaagaatgaagcctttgtgcctttttcctctggaaagcgcatctgcctgggcgaggccatggaccgcatggaactctttctctacttcacctccacccttcaraacttctctctacactcgctggtgccgcctgtggacatcgatatcacccccaagctctcaggctttggcaacatccccccgacctacgagctctgtcttgtggcccgc

SEQ ID NO: 4511 - DNA, 2868 bp, Homo sapiens
ttcttctgtttgcttactccctatccgggggcccaaggcgctgtctccgccgcccaagccccgcgtaaacctgggtgacctcggagacatccgttggagcatgagttcccgacatcaggcggcggyggtggtccgggagaaacccggcggcggggagataagcctgcccaggaggcagggggctgggctagctgccccgccccgcgcctgacttcgttggggagggagacgcccggctcccgcccctaactagcccagccgcgcggagcgcctgggagaggagaaggagccgacctgccgagatggaggcgaccggcacctgggcgctgctgctggcgctggcgctgctcctgctgctgacgctggcgctgtccgggaccagggcccgaggccacctgccccccgggcccacgccgctaccactgctgggaaacctcctgcagctacggcccggggcgctgtattcagggctcatgcggctgagtaagaagtacggaccggtgttcaccatctacctgggaccstggcggcctgtggtggtcctggttgggcaggaggctgtgcgggaggccctgggaggtcaggctgaggagttcagcggccggggaaccgtagcgatgctggaagggacttttgatggccatggggttttcttctccaacggggagcggtggaggcagctgaggaagtttaccatgcttgctctgcgggacctgggcatgggraagcgagaaggcgaggagctgatccaggcrgaggcccggtgtctggtggagacattccaggggacagaaggacrcccattcgatccctccctgctgctggcccaggccacctccaacgtagtctgctccctcctctttggcytccgcttctcctatgaggataaggagttccaggccgtggtccgggcagctggtggtaccctgctgggagtcagctcccaggggggtcagacctacgagatgttctcctggttcctgcggcccctgccaggcccccacaagcagctcctccaccacgtcagcaccttggctgccttcacagtccggcaggtgcagcagcaccaggggaacctggatgcttcgggccccgcacgtgaccttgtcgatgccttcctgctgaagatggcacaggaggaacaaaacccaggcacagaattcaccaacaagaacatgctgatgacagtcatttatttgctgtttgctgggacgatgacggtcagcaccacggtcggctataccctcctgctcctgatgaaataccctcatgtccaaaagtgggtacgtgaggagctgaatcgggagctgggggctggccaggcaccaagcctaggggaccgtacccgcctcccttacacygacgcggttctgcatgaggcgcagcggctgctggcgctggtgcccatgggaataccccgcaccctcatgcggaccacccgcttccgagggtacaccctgccccagggcacggaggtcttccccctccttggctccatcctgcatgaccccaacatcttcaagcacccagaagagttcaacccagaccgtttcctggatgcagatggacggttcaggaagcatgaggcgttcctgcccttctccttagggaagcgtgtctgccttggagagggcctggcaaaagcggagctcttcctcttcttcaccaccatcctacaagccttctccctggagagccygtgcccgccggacmccctgagcctcaagcccaccgtcagtggccttttcaacattcccccagccttccagctgcaagtccgtcccactgaccttcactccaccacgcagaccagatgaaggaaggcaacttggaagtggtgggtgcccrggacggtgcctccagcctcaacagtgggcatggacagggttaatgtctccagagtgtacactgcaggcagccacatttacacgcctgcagttgttttccggagtctgtcccacggcccacacgctcacttgactcatgctgctaagatgcacaaccgcacacccatacacaactacaagggccacaaagcaactgctgggttagctttccacagacataaatatagtccatctgcaatcacaagcacatagccaggtaacccaccaactcccctggatctgcagcccacacgtgggagtctggctgtcaccttcacaagccacagaaacggccacacatgttcacagctcacacgccctctccattcatcgaacttctcagtgtccctgtccctggtgcctggcacagggaacagcatgccccctccggggtcatgccacccagagactgtcgctgtctatggccccaactcatgctccctctcttggctacaccactctcccagcctgtgaccaccgatgtccacacacccccaaccacttgtccacacagctacccacgtacgacatcgtcctggctccccagagtatcttcccactgagacacgccgcccccacagaggcacagtccccagccacctctgcaactgcagccctcagtcacccctttttaagcaccctgattctaccaaatgcaaacacatctgggtctgcgattatgcacagagactttggacatacgaggaccctcagaccggaggaacacctgcccaaccccaacacgtgcttatgtaaccacgtggaaagcggcccctgctgcccctccacacacacatacacactcactgatctacagcccctgttcggcgtcagagtccccactagacccagtggaaggggttagagaccaagtaggggccagtttccaattcaccctgtcagggagtgarccggatctgacgttccttgtgacttaagggtccggcttgggaattaaagtttgtttctggcctttagccta

SEQ ID NO: 4512 - DNA, 2189 bp, Homo sapiens
ttcttctgtttgcttactccctatccgggggcccaaggcgctgtctccgccgcccaagccccgcgtaaacctgggtgacctcggagacatccgttggagcatgagttcccgacatcaggcggcggyggtggtccgggagaaacccggcggcggggagataagcctgcccaggaggcagggggctgggctagctgccccgccccgcgcctgacttcgttggggagggagacgcccggctcccgcccctaactagcccagccgcgcggagcgcctgggagaggagaaggagccgacctgccgagatggaggcgaccggcacctgggcgctgctgctggcgctggcgctgctcctgctgctgacgctggcgctgtccgggaccagggcccgaggccacctgccccccgggcccacgccgctaccactgctgggaaacctcctgcagctacggcccggggcgctgtattcagggctcatgcggctgagtaagaagtacggaccggtgttcaccatctacctgggaccstggcggcctgtggtggtcctggttgggcaggaggctgtgcgggaggccctgggaggtcaggctgaggagttcagcggccggggaaccgtagcgatgctggaagggacttttgatggccatggaggaacaaaacccaggcacagaattcaccaacaagaacatgctgatgacagtcatttatttgctgtttgctgggacgatgacggtcagcaccacggtcggctataccctcctgctcctgatgaaataccctcatgtccaaaggcacggaggtcttccccctccttggctccatcctgcatgaccccaacatcttcaagcacccagaagagttcaacccagaccgtttcctggatgcagatggacggttcaggaagcatgaggcgttcctgcccttctccttagggaagcgtgtctgccttggagagggcctggcaaaagcggagctcttcctcttcttcaccaccatcctacaagccttctccctggagagccygtgcccgccggacmccctgagcctcaagcccaccgtcagtggccttttcaacattcccccagccttccagctgcaagtccgtcccactgaccttcactccaccacgcagaccagatgaaggaaggcaacttggaagtggtgggtgcccrggacggtgcctccagcctcaacagtgggcatggacagggttaatgtctccagagtgtacactgcaggcagccacatttacacgcctgcagttgttttccggagtctgtcccacggcccacacgctcacttgactcatgctgctaagatgcacaaccgcacacccatacacaactacaagggccacaaagcaactgctgggttagctttccacagacataaatatagtccatctgcaatcacaagcacatagccaggtaacccaccaactcccctggatctgcagcccacacgtgggagtctggctgtcaccttcacaagccacagaaacggccacacatgttcacagctcacacgccctctccattcatcgaacttctcagtgtccctgtccctggtgcctggcacagggaacagcatgccccctccggggtcatgccacccagagactgtcgctgtctatggccccaactcatgctccctctcttggctacaccactctcccagcctgtgaccaccgatgtccacacacccccaaccacttgtccacacagctacccacgtacgacatcgtcctggctccccagagtatcttcccactgagacacgccgcccccacagaggcacagtccccagccacctctgcaactgcagccctcagtcacccctttttaagcaccctgattctaccaaatgcaaacacatctgggtctgcgattatgcacagagactttggacatacgaggaccctcagaccggaggaacacctgcccaaccccaacacgtgcttatgtaaccacgtggaaagcggcccctgctgcccctccacacacacatacacactcactgatctacagcccctgttcggcgtcagagtccccactagacccagtggaaggggttagagaccaagtaggggccagtttccaattcaccctgtcagggagtgarccggatctgacgttccttgtgacttaagggtccggcttgggaattaaagtttgtttctggcctttagccta

SEQ ID NO: 4513 - DNA, 1838 bp, Homo sapiens
ttgttagccaagatggcggtagcgatcgctgcagcgagggtctggmggctaaaccgtggtttgagccaggctgccctcctgctgctgcggcagcctggggctcggggactggctagatctcacccbcmcaggcagcagcagcagttttcatctctggatgacaagccccagttcccaggggcctcggcggagtttatagataagttggaattcatccagcccaacgtcatctctggaatccccatctaccgcgtcatggaccggcaaggccagatcatcaaccccagcgaggacccccacctgccgaaggagaaggtgctgaagctctacaagagcatgacactgcttaacaccatggaccgcatcctctatgagtctcagcggsagggccggatctccttctacatgaccaactatggtgaggagggcacgcacgtggggagtgccgccgccctggacaacayggacctggtgtttggccagtaccgggaggcaggtgtgctgatgtatcgggactacyccctggaactattcatggcccagtgctatggcaacatcagtgacttgggcaaggggcgcmagatgcctgtccactacggctgcaaggaacgccacttcgtcactatctcctctccactggccacgcagatycctcaggcggtgggggcggcgtacgcagccaagcgggccaatgccaacagggtcgtcatctgttacttcggcgagggggcagccagtgagggggacgcccatgccggcttcaacttcrctgccacacttgagtrccccatcatcttcttctgccggaacaatggctacgccatctccacgcccacctctgagcagtatcgyggcgatggcattgcagcaygaggccccrggtatggcatcatgtcaatccgcgtggatggtaatgatgtgtttgccgtatacaacgccacaaaggaggcccgacggcgggctgtggcagagaaccagcccttyctcaycgaggccatgacctacaggatcgggcaccacagcaccagtgacgacagttcagcgtaccgctcggtggatgaggtcaattactgggataaacaggaccaccccrtctcccggctgcggcactatctgctgagccaaggctggtgggatgaggagcaggagaaggcctggaggaagcagtcccgcaggaaggtgatggaggcctttgagcaggccgagcggaagcccaaacccaaccccaacctrctctkctcagacgtgtrtcaggagatgcccgcccagctycgcaagcagcaggagtctctggcccgccacctgcagacctacggggagcacwacccactggatcacttcgataagtgagacctgctcagcccacccccacccatcctcagctaccccgagaggtagccccactctaaggggagcagggggacctgacagcacaccactgtcttccccagtcagctccctctaaaatactcagcggccagggcggctgccactcttcacccctgctcctcccggctgttacattgtcaggggacagcatctgcagcagttgctgaggctccgtcagccccctcttcacctgttgttacagtgccttctcccaggggctgggtgagggcacattcaggactaraagcccctctgggcatggggtggacatggcaggtcagcctgtggaacttgcgcaggtgcgagtggccagcagaggtcacgaataaactgcatctctgcgcctggctctctaccacctctggtctttgtttcctggagtttgggggtgatttgaggccacccccagcttctccaccttagataaataaggtcaaggctcttgagat

SEQ ID NO: 4514 - DNA, 1508 bp, Homo sapiens
ttgttagccaagatggcggtagcgatcgctgcagcgagggtctggmggctaaaccgtggtttgagccaggctgccctcctgctgctgcggcagcctggggctcggggactggctagatctcacccbcmcaggcagcagcagcagttttcatctctggatgacaagccccagttcccaggggcctcggcggagtttatagataagttggaattcatccagcccaacgtcatctctggaatccccatctaccgcgtcatggaccggcaaggccagatcatcaaccccagcgaggacccccacctgccgaaggagaaggtgctgaagctctacaagagcatgacactgcttaacaccatggaccgcatcctctatgagtctcagcggsagggccggatctccttctacatgaccaactatggtgaggagggcacgcacgtggggagtgccgccgccctggacaacayggacctggtgtttggccagtaccgggaggcaggtgtgctgatgtatcgggactacyccctggaactattcatggcccagtgctatggcaacatcagtgacttgggcaaggggcgcmagatgcctgtccactacggctgcaaggaacgccacttcgtcactatctcctctccactggccacgcagatycctcaggcggtgggggcggcgtacgcagccaagcgggccaatgccaacagggtcgtcatctgttacttcggcgagggggcagccagtgagggggacgcccatgccggcttcaacttcrctgccacacttgagtrccccatcatcttcttctgccggaacaatggctacgccatctccacgcccacctctgagcagtatcgyggcgatggcattgcagcaygaggccccrggtatggcatcatgtcaatccgcgtggatggtaatgatgtgtttgccgtatacaacgccacaaaggaggcccgacggcgggctgtggcagagaaccagcccttyctcaycgaggccatgacctacaggatcgggcaccacagcaccagtgacgacagttcagcgtaccgctcggtggatgaggtcaattactgggataaacaggaccaccccrtctcccggctgcggcactatctgctgagccaaggctggtgggatgaggagcaggagaaggcctggaggaagcagtcccgcaggaaggtgatggaggcctttgagcaggccgagcggaagcccaaacccaaccccaacctrctctkctcagacgtgtrtcaggagatgcccgcccagctycgcaagcagcaggagtctctggcccgccacctgcagacctacggggagcacwacccactggatcacttcgataagtgagacctgctcagcccacccccacccatcctcagctaccccgagaggtagccccactctaaggggagcagggggacctgacagcacaccactgtcttccccagtcagctcccttgttacattgtcaggggacagcatctgcagcagttgctgaggctccg

SEQ ID NO: 4515 - DNA, 2895 bp, Homo sapiens
ccggaactgcagttgctgctgcagctgaggtacagcggcggtttctgaggttcttcactcgcgrctgacggagctgcggtrgcgtctccacacgcaaccatgaagttgaaggacacaaaatcaaggccaaagcagtcaagctgtggcaaatttcagacaaagggaatcaaagttgtgggaaaatggaaggaagtgaagattgacccaaatatgtttgcagatggacagatggatgacttggtgtgctttgaggaattgacagattaccagttggtctcccctgccaagaatccctccagtctcttctcaaaggaagcacccaagagaaaggcacaagctgtttcagaagaagaggaggaggaggagggaaagtctagctcaccaaagaaaaagatcaagttgaagaaaagtaaaaatgtagcaactgaaggaaccagtacccagaaagaatttgaagtgaaagatcctgagctggaggcccagggagatgacatggtttgtgatgatccggaggctggggagatgacatcagaaaacctggtccaaactgctccaaaaaagaagaaaaataaagggaaaaaagggttggagccttctcagagcactgctgccaaggtgcccaaaaaagcgaagacatggattcctgaagttcatgatcagaaagcagatgtgtcagcttggaaggacctgtttgttcccaggccggttctccgagcactcagctttctaggcttctctgcacccacaccaatccaagccctgaccttggcacctgccatccgtgacaaactggacatccttggggctgctgagacaggaagtgggaaaactcttgcctttgccatcccaatgattcatgcggtgttgcagtggcagaagaggaatgctgcccctcctccaagtaacaccgaagcaccacctggagagaccagaactgaggccggagctragactagatcaccaggcaaggctgaagctgagtctgatgcattgcctgacgatactgtaattgagagtgaagcactgcccaktgatattgcagccraggccagagccaagactggaggcactgtctcagaccaggcgttgctctttggtgacgatgatgctggtgaagggccttcttccctgatcagggagaaacctgttcccaaacagaatgagaatgaggaggaaaatcttgataaagagcagactggaaatctaaaacaggagttggatgacaaaagcgccacctgtaaggcatatccaaagcgtcctctgcttggactggttctgactcccactcgagagctggccgtccaggtcaaacagcacattgatgctgtggccaggtttacaggaattaaaactgctattttggttggtggaatgtccacgcagaaacagcagaggatgctgaaccgtcgtcctgagattgtggttgctactccaggccggctgtgggaattaattaaagaaaagcattatcatttgaggaaccttcggcagctcaggtgcctggtagtggatgaggctgaccggatggttgagaaaggccattttgctgagctctcacagctgctagagatgctcartgactcccaatacaacccaaagagacaaacgcttgttttttctgccacactcacmctggtgcatcargctcctgctcgaatccttcataagaagcacaccaagaaaatggataaaacagccaaacttgacctccttatgcagaaaattggcatgaggggcaagcccaaggtcattgacctcacaaggaatgaggccacggtggagacgctaacagagaccaagatccattgtgagactgatgagaaagacttctacttgtactacttcctgatgcagtatccaggccgcagcttagtgtttgccaacagtatctcctgcatcaaacgcctctctgggctcctcaaagtccttgatatcatgcccttgaccctgcatgcctgtatgcaccagaagcagaggctcagaaacctggagcagtttgcccgtctggaagactgtgttctcttggcaacagatgtggcrgctcggggtctggatattcctaaagtccagcatgtcatccattaccaggtcccacgtacctcggagatttatgtccaccgaagtggtcgaactgctcgagctaccaatgaaggcctcagtctgatgctcattgggcctgaggatgtgatcaactttaagaagatttacaaaacgctcaagaaagatgaggatatcccactgttccccgtgcagacaaaatacatggatgtggtcaaggagcgaatccgtttagctcgacagattgagaaatctgagtatcggaacttccaggcttgcctgcacaactcttggattgagcaggcagcagctgccctggagattgagctggaagaagacatgtataagggaggaaaagctgaccagcaagaagaacgtcggagacaaaagcagatgaaggttctgaagaaggagctgcgccacctgctgtcccagccactgtttacggagagccataagagcgagtctgctttgagctgtctctccaagcagaagaagaagaagacaaagaagccgaaggagccacagccggaacagccacagccaagtacaagtgcraattaactgccstggtcaagtgtgtcagtgactgcacattggtttctgttctctggctatttgcaaaacctctcccacccttgtgtttcactccaccaccaaccccaggtaaaaaagtctccctctcttccactcacacccatagcgggagagacctcatgcagatttgcattgttttggagtaagaattcaatgcagcagcttaatttttctgtattgcagtgtttataggcttcttgtgtgttaaacttgatttcataaattaaaaacaatggtcag

SEQ ID NO: 4516 - DNA, 2971 bp, Homo sapiens
ccggaactgcagttgctgctgcagctgaggtacagcggcggtttctgaggttcttcactcgcgrctgacggagctgcggtrgcgtctccacacgcaaccatgaagttgaaggacacaaaatcaaggccaaagcagtcaagctgtggcaaatttcagacaaagggaatcaaagttgtgggaaaatggaaggaagtgaagattgacccaaatatgtttgcagatggacagatggatgacttggtgtgctttgaggaattgacagattaccagttggtctcccctgccaagaatccctccagtctcttctcaaaggaagcacccaagagaaaggcacaagctgtttcagaagaagaggaggaggaggagggaaagtctagctcaccaaagaaaaagatcaagttgaagaaaagtaaaaatgtagcaactgaaggaaccagtacccagaaagaatttgaagtgaaagatcctgagctggaggcccagggagatgacatggtttgtgatgatccggaggctggggagatgacatcagaaaacctggtccaaactgctccaaaaaagaagaaaaataaagggaaaaaagggttggagccttctcagagcactgctgccaaggtgcccaaaaaagcgaagacatggattcctgaagttcatgatcagaaagcagatgtgtcagcttggaaggacctgtttgttcccaggccggttctccgagcactcagctttctaggcttctctgcacccacaccaatccaagccctgaccttggcacctgccatccgtgacaaactggacatccttggggctgctgagacaggaagtgggaaaactcttgcctttgccatcccaatgattcatgcggtgttgcagtggcagaagaggaatgctgcccctcctccaagtaacaccgaagcaccacctggagagaccagaactgaggccggagctragactagatcaccaggcaaggctgaagctgagtctgatgcattgcctgacgatactgtaattgagagtgaagcactgcccaktgatattgcagccraggccagagccaagactggaggcactgtctcagaccaggcgttgctctttggtgacgatgatgctggtgaagggccttcttccctgatcagggagaaacctgttcccaaacagaatgagaatgaggaggaaaatcttgataaagagcagactggaaatctaaaacaggagttggatgacaaaagcgccacctgtaaggcatatccaaagcgtcctctgcttggactggttctgactcccactcgagagctggccgtccaggtcaaacagcacattgatgctgtggccaggtttacaggaattaaaactgctattttggttggtggaatgtccacgcagaaacagcagaggatgctgaaccgtcgtcctgagattgtggttgctactccaggccggctgtgggaattaattaaagaaaagcattatcatttgaggaaccttcggcagctcaggtgcctggtagtggatgaggctgaccggatggttgagaaaggccattttgctgagctctcacagctgctagagatgctcartgactcccaatacaacccaaagagacaaacgcttgttttttctgccacactcacmctggtgcatcargctcctgctcgaatccttcataagaagcacaccaagaaaatggataaaacagccaaacttgacctccttatgcagaaaattggcatgaggggcaagcccaaggtcattgacctcacaaggaatgaggccacggtggagacgctaacagagaccaagatccattgtgagactgatgagaaagacttctacttgtactacttcctgatgcagtatccaggccgcagcttagtgtttgccaacagtatctcctgcatcaaacgcctctctgggctcctcaaagtccttgatatcatgcccttgaccctgcatgcctgtatgcaccagaagcagaggctcagaaacctggagcagtttgcccgtctggaagactgtgttctcttggcaacagatgtggcrgctcggggtctggatattcctaaagtccagcatgtcatccattaccaggtcccacgtacctcggagatttatgtccaccgaagtggtcgaactgctcgagctaccaatgaaggcctcagtctgatgctcattgggcctgaggatgtgatcaactttaagaagatttacaaaacgctcaagaaagatgaggatatcccactgttccccgtgcagacaaaatacatggatgtggtcaaggagcgaatccgtttagctcgacagattgagaaatctgagtatcggaacttccaggcttgcctgcacaactcttggattgagcaggcagcagctgccctggagattgagctggaagaagacatgtataagggaggaaaagctgaccagcaagaagaacgtcggagacaaaagcagatgaaggttctgaagaaggagctgcgccacctgctgtcccagccactgtttacggagagccagaaaaccaagtatcccactcagtctggcaagccgcccctgcttgtgtctgccccaagtaagagcgagtctgctttgagctgtctctccaagcagaagaagaagaagacaaagaagccgaaggagccacagccggaacagccacagccaagtacaagtgcraattaactgccstggtcaagtgtgtcagtgactgcacattggtttctgttctctggctatttgcaaaacctctcccacccttgtgtttcactccaccaccaaccccaggtaaaaaagtctccctctcttccactcacacccatagcgggagagacctcatgcagatttgcattgttttggagtaagaattcaatgcagcagcttaatttttctgtattgcagtgtttataggcttcttgtgtgttaaacttgatttcataaattaaaaacaatggtcagagccattgtgtcatcctga

SEQ ID NO: 4517 - DNA, 964 bp, Homo sapiens
gcggccgccctctctggacccgggaacccacmggcccagagcgacccgcgataggaacccgggttcctggcctcagcccctctccagagtcggctccaaccccgctcgttttggtactcaccgtgtggagacgcyaccgcagctccgtcagycgcgagtgaagaacctcagaaaccgccgctgtacctcagctgcagcagcaactgcagttccggggcgrgacctccacgcacgtactcgtgcgcgctggggaggaagtcccgcccctatggcaaactcagctacctgattggctgcctcgcggaccgcagcagtgcmggcgggagagctggcttggggcgctggcacctcctcttacagctttactcctgccagcttgggaaaaggccggagaaggtgaaattctgtgtgctccctccggcgagagactttgtcagctcccgcacagtaacgtggaagtccaagaatccgagtggaggctcacygaggcgaaggggccaaccatrggaaaggagagtggatgggactcaggcagggctgctgtagcagctgtggtcggaggagttgtggctgtggggactgtgctygtggcgctcagtgccatgggcttcacctcagtaggaatcgccgcatcctccatagcagccaagatgatgtctacagcagccattgccaacgggggcggagttgctgctggcagtctggtggctattctgcagtcagtgggggcagctggactctctgtgacatctaaagttatcgggggctttgctgggacagctcttggggcctggctgggttcacccccttccagctgaacaccacactgaggcagggagttggctctcttggtggagatgactttcctgggcctctggatgacaatcttccaaaggacaagtctcctactcccaaaactatttaaggaagcatgaaaaataaagatgctggttatcttctccta

SEQ ID NO: 4518 - DNA, 961 bp, Homo sapiens
gcggccgccctctctggacccgggaacccacmggcccagagcgacccgcgataggaacccgggttcctggcctcagcccctctccagagtcggctccaaccccgctcgttttggtactcaccgtgtggagacgcyaccgcagctccgtcagycgcgagtgaagaacctcagaaaccgccgctgtacctcagctgcagcagcaactgcagttccggggcgrgacctccacgcacgtactcgtgcgcgctggggaggaagtcccgcccctatggcaaactcagctacctgattggctgcctcgcggaccgcagcagtgcmggcgggagagctggcttggggcgctggcacctcctcttacagctttactcctgccagcttgggaaaaggccggagaaggtgaaattctgtgtgctccctccggcgagagactttgtcagctcccgcacagtaacgtaatccaagaatccgagtggaggctcacygaggcgaaggggccaaccatrggaaaggagagtggatgggactcaggcagggctgctgtagcagctgtggtcggaggagttgtggctgtggggactgtgctygtggcgctcagtgccatgggcttcacctcagtaggaatcgccgcatcctccatagcagccaagatgatgtctacagcagccattgccaacgggggcggagttgctgctggcagtctggtggctattctgcagtcagtgggggcagctggactctctgtgacatctaaagttatcgggggctttgctgggacagctcttggggcctggctgggttcacccccttccagctgaacaccacactgaggcagggagttggctctcttggtggagatgactttcctgggcctctggatgacaatcttccaaaggacaagtctcctactcccaaaactatttaaggaagcatgaaaaataaagatgctggttatcttctccta

SEQ ID NO: 4519 - DNA, 2820 bp, Homo sapiens
ctcttttgcataggtggaatcacagtgtctgtggttgcattcttcttcacaattaagttcctctttgagcttgccgcacgtgtagtcagcttcctccagaatgaggaccgcgagcgccgaggggaccggactatttatgactacgtgcggggaaattacctggatccccggtcttgcaaagtctcctgggattggaaggacccctatgaggtgggccacagcatggccttccgagtgcatttattctataagaacgggcagcctttccctgcacatcggcctgtgggactaagagttcacatctctcatgtcgagctagcagtggaaattccagtgacccaggaagtccttcaggagcccaattccaacgtagtaaaagtggccttcactgtgcgcaaggctgggcgttatgaaatcacagtgaagcttggtggattaaatgtggcatatagtccctactacaaaatttttcaacctggaatggtggttccttctaagaccaaaattgtgtgccacttttctactcttgtattgacctgtgggcagccgcacacccttcaaatagtaccccgagatgagtatgataatcccaccaacaattccatgtccttgagagwtgagcacaattacaccttgtccattcatgagctcggccctcaagaagaagagagtactggtgtctcatttgagaaatcagtaacatccaacaggcagactttccaggtgttcttgcgactcaccctgcattctcgaggctgcttccatgcttgcatttcataccaaaatcagccaatcaataatggtgaatttgacattattgtcctaagtgaggatgagaagaatatcgtcgaacgcaatgtgtccacttcaggygtgagcatttactttgaggcttatctttataatgctaccaactgtagcagcactccatggcacctgccacccatgcacatgacctcttcccagcgccggccatccactgctgttgacgaggaagatgaagactcgccctctgagtgccacacccctgagaaggtgaagaaaccgaagaaggtgtactgctatgtgtcaccaaagcaattctcagtgaaggagttctacctgaagatcatcccctggcgcctttacaccttccgagtgtgtccaggaacaaaattttcataccttggtcctgaccctgtccataagctgctcacactggtggtggatgatggcattcaacctcctgtggagctcagctgtaaggagaggaacattctagcagccacttttatccgctccctgcataagaacataggaggctctgagacctttcaggacaaggtgaactttttccagcragagcttcggcaggtacatatgaaaagaccacattccaaagtcaccctgaaggtcagcagacatgccttgttggaatcgtctctgaaagccactcggaatttctccatctcagattggagcaagaactttgaggttgttttccaggatgaagaagctctggactggggagggcctcgccgggaatggtttgagctaatctgcaaagcactatttgataccaccaatcagctcttcacccggttcagtgacaacaaccaagcattagtgcatcccaaccctaatcgccccgctcatctgcgcctgaaaatgtatgagtttgcgggacggctcgtgggcaagtgtctctatgagtcctctctaggaggagcctacaagcagttggtccgagctcgcttcacccgctctttcctggcccaaatcataggactgcgtatgcattacaagtactttgaaacagatgacccagaattctacaaatctaaagtttgttttatcctcaacaatgacatgagtgagatggagctggtctttgcagaagagaaatataataaatcaggtcaattggataaggttgtagaactcatgacaggtggagctcaaactccagtcaccaatgcgaataaaatcttctatttaaatttgctggcccaatatcggctggccagtcaagtgaaagaggaggtggaacatttcctaaaaggcctgaatgaattggtccctgagaaccttttggctatttttgatgagaatgagcttgagctgctgatgtgtgggactggagacatcagtgtgtctgacttcaaagcccatgcagtagttgttggtggctcatggcatttcagagaaaaggtcatgaggtggttttggactgtggtttccagtctgacccaggaggagttggctcggctacttcagttcacaacaggctcctctcagctaccacctggaggctttgccgccctctgtccctcatttcagattattgccgctccgacccatagcacgctgcctactgcacacacatgttttaaccagctgtgcctccctacatatgactcctatgaagaggtgcacaggatgctgcagctggccatcagcgagggttgcgagggctttggcatgctctgaccactctcctgtcatccagttggctcccatgctctctggagcttctgggcgcaagttacagacatcataaccactgatcctaacacacataaccatcagccagaagatgccgcatgctcccctgtgtctggaggattttgtcacctacaagccttgtctttacctcacctgctccctgcccatatctmccacaggccactttggcatgaaattcaatatagaaaatttggaaataagaaaaagaacaagggaaataggcaggccagagagaatgagtactcaagacacctggcccaaacattcatgaagaagacaccaagtcagaagagacttcctcctttgcatgatcct

SEQ ID NO: 4520 - DNA, 2117 bp, Homo sapiens
agcccggaagcggaaactccttggggaaagggcaatcccccgagccggttcccaggccgggtggagaccaactctggggtctsttggtgggagagtggggagcccgtcttctgctgagtgctgccgccccttcccaggacagcggaggtggaacttcgtcgcgctgcaacccccggctcgggatcctggggcgtcctttggcagtygattgcaccctgcactagagagaagtccaggaatgatatattcttgggctgtatttctctaccctggagttcatccagttcatcccagaaacactgacctgattactgtgacaaagtctgatggatagaccctttctgttgaccttgtggcgtttttctttcatgtggaagttggaagacaaggtgaaaggggccaaaagttacctgctttggtgaataggagtgctctacttggttctcagaacatgggccctcgtttaaagctgcagctgtgatcctyggctgtctgttggcattgacgggacctgatgttttacgttattggtggaatcacagtgtctgtggttgcattcttcttcacaattaagttcctctttgagcttgccgcacgtgtagtcagcttcctccagaatgaggaccgcgagcgccgaggggaccggactatttatgactacgtgcggggaaattacctggatccccggtcttgcaaagtctcctgggattggaaggacccctatgaggtgggccacagcatggccttccgagtgcatttattctataagaacgggcagcctttccctgcacatcggcctgtgggactaagagttcacatctctcatgtcgagctagcagtggaaattccagtgacccaggaagtccttcaggagcccaattccaacgtagtaaaagtggccttcactgtgcgcaaggctgggcgttatgaaatcacagtgaagcttggtggattaaatgtggcatatagtccctactacaaaatttttcaacctggaatggtggttccttctaagaccaaaattgtgtgccacttttctactcttgtattgacctgtgggcagccgcacacccttcaaatagtaccccgagatgagtatgataatcccaccaacaattccatgtccttgagagwtgagcacaattacaccttgtccattcatgagctcggccctcaagaagaagagagtactggtgtctcatttgagaaatcagtaacatccaacaggcagactttccaggtgttcttgcgactcaccctgcattctcgaggctgcttccatgcttgcatttcataccaaaatcagccaatcaataatggtgaatttgacattattgtcctaagtgaggatgagaagaatatcgtcgaacgcaatgtgtccacttcaggygtgagcatttactttgaggcttatctttataatgctaccaactgtagcagcactccatggcacctgccacccatgcacatgacctcttcccagcgccggccatccactgctgttgacgaggaagatgaagactcgccctctgagtgccacacccctgagaaggtgaagaaaccgaagaaggtgtactgctatgtgtcaccaaagcaattctcagtgaaggagttctacctgaagatcatcccctggcgcctttacaccttccgagtgtgtccaggaacaaaagtaagctgaaccttacatctggttcacatcaagcatgcttcatctctggactatctcagccttttattttttctcagaagcacttttagtgtttctgcaagatctcacagtgtacacaggattcgttgccaaataaagcatcattatctcctcactaaatggcatgaagaatatataaattctggaaggacgcatgcctacagaaacaggaattagcagcaactcagaatacttcaacagtgatcctttgccttcaagactaagttaatagagaagatgtttgtaactctggcccaagcttggtctcccagtgtgctgaagctaactccttttagaagcaccactctcatatattaaaatacattgtttgtttgttgttaacttttctgggcttctggaatctaaacttttgcccaaaggctagaatgtgccattttataaaaat

SEQ ID NO: 4521 - DNA, 5457 bp, Homo sapiens
agcccggaagcggaaactccttggggaaagggcaatcccccgagccggttcccaggccgggtggagaccaactctggggtctsttggtgggagagtggggagcccgtcttctgctgagtgctgccgccccttcccaggacagcggaggtggaacttcgtcgcgctgcaacccccggctcgggatcctggggcgtcctttggcagtygattgcaccctgcactagagagaagtccaggaatgatatattcttgggctgtatttctctaccctggagttcatccagttcatcccagaaacactgacctgattactgtgacaaagtctgatggatagaccctttctgttgaccttgtggcgtttttctttcatgtggaagttggaagacaaggtgaaaggggccaaaagttacctgctttggtgaataggagtgctctacttggttctcagaacatgggccctcgtttaaagctgcagctgtgatcctyggctgtctgttggcattgacgggacctgatgttttacgttattggtggaatcacagtgtctgtggttgcattcttcttcacaattaagttcctctttgagcttgccgcacgtgtagtcagcttcctccagaatgaggaccgcgagcgccgaggggaccggactatttatgactacgtgcggggaaattacctggatccccggtcttgcaaagtctcctgggattggaaggacccctatgaggtgggccacagcatggccttccgagtgcatttattctataagaacgggcagcctttccctgcacatcggcctgtgggactaagagttcacatctctcatgtcgagctagcagtggaaattccagtgacccaggaagtccttcaggagcccaattccaacgtagtaaaagtggccttcactgtgcgcaaggctgggcgttatgaaatcacagtgaagcttggtggattaaatgtggcatatagtccctactacaaaatttttcaacctggaatggtggttccttctaagaccaaaattgtgtgccacttttctactcttgtattgacctgtgggcagccgcacacccttcaaatagtaccccgagatgagtatgataatcccaccaacaattccatgtccttgagagwtgagcacaattacaccttgtccattcatgagctcggccctcaagaagaagagagtactggtgtctcatttgagaaatcagtaacatccaacaggcagactttccaggtgttcttgcgactcaccctgcattctcgaggctgcttccatgcttgcatttcataccaaaatcagccaatcaataatggtgaatttgacattattgtcctaagtgaggatgagaagaatatcgtcgaacgcaatgtgtccacttcaggygtgagcatttactttgaggcttatctttataatgctaccaactgtagcagcactccatggcacctgccacccatgcacatgacctcttcccagcgccggccatccactgctgttgacgaggaagatgaagactcgccctctgagtgccacacccctgagaaggtgaagaaaccgaagaaggtgtactgctatgtgtcaccaaagcaattctcagtgaaggagttctacctgaagatcatcccctggcgcctttacaccttccgagtgtgtccaggaacaaaattttcataccttggtcctgaccctgtccataagctgctcacactggtggtggatgatggcattcaacctcctgtggagctcagctgtaaggagaggaacattctagcagccacttttatccgctccctgcataagaacataggaggctctgagacctttcaggacaaggtgaactttttccagcragagcttcggcaggtacatatgaaaagaccacattccaaagtcaccctgaaggtcagcagacatgccttgttggaatcgtctctgaaagccactcggaatttctccatctcagattggagcaagaactttgaggttgttttccaggatgaagaagctctggactggggagggcctcgccgggaatggtttgagctaatctgcaaagcactatttgataccaccaatcagctcttcacccggttcagtgacaacaaccaagcattagtgcatcccaaccctaatcgccccgctcatctgcgcctgaaaatgtatgagtttgcgggacggctcgtgggcaagtgtctctatgagtcctctctaggaggagcctacaagcagttggtccgagctcgcttcacccgctctttcctggcccaaatcataggactgcgtatgcattacaagtactttgaaacagatgacccagaattctacaaatctaaagtttgttttatcctcaacaatgacatgagtgagatggagctggtctttgcagaagagaaatataataaatcaggtcaattggataaggttgtagaactcatgacaggtggagctcaaactccagtcaccaatgcgaataaaatcttctatttaaatttgctggcccaatatcggctggccagtcaagtgaaagaggaggtggaacatttcctaaaaggcctgaatgaattggtccctgagaaccttttggctatttttgatgagaatgagcttgagctgctgatgtgtgggactggagacatcagtgtgtctgacttcaaagcccatgcagtagttgttggtggctcatggcatttcagagaaaaggtcatgaggtggttttggactgtggtttccagtctgacccaggaggagttggctcggctacttcagttcacaacaggctcctctcagctaccacctggaggctttgccgccctctgtccctcatttcagattattgccgctccgacccatagcacgctgcctactgcacacacatgttttaaccagctgtgcctccctacatatgactcctatgaagaggtgcacaggatgctgcagctggccatcagcgagggttgcgagggctttggcatgctctgaccactctcctgtcatccagttggctcccatgctctctggagcttctgggcgcaagttacagacatcataaccactgatcctaacacacataaccatcagccagaagatgccgcatgctcccctgtgtctggaggattttgtcacctacaagccttgtctttacctcacctgctccctgcccatatctmccacaggccactttggcatggtatgtaagctgagctcttcattctgtcatgagaagaggaccatgctgctatcatttatttggtcctttgaagatctcagtagctgagggagatggcacacggggctcagccctgttgggaaactggtgtggagacccttaaatccacactgtgctccaaaactccctctgctgatactccttggagacaccctctttggccctcactacttgaccagactggtacttgagtccttctcatgggtggggtgattgcctcttctcatcaggagccaggagagagggggacagataggaggtggcccataggagcagtcccgctgcacaatggtaggcataggccatggcactggactgcctctaaggactgctaaaaagaatatttttttgtggtgtcagaactggaaaaagcactttcccttcgggcatttctggaaatgattattaatccacaaagaagaactctgtaagctttttcttgaattgtagccagtgagaaaagcagatagactgaagaatatgaaggatagctgagctgtagcctccagagtggggcatgcctaggcatatggctggcttggagactactgatgcttttccctgagtttgttattggcactgaagtatggccggcttgggccactgacttccccattatgtagtctgctaaaagctggggatcctttagcattctactgaagaaaattttgtagcaaaagattagaacagtaagaatagtatgccagcaatccctgattctctctctgcttggtgttctctggcagcactaagacaaaggaacagggactaggagtttacgtgcttatcacaggtccttggcgtcaggacactagggatgaacatggaggtgatatgttacacagtaaacacctgccaacccctgtactcccctttgctccatcagttatcaggaaggagaactaaggagggaggaagcttattaggttcactgttgaatgatgattgaagagtacctgctgctgtatcttggaagatgacaacatcctttttcattactgtttgattgaaaataatttcaagattcaaaatctcattgacttcccaaatttgtgtttttaagaaggctttgctgcaagctaccattcccaatggggcagtcaactctgagaatattacaagccatctttattgccaaaaccagcaagtacacagagtcctgaaacaaggcaggactttggcaatgscttggcctcctggaagcatgtctgagccctcctgttcgcagggatcatgaggaacaagccctcctgagctgctacagttcctgcctgacctcagtctttcgcagtcatcatttgtcctttcttggcacatgggtgctgacctcactcatccttggggtccgggatccagcaycakggtctctataccccaggatcctccatgccacatggtcactgctctcctcagggaccaggacaaggtgctgctgcttgcccaaatgttttcccatgggatatgtaccggaaggtttatcaccaccctgggaaacataatgctgccccttgggcccagaaaggggtttccagctgggggcacgtggactggttctgctgtttttggcagtcgcttttctgaattctcccctccggcagccttccagagactgatcctggagattgagttgattgtcttggctagacctgtcattttaagctctagtcatagcactttttcagagcatcttaggcaccattgcaacccaaccagggaagctgcatccctgtggtggtccttaggcaccagtytttgtkaaacaaaaccctttggcactattgtggttttctattctctgtctgaactctattcaaaagtatctttgctctcttgggccttttcttttactgttttgttttktttttttctaatcctgctttcatactagccagtgtggggaaaaggtacaatatgtcaaagagatgagagagtgttatttcttgggcaattttctattagtgtttcttattttggccagttcttttatttatgtccttgtgacccaggtacttggggggccagctacccttytggccttttagcgtctttgaaggagaccagacatgagtgaatacctaggagagtgtcagcatgtttytggaaaattggcagagaccaagccctgctgcagattcgtcaggccaggtgaaagggccaggcagttgcagctgatgatgtaaatattttgtacagtagataaataaatgtttaaaagaactaagga

SEQ ID NO: 4522 - DNA, 2680 bp, Homo sapiens
ttgtccggccctatatccggtgtccgcccgccctcggctcctccgccgtgatgctgtcccgatcccgctgtgtgtctcgggcgttcagccgctcgctctccgccttccagaaggggaactgccctctagggagacgttccctgcctggggtctccttatgccagggaccaggttaccctaacagcaggaaggttgtcattaacaacagtgtcttcagtgttcgctttttcagaactacagctgtatgcaaggatgacttggttacagtcaaaaccccagcgtttgcagaatctgtcacagagggagatgtcaggtgggagaaagctgttggagacacagttgcagaagatgaagtggtttgtgagattgaaactgacaagacatctgtgcaggttccatcaccagcaaatggcgtgattgaagctcttttggtacctgatgggggaaaagtcgaaggaggcactccacttttcacactcaggaaaactggtgctgctcctgctaaggccaagccggctgaagctcctgctgctgcagccccaaaagcagaacctacagcagcggsagttcctccccctgcagcacccatacccactcagatgccaccggtgccctcgccctcacarcctccttctggcaaacctgtgtctgcagtaaaacccactgttgccccaccactagctgasscaggagctggcaaaggtctgcgttcagaacatcgggagaaaatgaacaggatgcggcarcgcattgctcagcgtctgaaggaggcccagaatacatgtgcaatgctgacaacttwtaatgagattgacatgagtaacatccaggaratgagggctcggcacaaagaggcttttttgaagaaacataacctcaaactaggcttcatgtcggcatttgtgaaggcctcagcctttgccttgcaggaacagcctgttgtaaatgcagtgattgacgacacaaccaaagaggtggtgtatasggattatattgacatcagtgttgcagtggccaccccacggggtctggtggttccagtcatcaggaatgtggaagctatgaattttgcagatattgaacggaccatcactgaactgggagagaaggcccgaaagaatgaacttgccattgaagatatggatggyggtaccttcaccattagcaatggaggcgtttttggctcgctctttggaacacccattatcaacccccctcagtctgccatcctggggatgcatggcatctttgacaggccagtggctataggaggcaaggtagaggtgcggcccatgatgtacgtggcactgacctatgatcaccggctgattgatggcagagaggctgtgactttcctccgcaaaatcaaggcagcggtagaggatcccagagtcctcctcytkgatctttaggaggaacccacacaccctacaarttgatcatscaggaactgaaaaccagtcttctccctgtcccctcatgggtcccrggttagcctggtgacaggcagacacatgctgttggcctcaagcaaggaagcagagcactrtgtaaccagcagtcacagstyttttcttggcgttsstgccwggctctccctctctgcacctgtckcatascctcgaatatcttaattccttaggcttaagagagagagccttaatggatgctcattcatattcctgcctttcttccatcagctctctgcaaagatgattttgcttytccctagtgctggtatactatagagaaaccccyggggaycatgtgattaagttcctatcttttgaaagtttgttctgcagagacttctaggaggatgctgtgcctcccaagctcakagcagcctctgtcctggctgtgcacattctcccttgattccacttgtgtggagggattgarcacaggcamagaggtgctgctttgcttcttcaatggcaccttcattctccgttgtcattgacttcaagatgcctcttctacctcttccaggaagcacaggccaggggatctgggtgtgtgagtgggaggagagggcagaggtcccctgaggtcatgcattgtaatcatcatagaaggagagcccaggcctgccctcacgctctccatcataggctgacaccaagaagactcgtcttggcacaatctcacacagctggggctgtagcaaccctttccaacccctttgctggttgctgggcctcattctagcaccttgttcttagagcagattctagcacatcatggcagtgggaccaagcgtggtcccgaggaagggccagagcctggtagagaytagggaagggaggtctcctctaractgactcacattgccttgagcttttcagttaagttgctgtaagcacctgggctgaggaggcagtttttgttccttcctgcgttatagcggggccttgtctcttcctctgcaggacacagatctggaggacgtggactgsggtaggaaaccaccctgagggtgttagtacctagtggtgaaayggatgaggtcatttctaaggtgtgttgcccgtggatctgggcacaatcattggaattccttggaccaatactgagtgcctgcagcatctactactctgtcttcactattcagaacttgtaactaaagtatttaaagaaactgattttaaatgcaaattaaagggcagatattctcaaa

SEQ ID NO: 4523 - DNA, 3052 bp, Homo sapiens
ttgtccggccctatatccggtgtccgcccgccctcggctcctccgccgtgatgctgtcccgatcccgctgtgtgtctcgggcgttcagccgctcgctctccgccttccagaaggggaactgccctctagggagacgttccctgcctggggtctccttatgccagggaccaggttaccctaacagcaggaaggttgtcattaacaacagtgtcttcagtgttcgctttttcagaactacagctgtatgcaaggatgacttggttacagtcaaaaccccagcgtttgcagaatctgtcacagagggagatgtcaggtgggagaaagctgttggagacacagttgcagaagatgaagtggtttgtgagattgaaactgacaagacatctgtgcaggttccatcaccagcaaatggcgtgattgaagctcttttggtacctgatgggggaaaagtcgaaggaggcactccacttttcacactcaggaaaactggtgctgctcctgctaaggccaagccggctgaagctcctgctgctgcagccccaaaagcagaacctacagcagcggsagttcctccccctgcagcacccatacccactcagatgccaccggtgccctcgccctcacarcctccttctggcaaacctgtgtctgcagtaaaacccactgttgccccaccactagctgasscaggagctggcaaaggtctgcgttcagaacatcgggagaaaatgaacaggatgcggcarcgcattgctcagcgtctgaaggaggcccagaatacatgtgcaatgctgacaacttwtaatgagattgacatgagtaacatccaggaratgagggctcggcacaaagaggcttttttgaagaaacataacctcaaactaggcttcatgtcggcatttgtgaaggcctcagcctttgccttgcaggaacagcctgttgtaaatgcagtgattgacgacacaaccaaagaggtggtgtatasggattatattgacatcagtgttgcagtggccaccccacggggtctggtggttccagtcatcaggaatgtggaagctatgaattttgcagatattgaacggaccatcactgaactgggagagaaggcccgaaagaatgaacttgccattgaagatatggatggyggtaccttcaccattagcaatggaggcgtttttggctcgctctttggaacacccattatcaacccccctcagtctgccatcctggggatgcatggcatctttgacaggccagtggctataggaggcaaggtagaggtgcggcccatgatgtacgtggcactgacctatgatcaccggctgattgatggcagagaggctgtgactttcctccgcaaaatcaaggcagcggtagaggatcccagagtcctcctcytkgatctttaggaggaacccacacaccctacaarttgatcatscaggaactgaaaaccagtcttctccctgtcccctcatgggtcccrggttagcctggtgacaggcagacacatgctgttggcctcaagcaaggaagcagagcactrtgtaaccagcagtcacagstyttttcttggcgttsstgccwggctctccctctctgcacctgtckcatascctcgaatatcttaattccttaggcttaagagagagagccttaatggatgctcattcatattcctgcctttcttccatcagctctctgcaaagatgattttgcttytccctagtgctggtatactatagagaaaccccyggggaycatgtgattaagttcctatcttttgaaagtttgttctgcagagacttctaggaggatgctgtgcctcccaagctcakagcagcctctgtcctggctgtgcacattctcccttgattccacttgtgtggagggattgarcacaggcamagaggtgctgctttgcttcttcaatggcaccttcattctccgttgtcattgacttcaagatgcctcttctacctcttccaggaagcacaggccaggggatctgggtgtgtgagtgggaggagagggcagaggtcccctgaggtcatgcattgtaatcatcatagaaggagagcccaggcctgccctcacgctctccatcataggctgacaccaagaagactcgtcttggcacaatctcacacagctggggctgtagcaaccctttccaacccctttgctggttgctgggcctcattctagcaccttgttcttagagcagattctagcacatcatggcagtgggaccaagcgtggtcccgaggaagggccagagcctggtagagaytagggaagggaggtctcctctaractgactcacattgccttgagcttttcagttaagttgctgtaagcacctgggctgaggaggcagtttttgttccttcctgcgttatagcggggccttgtctcttcctctgcaggacacagatctggaggacgtggactgsggtaggaaaccaccctgagggtgttagtacctagtggtgaaayggatgaggtcatttctaaggtgtgttgcccgtggatctgggcacaatcattggaattccttggagccactgggattcatggctttgtatccaactgcatccaggcctgaggctgctgacgtttgacaccagggccagtagagagtgcccttttgtatcttaagccaagaagtgaggcctgggggtgggggaggggggaaggggtgggagccaatactgagtgcctgcagcatctactactctgtcttcactattcagaacttgtaactaaagtatttaaagaaactgattttaaatgcaaattaaagggcagatattctcaaacagggttcctgtatctgttccttttggctactgaggtggtacaagtccccagcactgttgcactgaaattattgaaagccactcaaggtcctgttgcttattttgtgaaatcagaaatcccttatgtggaacttaacactcataatttgacagaaggtagaaccctgactgccagccgggaaagtgttgccaaaaagagtcaacctctgtaaaaatatttgaagaga

SEQ ID NO: 4524 - DNA, 1083 bp, Homo sapiens
tccaatcacaggggctcatcctcagggactactttgcaatcggcgcagagcgcagtgagaagagcttgaaaaaaacctctggtatcgggaagtgtagttcaacacttgaaggaaatgctttggagattgcgccacaaccagggcagcgtaaactacagttcccagagagcgccgcgtcgggagcggagccttttctcgctaacaccgctcgccctctccgagtcagttccgcggtagaggtgacctgactctctgaggctcattttgcagttgttgaaattgtccccgcagttttcaatcatgtctgaaccaatcagagtccttgtgactggagcagctggtcarattgcatattcactgctgtacagtattggaaatggatctgtctttggtaaagatcagcctataattcttgtgctgttggatatcacccccatgatgggtgtcctggacggtgtcctaatggaactgcaagactgtgcccttcccctcctgaaagatgtcatcgcaacagataaagaagacgttgccttcaaagacctggatgtggccattcttgtgggctccatgccaagaagggaaggcatggagagaaaagatttactgaaagcaaatgtgaaaatcttcaaatcccagggtgcagccttagataaatacgccaagaagtcagttaaggttattgttgtgggtaatccagccaataccaactgcctgactgcttccaagtcagctccatccatccccaaggagaacttcagttgcttgactcgtttggatcacaaccgagctaaagctcaaattgctcttaaacttggtgtgactgctaatgatgtaaagaatgtcattatctggggaaaccattcctcgactcagtatccagatgtcaaccatgccaaggtgaaattgcaaggaaaggaagttggtgtttatgaagctctgaaagatgacagctggctcaagggagaatttactgtgcagcagcgtggcgctgctgtcatcaaggctcgaaaactatccagtgccatgtctgctgcaaaagccatctgtgaccacgtcagggacatctggtttggaaccccagag

SEQ ID NO: 4525 - DNA, 1217 bp, Homo sapiens
tccaatcacaggggctcatcctcagggactactttgcaatcggcgcagagcgcagtgagaagagcttgaaaaaaacctctggtatcgggaagtgtagttcaacacttgaaggaaatgctttggagattgcgccacaaccagggcagcgtaaactacagttcccagagagcgccgcgtcgggagcggagccttttctcgctaacaccgctcgccctctccgagtcagttccgcggtagaggtgacctgactctctgaggctcattttgcagttgttgaaattgtccccgcagttttcaatcatgtctgaaccaatcagagtccttgtgactggagcagctggtcarattgcatattcactgctgtacagtattggaaatggatctgtctttggtaaagatcagcctataattcttgtgctgttggatatcacccccatgatgggtgtcctggacggtgtcctaatggaactgcaagactgtgcccttcccctcctgaaaggtggatgtcatcgcaacagataaagaagacgttgccttcaaagacctggatgtggccattcttgtgggctccatgccaagaagggaaggcatggagagaaaagatttactgaaagcaaatgtgaaaatcttcaaatcccagggtgcagccttagataaatacgccaagaagtcagttaaggtgaccaatgctgtattttatgggatttttcattattagcatttgaaacttatgcttttagcatttaagcaaaaccaaaattatttgcccttttttctagttctgtacaatcatcagtaaatacggctctagagttttgcttgataagctctccctttctgggttttttcttacagtatagaaatctatattcagagtgctcaaaaatatttttcctattagtataacgtgaaaatttagtattagttcttaaacatatagagaaggcacaggatcttctggtgcatttttgctgcgtgggaatatttatttagacatttaaatttgtgtgtgattgtgaaaggagatagctagctgtaaggtaagtttattctcaggaatagaagatagtggtttctgaatgctcagattttcttaatgcagaggaattttaatatgcttgtctcttgaagaattgagtcagtatgacttatagttctctctttgtgttcaaactatttactttagattctaatatgtcttaatattacagtaagcc

SEQ ID NO: 4526 - DNA, 1219 bp, Homo sapiens
tgactctctgaggctcattttgcagttgttgaaattgtccccgcatctttttcattacagtctgaaccaatcagagtccttgtgactggagcagctggtcarattgcatattcactgctgtacagtattggaaatggatctgtctttggtaaagatcagcctataattcttgtgctgttggatatcacccccatgatgggtgtcctggacggtgtcctaatggaactgcaagactgtgcccttcccctcctgaaagatgtcatcgcaacagataaagaagacgttgccttcaaagacctggatgtggccattcttgtgggctccatgccaagaagggaaggcatggagagaaaagatttactgaaagcaaatgtgaaaatcttcaaatcccagggtgcagccttagataaatacgccaagaagtcagttaaggttattgttgtgggtaatccagccaataccaactgcctgactgcttccaagtcagctccatccatccccaaggagaacttcagttgcttgactcgtttggatcacaaccgagctaaagctcaaattgctcttaaacttggtgtgactgctaatgatgtaaagaatgtcattatctggggaaaccattcctcgactcagtatccagatgtcaaccatgccaaggtgaaattgcaaggaaaggaagttggtgtttatgaagctctgaaagatgacagctggctcaagggagaatttgtcacgactgtgcagcagcgtggcgctgctgtcatcaaggctcgaaaactatccagtgccatgtctgctgcaaaagccatctgtgaccacgtcagggacatctggtttggaaccccagagggagagtttgtgtccatgggtgttatctctgatggcaactcctatggtgttcctgatgatctgctctactcattccctgttgtaatcaagaataagacctggaagtttgttgaaggtctccctattaatgatttctcacgtgagaagatggatcttactgcaaaggaactgacagaagaaaaagaaagtgcttttgaatttcyttcctctgcctgactagacaatgatgttactaaataataataatgctatacttaaattacttgtgaaaaacaacacattttaaagattacgtgcttcttggtacaggtttgtgaatgacagtttatcgtcatgctgttastgtgcattctaaataaatatatattcaaat

SEQ ID NO: 4527 - DNA, 527 bp, Homo sapiens
ccccgggttcctgcccacctctggccctcgcgcccttgagtggggtttcttgcactttagggacttttgggaggcagctgtgcaaggcactgtccttcgcgccctttggcaagctcggactcatcttctggggattgccgcagtgacccagtaatgggaagggattgatttccaccttgcggggtatggggcgctcttaggaggactctggagaagtagttgtcctgggagaggagcgatcttaatcctgctgcatgacgggaggacaaaatgcgacgctgcagctattttccaaaggacgttacggtgtttgataaggacgataagtctgaaccaatcagagtccttgtgactggagcagctggtcarattgcatattcactgctgtacagtattggaaatggatctgtctttggtaaagatcagcctataattcttgtgctgttggatatcacccccatgatgggtgtcctggacggtgtcctaatggaactgcaagactgtgcccttcccctcctgaaaggtgg

SEQ ID NO: 4528 - DNA, 1515 bp, Homo sapiens
tccaatcacaggggctcatcctcagggactactttgcaatcggcgcagagcgcagtgagaagagcttgaaaaaaacctctggtatcgggaagtgtagttcaacacttgaaggaaatgctttggagattgcgccacaaccagggcagcgtaaactacagttcccagagagcgccgcgtcgggagcggagccttttctcgctaacaccgctcgccctctccgagtcagttccgcggtagaggtgacctgactctctgaggctcattttgcagttgttgaaattgtccccgcagttttcaatcatgtctgaaccaatcagagtccttgtgactggagcagctggtcarattgcatattcactgctgtacagtattggaaatggatctgtctttggtaaagatcagcctataattcttgtgctgttggatatcacccccatgatgggtgtcctggacggtgtcctaatggaactgcaagactgtgcccttcccctcctgaaagatgtcatcgcaacagataaagaagacgttgccttcaaagacctggatgtggccattcttgtgggctccatgccaagaagggaaggcatggagagaaaagatttactgaaagcaaatgtgaaaatcttcaaatcccagggtgcagccttagataaatacgccaagaagtcagttaaggttattgttgtgggtaatccagccaataccaactgcctgactgcttccaagtcagctccatccatccccaaggagaacttcagttgcttgactcgtttggatcacaaccgagctaaagctcaaattgctcttaaacttggtgtgactgctaatgatgtaaagaatgtcattatctggggaaaccattcctcgactcagtatccagatgtcaaccatgccaaggtgaaattgcaaggaaaggaagttggtgtttatgaagctctgaaagatgacagctggctcaagggagaatttgtcacgactgtgcagcagcgtggcgctgctgtcatcaaggctcgaaaactatccagtgccatgtctgctgcaaaagccatctgtgaccacgtcagggacatctggtttggaaccccagagggagagtttgtgtccatgggtgttatctctgatggcaactcctatggtgttcctgatgatctgctctactcattccctgttgtaatcaagaataagacctggaagtttgttgaaggtctccctattaatgatttctcacgtgagaagatggatcttactgcaaaggaactgacagaagaaaaagaaagtgcttttgaatttcyttcctctgcctgactagacaatgatgttactaaatgcttcaaagctgaagaatctaaatgtygtctttgactcaagtaccaaataataataatgctatacttaaattacttgtgaaaaacaacacattttaaagattacgtgcttcttggtacaggtttgtgaatgacagtttatcgtcatgctgttastgtgcattctaaataaatatatattcaaatgaaa

SEQ ID NO: 4529 - DNA, 2036 bp, Homo sapiens
agggcgcctcagaggtgactttcagcctgcgagccttcttcccggggcgccataaacgcccccaatttcccagctgctaaaggaagaggaagcaggagaggaagagagacctgccctgtagcgtgactcctctagaaaaaaaaaaaaaaagccggagtattttactaascccctaaaatgtcgagatttgtacaagatcttagcaaagcaatgtctcaagatggtgcttctcagttccaagaagtcattcggcaagagctagaattatctgtgaagaaggaactagaaaaaatactcaccacagcatcatcacatgaatttgagcacaccaaaaaagacctggatggatttcggaagctatttcatagatttttgcaagaaaaggggccttctgtggattggggaaaaatccagagaccccctgaagattcgattcaaccctatgaaaagataaaggccaggggcttgcctgataatatatcttccgtgttgaacaaactagtggtggtgaaactcaatggtggtttgggaaccagcatgggctgcaaaggccctaaaagtctgattggtgtgaggaatgagaatacctttctggatctgactgttcagcaaattgaagtgagtaacatttagcctttacagatgttcctcttgttttaatgaactcttttaacacggatgaagataccaaaaaaatactacagaagtacaatcattgtcgtgtgaaaatctacactttcaatcaaagcaggtacccgaggattaataaagaatctttacttcctgtagcaaaggacgtgtcttactcaggggaaaatacagaagcttggtaccctccaggtcatggtgatatttacgccagtttctacaactctggattgcttgatacctttataggagaaggcaaagagtatatttttgtgtctaacatagataatctgggtgccacagtggatctgtatattcttaatcatctaatsaacccacccaatggaaaacgctgtgaatttgtcatggaagtcacaaataaaacacgtgcagatgtaaagggcgggacactcactcaatatgaaggcaaactgagactggtggaaattgctcaagtgccaaaagcacatgtagacgagttcaagtctgtatcaaagttcaaaatatttaatacaaacaacctatggatttctcttgcagcagttaaaagactgcaggagcaaaatgccattgacatggaaatcattgtgaatgcaaagactttggatggaggcctgaatgtcattcaattagaaactgcagtaggggctgccatcaaaagttttgagaattctctaggtattaatgtgccaaggagccgttttctgcctgtcaaaaccacatcagatctcttgctggtgatgtcaaacctctatagtcttaatgcaggatctctgacaatgagtgaaaagcgggaatttcctacagtgcccttggttaaattaggcagttcttttacgaaggttcaagattatctaagaagatttgaaagtataccagatatgcttgaattggatcacctcacagtttcaggagatgtgacatttggaaaaaatgtttcattaaagggaacggttatcatcattgcaaatcatggtgacagaattgatatcccacctggagcagtattagagaacaagattgtgtctggaaaccttcgcatcttggaccactgaaatgaaaaatactgtggacacttaaataatgggctagtttcttacaatgaaatgttctctaggattctaaaataggcaggtactttactatgttactgtaccctgcagtgttgatttttaaaatagagttttctgcagtatgcttttagtctaagaaaagcacagatggagcaatactttccttctttgaagagaatcccaaaagttagttcatcttaaagtgcaatattgtttaatcttaaaactgggcaactttggaagaacttttaacagaagcctcaatgatgatcactttgaattgcttgtgatttcaaaaataaagcagtgaagcaa

SEQ ID NO: 4530 - DNA, 2090 bp, Homo sapiens
atttccgcattgaaggggctgctccgaatggagggggaggggaggtgtttaggagaaagtaggggctgtgggtgtcgggagccggctgacgggtggacaagggggggttagcagctgggctgcgaccgttagggaggggctcaaggtgtgcatgtgtgagggaagagagagagagagaagggcgcctcagaggtgactttcagcctgcgagccttcttcccggggcgccataaacgcccccaatttcccagctgctaaaggaagaggaagatcttagcaaagcaatgtctcaagatggtgcttctcagttccaagaagtcattcggcaagagctagaattatctgtgaagaaggaactagaaaaaatactcaccacagcatcatcacatgaatttgagcacaccaaaaaagacctggatggatttcggaagctatttcatagatttttgcaagaaaaggggccttctgtggattggggaaaaatccagagaccccctgaagattcgattcaaccctatgaaaagataaaggccaggggcttgcctgataatatatcttccgtgttgaacaaactagtggtggtgaaactcaatggtggtttgggaaccagcatgggctgcaaaggccctaaaagtctgattggtgtgaggaatgagaatacctttctggatctgactgttcagcaaattgaagtgaatgttcctcttgttttaatgaactcttttaacacggatgaagataccaaaaaaatactacagaagtacaatcattgtcgtgtgaaaatctacactttcaatcaaagcaggtacccgaggattaataaagaatctttacttcctgtagcaaaggacgtgtcttactcaggggaaaatacagaagcttggtaccctccaggtcatggtgatatttacgccagtttctacaactctggattgcttgatacctttataggagaaggcaaagagtatatttttgtgtctaacatagataatctgggtgccacagtggatctgtatattcttaatcatctaatsaacccacccaatggaaaacgctgtgaatttgtcatggaagtcacaaataaaacacgtgcagatgtaaagggcgggacactcactcaatatgaaggcaaactgagactggtggaaattgctcaagtgccaaaagcacatgtagacgagttcaagtctgtatcaaagttcaaaatatttaatacaaacaacctatggatttctcttgcagcagttaaaagactgcaggagcaaaatgccattgacatggaaatcattgtgaatgcaaagactttggatggaggcctgaatgtcattcaattagaaactgcagtaggggctgccatcaaaagttttgagaattctctaggtattaatgtgccaaggagccgttttctgcctgtcaaaaccacatcagatctcttgctggtgatgtcaaacctctatagtcttaatgcaggatctctgacaatgagtgaaaagcgggaatttcctacagtgcccttggttaaattaggcagttcttttacgaaggttcaagattatctaagaagatttgaaagtataccagatatgcttgaattggatcacctcacagtttcaggagatgtgacatttggaaaaaatgtttcattaaagggaacggttatcatcattgcaaatcatggtgacagaattgatatcccacctggagcagtattagagaacaagattgtgtctggaaaccttcgcatcttggaccactgaaatgaaaaatactgtggacacttaaataatgggctagtttcttacaatgaaatgttctctaggattctaaaataggcaggtactttactatgttactgtaccctgcagtgttgatttttaaaatagagttttctgcagtatgcttttagtctaagaaaagcacagatggagcaatactttccttctttgaagagaatcccaaaagttagttcatcttaaagtgcaatattgtttaatcttaaaactgggcaactttggaagaacttttaacagaagcctcaatgatgatcactttgaattgcttgtgatttcaaaaataaagcagtgaagcaa

SEQ ID NO: 4531 - DNA, 2035 bp, Homo sapiens
agggcgcctcagaggtgactttcagcctgcgagccttcttcccggggcgccataaacgcccccaatttcccagctgctaaaggaagaggaagcaggagaggaagagagacctgccctgtagcgtgactcctctagaaaaaaaaaaaaaaagccggagtattttactaascccctaaaatgtcgagatttgtacaagatcttagcaaagcaatgtctcaagatggtgcttctcagttccaagaagtcattcggcaagagctagaattatctgtgaagaaggaactagaaaaaatactcaccacagcatcatcacatgaatttgagcacaccaaaaaagacctggatggatttcggaagctatttcatagatttttgcaagaaaaggggccttctgtggattggggaaaaatccagagaccccctgaagattcgattcaaccctatgaaaagataaaggccaggggcttgcctgataatatatcttccgtgttgaacaaactagtggtggtgaaactcaatggtggtttgggaaccagcatgggctgcaaaggccctaaaagtctgattggtgtgaggaatgagaatacctttctggatctgactgttcagcaaattgaagtgagtaacatttagccttacagatgttcctcttgttttaatgaactcttttaacacggatgaagataccaaaaaaatactacagaagtacaatcattgtcgtgtgaaaatctacactttcaatcaaagcaggtacccgaggattaataaagaatctttacttcctgtagcaaaggacgtgtcttactcaggggaaaatacagaagcttggtaccctccaggtcatggtgatatttacgccagtttctacaactctggattgcttgatacctttataggagaaggcaaagagtatatttttgtgtctaacatagataatctgggtgccacagtggatctgtatattcttaatcatctaatsaacccacccaatggaaaacgctgtgaatttgtcatggaagtcacaaataaaacacgtgcagatgtaaagggcgggacactcactcaatatgaaggcaaactgagactggtggaaattgctcaagtgccaaaagcacatgtagacgagttcaagtctgtatcaaagttcaaaatatttaatacaaacaacctatggatttctcttgcagcagttaaaagactgcaggagcaaaatgccattgacatggaaatcattgtgaatgcaaagactttggatggaggcctgaatgtcattcaattagaaactgcagtaggggctgccatcaaaagttttgagaattctctaggtattaatgtgccaaggagccgttttctgcctgtcaaaaccacatcagatctcttgctggtgatgtcaaacctctatagtcttaatgcaggatctctgacaatgagtgaaaagcgggaatttcctacagtgcccttggttaaattaggcagttcttttacgaaggttcaagattatctaagaagatttgaaagtataccagatatgcttgaattggatcacctcacagtttcaggagatgtgacatttggaaaaaatgtttcattaaagggaacggttatcatcattgcaaatcatggtgacagaattgatatcccacctggagcagtattagagaacaagattgtgtctggaaaccttcgcatcttggaccactgaaatgaaaaatactgtggacacttaaataatgggctagtttcttacaatgaaatgttctctaggattctaaaataggcaggtactttactatgttactgtaccctgcagtgttgatttttaaaatagagttttctgcagtatgcttttagtctaagaaaagcacagatggagcaatactttccttctttgaagagaatcccaaaagttagttcatcttaaagtgcaatattgtttaatcttaaaactgggcaactttggaagaacttttaacagaagcctcaatgatgatcactttgaattgcttgtgatttcaaaaataaagcagtgaagcaa

SEQ ID NO: 4532 - DNA, 1944 bp, Homo sapiens
caggagaggaagagagacctgccctgtagcgtgactcctctagaaaaaaaaaaaaaaagccggagtattttactaascccctaaaatgtcgagatttgtacaagatcttagcaaagcaatgtctcaagatggtgcttctcagttccaagaagtcattcggcaagagctagaattatctgtgaagaaggaactagaaaaaatactcaccacagcatcatcacatgaatttgagcacaccaaaaaagacctggatggatttcggaagctatttcatagatttttgcaagaaaaggggccttctgtggattggggaaaaatccagagaccccctgaagattcgattcaaccctatgaaaagataaaggccaggggcttgcctgataatatatcttccgtgttgaacaaactagtggtggtgaaactcaatggtggtttgggaaccagcatgggctgcaaaggccctaaaagtctgattggtgtgaggaatgagaatacctttctggatctgactgttcagcaaattgaagtgagtaacatttagcctttacagatgttcctcttgttttaatgaactcttttaacacggatgaagataccaaaaaaatactacagaagtacaatcattgtcgtgtgaaaatctacactttcaatcaaagcaggtacccgaggattaataaagaatctttacttcctgtagcaaaggacgtgtcttactcaggggaaaatacagaagcttggtaccctccaggtcatggtgatatttacgccagtttctacaactctggattgcttgatacctttataggagaaggcaaagagtatatttttgtgtctaacatagataatctgggtgccacagtggatctgtatattcttaatcatctaatsaacccacccaatggaaaacgctgtgaatttgtcatggaagtcacaaataaaacacgtgcagatgtaaagggcgggacactcactcaatatgaaggcaaactgagactggtggaaattgctcaagtgccaaaagcacatgtagacgagttcaagtctgtatcaaagttcaaaatatttaatacaaacaacctatggatttctcttgcagcagttaaaagactgcaggagcaaaatgccattgacatggaaatcattgtgaatgcaaagactttggatggaggcctgaatgtcattcaattagaaactgcagtaggggctgccatcaaaagttttgagaattctctaggtattaatgtgccaaggagccgttttctgcctgtcaaaaccacatcagatctcttgctggtgatgtcaaacctctatagtcttaatgcaggatctctgacaatgagtgaaaagcgggaatttcctacagtgcccttggttaaattaggcagttcttttacgaaggttcaagattatctaagaagatttgaaagtataccagatatgcttgaattggatcacctcacagtttcaggagatgtgacatttggaaaaaatgtttcattaaagggaacggttatcatcattgcaaatcatggtgacagaattgatatcccacctggagcagtattagagaacaagattgtgtctggaaaccttcgcatcttggaccactgaaatgaaaaatactgtggacacttaaataatgggctagtttcttacaatgaaatgttctctaggattctaaaataggcaggtactttactatgttactgtaccctgcagtgttgatttttaaaatagagttttctgcagtatgcttttagtctaagaaaagcacagatggagcaatactttccttctttgaagagaatcccaaaagttagttcatcttaaagtgcaatattgtttaatcttaaaactgggcaactttggaagaacttttaacagaagcctcaatgatgatcactttgaattgcttgtgatttcaaaaataaagcagtgaagcaa

SEQ ID NO: 4533 - DNA, 1310 bp, Homo sapiens
gtggttttaycttttccgggagtctccagctggccctcatttgtgtccggagctcaggagttcccaaaccgactcagtcgcaccaagtttccgtcttttggaattggggaaggagtttctttctttcttttcttttttcttgagccagttttaatcgctttgaataaatactcccttaagtagttaaatataggaggagaaagaatacatcggttgttaaagcaggagaggaagagagacctgccctgtagcgtgactcctctagaaaaaaaaaaaaaaagccggagtattttactaascccctaaaatgtcgagatttgtacaagatcttagcaaagcaatgtctcaagatggtgcttctcagttccaagaagtcattcggcaagagctagaattatctgtgaagaaggaactagaaaaaatactcaccacagcatcatcacatgaatttgagcacaccaaaaaagacctggatggatttcggaagctatttcatagatttttgcaagaaaaggggccttctgtggattggggaaaaatccagagaccccctgaagattcgattcaaccctatgaaaagataaaggccaggggcttgcctgataatatatcttccgtgttgaacaaactagtggtggtgaaactcaatggtggtttgggaaccagcatgggctgcaaaggccctaaaagtctgattggtgtgaggaatgagaatacctttctggatctgactgttcagcaaattgaagtgagtaacatttagccttacagatgttcctcttgttttaatgaactcttttaacacggatgaagataccaaaaaaatactacagaagtacaatcattgtcgtgtgaaaatctacactttcaatcaaagcaggtacccgaggattaataaagaatctttacttcctgtagcaaaggacgtgtcttactcaggggaaaatacagaagcttggtaccctccaggtcatggtgatatttacgccagtttctacaactctggattgcttgatacctttataggagaaggcaaagagtatatttttgtgtctaacatagataatctgggtgccacagtggatctgtatattcttaatcatctaatsaacccacccaatggaaaacgctgtgaatttgtcatggaagtcacaaataaaacacgtgcagatgtaaaggtaaataccgagaggaagcagtttagggcttcatgttttcacatttcgtaagttatgaagttaaagacttttttatttgaaagtttctatgttaaacaacacatttaatatgttctgtttgacataatagta

SEQ ID NO: 4534 - DNA, 2000 bp, Homo sapiens
cttgcccacccatgctcaagatgggcgggatgccagcctgttacataaatgtgccaaaagcctggccatgcctggaaaatggaccaatccgcccgccaagaggttgggtctcgttccctagagagaaggaagtttcctctccttgaagtgagagctagaatcgcactttctgtcaagctgagagaaagactcttttccagaggctaaaaggacaagaaaatctgatttgcttgcttctaactttgcgttttaaagggggaaggaggaaaggaaagagggggagggtggttctgcttagccccacccctccggctaccccaggtccagccgtccattccggtggaggcagaggcagtcctggggctctgggkctcgggctttgtcaccgggacccgcaggagccagaaccactcggcgccgcctggtgcatgggaggggagccgggccaggagtaagtaactcatacgggcgccggggacccgggtcgggctgggggcttccaactcagagggagtgtgatttgcctgatcctcttcggcgttgtcctgctctgccgcatccagccctgtaccgccatcccamttcccgccgttcccatctgtgttccgggtgggatcggtctggaggcggccgaggacttcccaggcaggagctcggggcggaggccgggtccgcggcagaccagggcagcgaggcgctggccggcagggggcgctgcggtgccagcctgaggctgggctgctccgcgaggatacagcggcccctgccctgtcctgysctgccctgycctgtcctgtcctgycctgccctgycctgtcctgycctgccctgccctgccctgtgtcctcagacaatatgttagccgtgcactttgacaagccgggaggaccggaaaacctctacgtgaaggaggtggccaagccgagcccgggggagggtgaagtcctcctgaaggtggcggccagcgccctgaaccgggcggacttaatgcagagacaaggccagtatgacccacctccaggagccagcaacattttgggacttgaggcatctggacatgtggcagagctgggrcctggctgccagggacactggaagatcggggacacagccatggctctgctccccggtgggggccaggctcagtaygtcactgtccccgaagggctcctcatgcctatcccagagggattgaccctgacccaggctgcagccatcccagaggcctggctcaccgccttccagctgttacatcttgtgggaaatgttcaggctggagactatgtgctaatccatgcaggactgagtggtgtgggcacagctgctatccaactcacccggatggctggagctattcctctggtcacagctggctcccagaagaagcttcaaatggcagaaaagcttggagcagctgctggattcaattacaaaaaagaggatttctctgaagcaacgctgaaattcaccaaaggtgctggagttaatcttattctagactgcataggcggatcctactgggagaagaacgtcaactgcctggctcttgatggtcgatgggttctctatggtctgatgggaggaggtgacatcaatgggcccctgttttcaaagctactttttaagcgaggaagtctgatcaccagtttgctgaggtctagggacaataagtacaagcaaatgctggtgaatgctttcacggagcaaattctgcctcacttctccacggagggcccccarcgtctgctgccggttctggacagaatctacccagtgaccgaaatccaggaggcccataagtacatggaggccaacaagaacataggcaagatcgtcctggaactgccccagtgaaggaggatggggcaggacaggacgyggccaccccaggcctttccagagcaaacctggagaagattcacaatagacaggccaagaaacccggtgcttcctccagagccgtttaaagctgatatgaggaaataaagagtgaactggaa

SEQ ID NO: 4535 - DNA, 1884 bp, Homo sapiens
cttgcccacccatgctcaagatgggcgggatgccagcctgttacataaatgtgccaaaagcctggccatgcctggaaaatggaccaatccgcccgccaagaggttgggtctcgttccctagagagaaggaagtttcctctccttgaagtgagagctagaatcgcactttctgtcaagctgagagaaagactcttttccagaggctaaaaggacaagaaaatctgatttgcttgcttctaactttgcgttttaaagggggaaggaggaaaggaaagagggggagggtggttctgcttagccccacccctccggctaccccaggtccagccgtccattccggtggaggcagaggcagtcctggggctctgggkctcgggctttgtcaccgggacccgcaggagccagaaccactcggcgccgcctggtgcatgggaggggagccgggccaggagtaagtaactcatacgggcgccggggacccgggtcgggctgggggcttccaactcagagggagtgtgatttgcctgatcctcttcggcgttgtcctgctctgccgcatccagccctgtaccgccatcccamttcccgccgttcccatctgtgttccgggtgggatcggtctggaggcggccgaggacttcccaggcaggagctcggggcggaggccgggtccgcggcagaccagggcagcgaggcgctggccggcagggggcgctgcggtgccagcctgaggctgggctgctccgcgaggatacagcggcccctgccctgtcctgysctgccctgycctgtcctgtcctgycctgccctgycctgtcctgycctgccctgccctgccctgtgtcctcagacaatatgttagccgtgcactttgacaagccgggaggaccggaaaacctctacgtgaaggaggtggccaagccgagcccgggggagggtgaagtcctcctgaaggtggcggccagcgccctgaaccgggcggacttaatgcagagacaaggccagtatgacccacctccaggagccagcaacattttgggacttgaggcatctggacatgtggcagagctgggrcctggctgccagggacactggaagatcggggacacagccatggctctgctccccggtgggggccaggctcagaaatgttcaggctggagactatgtgctaatccatgcaggactgagtggtgtgggcacagctgctatccaactcacccggatggctggagctattcctctggtcacagctggctcccagaagaagcttcaaatggcagaaaagcttggagcagctgctggattcaattacaaaaaagaggatttctctgaagcaacgctgaaattcaccaaaggtgctggagttaatcttattctagactgcataggcggatcctactgggagaagaacgtcaactgcctggctcttgatggtcgatgggttctctatggtctgatgggaggaggtgacatcaatgggcccctgttttcaaagctactttttaagcgaggaagtctgatcaccagtttgctgaggtctagggacaataagtacaagcaaatgctggtgaatgctttcacggagcaaattctgcctcacttctccacggagggcccccarcgtctgctgccggttctggacagaatctacccagtgaccgaaatccaggaggcccataagtacatggaggccaacaagaacataggcaagatcgtcctggaactgccccagtgaaggaggatggggcaggacaggacgyggccaccccaggcctttccagagcaaacctggagaagattcacaatagacaggccaagaaacccggtgcttcctccagagccgtttaaagctgatatgaggaaataaagagtgaactggaa

SEQ ID NO: 4536 - DNA, 1623 bp, Homo sapiens
ctcttctcttagcagcacccagcttgcccacccatgctcaagatgggcgggatgccagcctgttacataaatgtgccaaaagcctggccatgcctggaaaatggaccaatccgcccgccaagaggttgggtctcgttccctagagagaaggaagtttcctctccttgaagtgagagctagaatcgcactttctgtcaagctgagagaaagactcttttccagaggctaaaaggacaagaaaatctgatttgcttgcttctaactttgcgttttaaagggggaaggaggaaaggaaagagggggagggtggttctgcttagccccacccctccggctaccccaggtccagccgtccattccggtggaggcagaggcagtcctggggctctgggkctcgggctttgtcaccgggacccgcaggagccagaaccactcggcgccgcctggtgcatgggaggggagccgggccaggaacaatatgttagccgtgcactttgacaagccgggaggaccggaaaacctctacgtgaaggaggtggccaagccgagcccgggggagggtgaagtcctcctgaaggtggcggccagcgccctgaaccgggcggacttaatgcagagacaaggccagtatgacccacctccaggagccagcaacattttgggacttgaggcatctggacatgtggcagagctgggrcctggctgccagggacactggaagatcggggacacagccatggctctgctccccggtgggggccaggctcagtaygtcactgtccccgaagggctcctcatgcctatcccagagggattgaccctgacccaggctgcagccatcccagaggcctggctcaccgccttccagctgttacatcttgtgggaaatgttcaggctggagactatgtgctaatccatgcaggactgagtggtgtgggcacagctgctatccaactcacccggatggctggagctattcctctggtcacagctggctcccagaagaagcttcaaatggcagaaaagcttggagcagctgctggattcaattacaaaaaagaggatttctctgaagcaacgctgaaattcaccaaaggtgctggagttaatcttattctagactgcataggcggatcctactgggagaagaacgtcaactgcctggctcttgatggtcgatgggttctctatggtctgatgggaggaggtgacatcaatgggcccctgttttcaaagctactttttaagcgaggaagtctgatcaccagtttgctgaggtctagggacaataagtacaagcaaatgctggtgaatgctttcacggagcaaattctgcctcacttctccacggagggcccccarcgtctgctgccggttctggacagaatctacccagtgaccgaaatccaggaggcccataagtacatggaggccaacaagaacataggcaagatcgtcctggaactgccccagtgaaggaggatggggcaggacaggacgyggccaccccaggcctttccagagcaaacctggagaagattcacaatagacaggccaagaaacccggtgcttcctccagagccgtttaaagctgatatgaggaaataaagagtgaactggaa

SEQ ID NO: 4537 - DNA, 1954 bp, Homo sapiens
tgggcgggatgccagcctgttacataaatgtgccaaaagcctggccatgcctggaaaatggaccaatccgcccgccaagaggttgggtctcgttccctagagagaaggaagtttcctctccttgaagtgagagctagaatcgcactttctgtcaagctgagagaaagactcttttccagaggctaaaaggacaagaaaatctgatttgcttgcttctaactttgcgttttaaagggggaaggaggaaaggaaagagggggagggtggttctgcttagccccacccctccggctaccccaggtccagccgtccattccggtggaggcagaggcagtcctggggctctgggkctcgggctttgtcaccgggacccgcaggagccagaaccactcggcgccgcctggtgcatgggaggggagccgggccaggagtaagtaactcatacgggcgccggggacccgggtcgggctgggggcttccaactcagagggagtgtgatttgcctgatcctcttcggcgttgtcctgctctgccgcatccagccctgtaccgccatcccamttcccgccgttcccatctgtgttccgggtgggatcggtctggaggcggccgaggacttcccaggcaggagctcggggcggaggccgggtccgcggcagaccagggcagcgaggcgctggccggcagggggcgctgcggtgccagcctgaggctgggctgctccgcgaggatacagcggcccctgccctgtcctgycctgccctgycctgtcctgycctgccctgccctgccctgtgtcctcagacaatatgttagccgtgcactttgacaagccgggaggaccggaaaacctctacgtgaaggaggtggccaagccgagcccgggggagggtgaagtcctcctgaaggtggcggccagcgccctgaaccgggcggacttaatgcagagacaaggccagtatgacccacctccaggagccagcaacattttgggacttgaggcatctggacatgtggcagagctgggrcctggctgccagggacactggaagatcggggacacagccatggctctgctccccggtgggggccaggctcagtaygtcactgtccccgaagggctcctcatgcctatcccagagggattgaccctgacccaggctgcagccatcccagaggcctggctcaccgccttccagctgttacatcttgtgggaaatgttcaggctggagactatgtgctaatccatgcaggactgagtggtgtgggcacagctgctatccaactcacccggatggctggagctattcctctggtcacagctggctcccagaagaagcttcaaatggcagaaaagcttggagcagctgctggattcaattacaaaaaagaggatttctctgaagcaacgctgaaattcaccaaaggtgctggagttaatcttattctagactgcataggcggatcctactgggagaagaacgtcaactgcctggctcttgatggtcgatgggttctctatggtctgatgggaggaggtgacatcaatgggcccctgttttcaaagctactttttaagcgaggaagtctgatcaccagtttgctgaggtctagggacaataagtacaagcaaatgctggtgaatgctttcacggagcaaattctgcctcacttctccacggagggcccccarcgtctgctgccggttctggacagaatctacccagtgaccgaaatccaggaggcccataagtacatggaggccaacaagaacataggcaagatcgtcctggaactgccccagtgaaggaggatggggcaggacaggacgyggccaccccaggcctttccagagcaaacctggagaagattcacaatagacaggccaagaaacccggtgcttcctccagagccgtttaaagctgatatgaggaaataaagagtgaactggaa

SEQ ID NO: 4538 - DNA, 1319 bp, Homo sapiens
agcaccatgagggccctggtgcttctgctgtccctrttcctgctgggtggccaggcccagcatgtgtctgactggacctactcagaaggggcactggacgaagcgcactggccacwgcactaccccgcctgtgggggccagagacagtcgcctatcaacctacagaggaygaaggtgyggtacaacccctccttgaaggggctcaatmtgacagsytatgagacccaggcaggsgagttccccatggtcaacaatggccacacagtgcagatcrgcctgccctccaccatgcgcatgacagtggctgacggcactgtatacatagcccagcagatgcactttcactggggaggtgcgtcctcggagatcagcggctctgagcacaccgtggacgggatcagacatgtgatcgagattcacattgttcactacaattctaaatacaagagctatgatatagcccaagatgcgccggatggtttggctgtactggcagccttcgttgaggtgaagaattaccctgaaaacacttattacagcaacttcatttctcatctggccaacatcaagtacccaggacaaagaacaaccctgactggccttgacgttcaggacatgctgcccaggaacctccagcactactacacctaccatggctcactcaccacgcctccctgcactgagaaygtccactggtttgtgctggcagattttgtcaagctctccaggacacaggtttggaagctggagaattccttactggatcaccgcaayaagaccatccacaacgattaccgcaggacccagcccctgaaccacagagtggtggaatccaacttcccgaatcaggaatacactctaggctctgaattccagttttacctacrtaagattgaggaaatycttgactacttaagaagagcattgaactgaggaaagctaagaggaagattcaatattaactagcytgaagcctgacctagccagaagaagtgcctgtccgctgcagccgcaccctaccttgtctaagaaaccatgtgtgtctggaacacgctgctccccctggggcagctgttgggattctgattaaaagaggggaaacgatcatcctggacaggaagtgagatggcttcagttcatgagamgggatctgagttagacatcaccagtggaaattgattggaayagaaacttaaaggaaatggaaccctaactattctcccatcaaatcatatatgttgacctgtctgaattataaaccagcctgacctttcctttagcattagatgtaataaaataactttggaaatttgtcattt

SEQ ID NO: 4539 - DNA, 2338 bp, Homo sapiens
aggaaaatcagatgttttagttctcttacagaccagcagtaatgttgaaaaatataaaagtagccgtaacagaaaacgaagtgatcatytcagccctcccttggagtggggggatatattgcggagctgagttttaatggctatcagttcttgatcagaaaagtgaaatcactccaactccttccgtattccacggaatatgacccgtcttgaactttgagaaattccccgggtctgtgtgaaattccagttccaaataattcacatgaatggttcacaagaatccaggtaggtttgatctaagtttcgcccgcaccactacagggccgctggggagtcggggccccccagatctgcccgcctcaagtccgcgggacgtcacccccctttccacgctactgcagccgtcgcagtcccacccctttccgggaggtgagggaatgagtgacggctctcccgacgaatggcgaggcggagctgagggggcgtgccccggaggcgggaagtgggtggggctcgccttagctaggcaggaagtcggcgcgggcggcgcggacagtatctgtgggtacccggagcacggagatctcgccggctttacgttcacctcggtgtctgcagcaccctccgcttcctctcctaggcgacgagacccagtggctagaagttcaccatgtctattctcaagatccatgccagggagatctttgactctcgcgggaatcccactgttgaggttgatctcttcacctcaaaaggtctcttcagagctgctgtgcccagtggtgcttcaactggtatctatgaggccctagagctccgggacaatgataagactcgctatatggggaagggtgtctcaaaggctgttgagcacatcaataaaactattgcgcctgccctrgttagcaagaaactgaacgtcacagaacaagagaagattgacaaactgatgatcgagatggatggaacagaaaataaatctaagtttggtgcgaacgccattctgggggtgtcccttgccgtctgcaaagctggtgccgttgagaagggggtccccctgtaccgccacatcgctgacttggctggcaactctgaagtcatcctgccagtcccggcgttcaatgtcatcaatggcggttctcatgctggcaacaagctggccatgcaggagttcatgatcctcccagtcggtgcagcaaacttcagggaagccatgcgcattggagcagaggtttaccacaacctgaagaatgtcatcaaggagaaatatgggaaagatgccaccaatgtgggggatgaaggcgggtttgctcccaacatcctggagaataaagaaggcctggagctgctgaagactgctattgggaaagctggctacactgataaggtggtcatcggcatggaygtagcggcctccgagttcttcaggtctgggaagtatgacctggacttcaagtctcccgatgaccccagcaggtacatctcgcctgaccagctggctgacctgtacaagtccttcatcaaggactacccagtggtgtctatcgaagatccctttgaccaggatgactggggagcttggcagaagttcacagccagtgcaggaatccaggtagtgggggatgatctcacagtgaccaacccaaagaggatcgcmaaggccgtgaacgagaagtcctgcaactgcctcctgctcaaagtcaaccagattggctccgtgaccgagtctcttcaggcgtgcaagctggcccaggccaatggttggggcgtcatggtgtctcatcgttcggggragactgaagataccttcatcgctgacctggttgtggggctgtgcactgggcagatcaagactggtgccccttgccgatctgagcgcttggccaagtacaaccagctcctcagaattgaagaggagctgggcagcaaggctaagtttgccggcaggaacttcagaaacccyttggccaagtaagctgtgggcaggcaagsccttcggtcacctgttggctacacagacccctcccctsgtgtcagctcaggcagctcgaggcccccgaccaamacttgcaggggtccctgctagttagcgccccmccgccgtggagttcgtaccgcttccttagaacttctacagaagccaagctccctggagccctgttggcagctctagctttgcagtygtgtaattggcccaagtcattgtttttctcgcctcmctttccmccaagtgtctaragtcatgtgagcctcgtgtyatytccggggtggccmcaggctagatccccggtggttttgtgctcaaaataaaaagcctcagtgacccatgagaawa

SEQ ID NO: 4540 - DNA, 2243 bp, Homo sapiens
aggaaaatcagatgttttagttctcttacagaccagcagtaatgttgaaaaatataaaagtagccgtaacagaaaacgaagtgatcatytcagccctcccttggagtggggggatatattgcggagctgagttttaatggctatcagttcttgatcagaaaagtgaaatcactccaactccttccgtattccacggaatatgacccgtcttgaactttgagaaattccccgggtctgtgtgaaattccagttccaaataattcacatgaatggttcacaagaatccaggtaggtttgatctaagtttcgcccgcaccactacagggccgctggggagtcggggccccccagatctgcccgcctcaagtccgcgggacgtcacccccctttccacgctactgcagccgtcgcagtcccacccctttccgggaggtgagggaatgagtgacggctctcccgacgaatggcgaggcggagctgagggggcgtgccccggaggcgggaagtgggtggggctcgccttagctaggcaggaagtcggcgcgggcggcgcggacagtatctgtgggtacccggagcacggagatctcgccggctttacgttcacctcggtgtctgcagcaccctccgcttcctctcctaggcgacgagacccagtggctagaagttcaccatgtctattctcaagatccatgccagggagatctttgactctcgcgggaatcccactgttgaggttgatctcttcacctcaaaaggtctcttcagagctgctgtgcccagtggtgcttcaactggtatctatgaggccctagagctccgggacaatgataagactcgctatatggggaagggtgtctcaaaggctgttgagcacatcaataaaactattgcgcctgccctrgttagcaagaaactgaacgtcacagaacaagagaagattgacaaactgatgatcgagatggatggaacagaaaataaatctaagtttggtgcgaacgccattctgggggtgtcccttgccgtctgcaaagctggtgccgttgagaagggggtccccctgtaccgccacatcgctgacttggctggcaactctgaagtcatcctgccagtcccggcgttcaatgtcatcaatggcggttctcatgctggcaacaagctggccatgcaggagttcatgatcctcccagtcggtgcagcaaacttcagggaagccatgcgcattggagcagaggtttaccacaacctgaagaatgtcatcaaggagaaatatgggaaagatgccaccaatgtgggggatgaaggcgggtttgctcccaacatcctggagaataaagaaggcctggagctgctgaagactgctattgggaaagctggctacactgataaggtggtcatcggcatggaygtagcggcctccgagttcttcaggtctgggaagtatgacctggacttcaagtctcccgatgaccccagcaggtacatctcgcctgaccagctggctgacctgtacaagtccttcatcaaggactacccagtggtgtctatcgaagatccctttgaccaggatgactggggagcttggcagaagttcacagccagtgcaggaatccaggtagtgggggatgatctcacagtgaccaacccaaagaggatcgcmaaggccgtgaacgagaagtcctgcaactgcctcctgctcaaagtcaaccagattggctccgtgaccgagtctcttcaggcgtgcaagctggcccaggccaatggttggggcgtcatggtgtctcatcgttcggggragactgaagataccttcatcgctgacctggttgtggggctgtgcactgggcagatcaagactggtgccccttgccgatctgagcgcttggccaagtacaaccagctcctcagaattgaagaggagctgggcagcaaggctaagtttgccggcaggaacttcagaaacccyttggccaagtaagctgtgggcaggcaagsccttcggtcacctgttggctacacagacccctcccctsgtgtcagctcaggcagctcgaggcccccgaccaamacttgcaggggtccctgctagttagcgccccmccgccgtggagttcgtaccgcttccttagaacttctacagaagccaagctccctggagcccggcccaagtcattgtttttctcgcctcmctttccmccaagtgtctaragtcatgtgagcctcgtgtyatytccggggtggcc

SEQ ID NO: 4541 - DNA, 2036 bp, Homo sapiens
agtttcgcccgcaccactacagggccgctggggagtcggggccccccagatctgcccgcctcaagtccgcgggacgtcacccccctttccacgctactgcagccgtcgcagtcccacccctttccgggaggtgagggaatgagtgacggctctcccgacgaatggcgaggcggagctgagggggcgtgccccggaggcgggaagtgggtggggctcgccttagctaggcaggaagtcggcgcgggcggcgcggacagtatctgtgggtacccggagcacggagatctcgccggctttacgttcacctcggtgtctgcagcaccctccgcttcctctcctaggcgacgagacccagtggctagaagttcaccatgtctattctcaagatccatgccagggagatctttgactctcgcgggaatcccactgttgaggttgatctcttcacctcaaaaggtctcttcagagctgctgtgcccagtggtgcttcaactggtatctatgaggccctagagctccgggacaatgataagactcgctatatggggaagggtgtctcaaaggctgttgagcacatcaataaaactattgcgcctgccctrgttagcaagaaactgaacgtcacagaacaagagaagattgacaaactgatgatcgagatggatggaacagaaaataaatctaagtttggtgcgaacgccattctgggggtgtcccttgccgtctgcaaagctggtgccgttgagaagggggtccccctgtaccgccacatcgctgacttggctggcaactctgaagtcatcctgccagtcccggcgttcaatgtcatcaatggcggttctcatgctggcaacaagctggccatgcaggagttcatgatcctcccagtcggtgcagcaaacttcagggaagccatgcgcattggagcagaggtttaccacaacctgaagaatgtcatcaaggagaaatatgggaaagatgccaccaatgtgggggatgaaggcgggtttgctcccaacatcctggagaataaagaaggcctggagctgctgaagactgctattgggaaagctggctacactgataaggtggtcatcggcatggaygtagcggcctccgagttcttcaggtctgggaagtatgacctggacttcaagtctcccgatgaccccagcaggtacatctcgcctgaccagctggctgacctgtacaagtccttcatcaaggactacccagtggtgtctatcgaagatccctttgaccaggatgactggggagcttggcagaagttcacagccagtgcaggaatccaggtagtgggggatgatctcacagtgaccaacccaaagaggatcgcmaaggccgtgaacgagaagtcctgcaactgcctcctgctcaaagtcaaccagattggctccgtgaccgagtctcttcaggcgtgcaagctggcccaggccaatggttggggcgtcatggtgtctcatcgttcggggragactgaagataccttcatcgctgacctggttgtggggctgtgcactgggcagatcaagactggtgccccttgccgatctgagcgcttggccaagtacaaccagctcctcagaattgaagaggagctgggcagcaaggctaagtttgccggcaggaacttcagaaacccyttggccaagtaagctgtgggcaggcaagsccttcggtcacctgttggctacacagacccctcccctsgtgtcagctcaggcagctcgaggcccccgaccaamacttgcaggggtccctgctagttagcgccccmccgccgtggagttcgtaccgcttccttagaacttctacagaagccaagctccctggagccctgttggcagctctagctttgcagtygtgtaattggcccaagtcattgtttttctcgcctcmctttccmccaagtgtctaragtcatgtgagcctcgtgtyatytccggggtggccmcaggctagatccccggtggttttgtgctcaaaataaaaagcctcagtgacccatgagaawa

SEQ ID NO: 4542 - DNA, 1557 bp, Homo sapiens
ggtgcttccgtggtcggcggtgctgggctccgcgccggggtccgacagcctgggcccccatgccgtgcagctcgcacatatgtggggcagagcagccaccctgcccccagcagcagccgtccatygtcagacgtgatcatttcctgaggcctcgagtgtgtcagggtgtttgtgcctcrtaacaacccacaggatggtcacccccgctttgcagatgaagaaaccaaagcagttttgccgacggatggggcaaaagaagcagcgaccagctagagcagggcagccacacagctcgtccgaygcagcccaggcacctgcagagcagccacacagctcgtcsgatgcagcccaggcaccttgccccagggagcgctgcttgggacygcccaccactccrggcccayaccgcagcatctatttctcaagcccaaagggccaccttacccgactggggttggagttyttcgaccrgccrgcagtccccctggcccgggcatttytgggacaggtcctagtccggcgacttcctaatggcacagaactccgaggcygcatcgtggagaccgaggcatacctggggccagaggatgaagccgcccactcaaggggtggccrgcagaccccccgcaaccgaggcatgttcatgaagccrgggaccctgtacgtgtacatcatttacggcatgtacttctgcatgaacatctccagccagggggacggggcttgcgtcttgctgcgagcactggagcccctggaaggtctggagaccatgcgtcagcttcgcagcacyctccggaaaggcaccgccagccgtgtcctcaaggaccgcgagctytgcagtggcccctccaagctgtgccaggccctggccatcaacaagagctttgaccagagggacctggcacaggatgaagctgtatggctggagcgtggtcccctggagcccagtgagccggctgtagtggyagcagcccgggtgggcgtcggccatgcaggggagtgggcccggaaacccctccgcttctatgtccggggcagcccctgggtcagtgtggtcgacagagtggctgagcaggacacacagkcctgagcaaagggcctgcccagacaagattttttaattgtttaaaaaccgaataaatgttttatttctagaaaactgtgccttagccagagctcctctaggtgatcaacccatgtctggagctagctcttcctccaggacacragagctgggggcctgagtacgtagcgccaggcccggtgtggatgctggggagaatcatcagtgtgggagccgaaagcccccgagggtggggtcctgcacagtgggccatgcctccaccagcaagatgtgcacaggtgacagggcttctccagcctagcagggccagcccaggccctcgtgmcccagatggtcaggaccaggtcacagcttggctatgagcctgtttgyggcttctgtggaytgtggtgaggactgggccaggaaaggctcagggtagcctgggaggaagaagcgcatggcagacagaggtgctggggagggggccacag

SEQ ID NO: 4543 - DNA, 1512 bp, Homo sapiens
cagcctgggcccccatgccgtgcagctcgcacatatgtggggcagagcagccaccctgcccccagcagcagccgtccatygtcagacgtgatcatttcctgaggcctcgagtgtgtcagggtgtttgtgcctcrtaacaacccacaggatggtcacccccgctttgcagatgaagaaaccaaagcagttttgccgacggatggggcaaaagaagcagcgaccagctagagcagggcagccacacagctcgtccgaygcagcccaggcacctgcagagcagccacacagctcgtcsgatgcagcccaggcaccttgccccagggagcgctgcttgggacygcccaccactccrggcccayaccgcagcatctatttctcaagcccaaagggccaccttacccgactggggttggagttyttcgaccrgccrgcagtccccctggcccgggcatttytgggacaggtcctagtccggcgacttcctaatggcacagaactccgaggcygcatcgtggagaccgaggcatacctggggccagaggatgaagccgcccactcaaggggtggccrgcagaccccccgcaaccgaggcatgttcatgaagccrgggaccctgtacgtgtacatcatttacggcatgtacttctgcatgaacatctccagccagggggacggggcttgcgtcttgctgcgagcactggagcccctggaaggtctggagaccatgcgtcagcttcgcagcacyctccggaaaggcaccgccagccgtgtcctcaaggaccgcgagctytgcagtggcccctccaagctgtgccaggccctggccatcaacaagagctttgaccagagggacctggcacaggatgaagctgtatggctggagcgtggtcccctggagcccagtgagccggctgtagtggyagcagcccgggtgggcgtcggccatgcaggggagtgggcccggaaacccctccgcttctatgtccggggcagcccctgggtcagtgtggtcgacagagtggctgagcaggacacacagkcctgagcaaagggcctgcccagacaagattttttaattgtttaaaaaccgaataaatgttttatttctagaaaactgtgccttagccagagctcctctaggtgatcaacccatgtctggagctagctcttcctccaggacacragagctgggggcctgagtacgtagcgccaggcccggtgtggatgctggggagaatcatcagtgtgggagccgaaagcccccgagggtggggtcctgcacagtgggccatgcctccaccagcaagatgtgcacaggtgacagggcttctccagcctagcagggccagcccaggccctcgtgmcccagatggtcaggaccaggtcacagcttggctatgagcctgtttgyggcttctgtggaytgtggtgaggactgggccaggaaaggctcagggtagcctgggaggaagaagcgcatggcagacagaggtgctggggagggggccacag

SEQ ID NO: 4544 - DNA, 1367 bp, Homo sapiens
atggtcacccccgctttgcagatgaagaaaccaaagcaggtgttttgccgacggatggggcaaaagaagcagcgaccagctagagcagggcagccacacagctcgtccgaygcagcccaggcacctgcagagcagccacacagctcgtcsgatgcagcccaggcaccttgccccagggagcgctgcttgggacygcccaccactccrggcccayaccgcagcatctatttctcaagcccaaagggccaccttacccgactggggttggagttyttcgaccrgccrgcagtccccctggcccgggcatttytgggacaggtcctagtccggcgacttcctaatggcacagaactccgaggcygcatcgtggagaccgaggcatacctggggccagaggatgaagccgcccactcaaggggtggccrgcagaccccccgcaaccgaggcatgttcatgaagccrgggaccctgtacgtgtacatcatttacggcatgtacttctgcatgaacatctccagccagggggacggggcttgcgtcttgctgcgagcactggagcccctggaaggtctggagaccatgcgtcagcttcgcagcacyctccggaaaggcaccgccagccgtgtcctcaaggaccgcgagctytgcagtggcccctccaagctgtgccaggccctggccatcaacaagagctttgaccagagggacctggcacaggatgaagctgtatggctggagcgtggtcccctggagcccagtgagccggctgtagtggyagcagcccgggtgggcgtcggccatgcaggggagtgggcccggaaacccctccgcttctatgtccggggcagcccctgggtcagtgtggtcgacagagtggctgagcaggacacacagkcctgagcaaagggcctgcccagacaagattttttaattgtttaaaaaccgaataaatgttttatttctagaaaactgtgccttagccagagctcctctaggtgatcaacccatgtctggagctagctcttcctccaggacacragagctgggggcctgagtacgtagcgccaggcccggtgtggatgctggggagaatcatcagtgtgggagccgaaagcccccgagggtggggtcctgcacagtgggccatgcctccaccagcaagatgtgcacaggtgacagggcttctccagcctagcagggccagcccaggccctcgtgmcccagatggtcaggaccaggtcacagcttggctatgagcctgtttgyggcttctgtggaytgtggtgaggactgggccaggaaaggctcagggtagcctgggaggaagaagcgcatggcagacagaggtgctggggagggggccacag

SEQ ID NO: 4545 - DNA, 1373 bp, Homo sapiens
ggtgcttccgtggtcggcggtgctgggctccgcgccggggtccgacagttttgccgacggatggggcaaaagaagcagcgaccagctagagcagggcagccacacagctcgtccgaygcagcccaggcacctgcagagcagccacacagctcgtcsgatgcagcccaggcaccttgccccagggagcgctgcttgggacygcccaccactccrggcccayaccgcagcatctatttctcaagcccaaagggccaccttacccgactggggttggagttyttcgaccrgccrgcagtccccctggcccgggcatttytgggacaggtcctagtccggcgacttcctaatggcacagaactccgaggcygcatcgtggagaccgaggcatacctggggccagaggatgaagccgcccactcaaggggtggccrgcagaccccccgcaaccgaggcatgttcatgaagccrgggaccctgtacgtgtacatcatttacggcatgtacttctgcatgaacatctccagccagggggacggggcttgcgtcttgctgcgagcactggagcccctggaaggtctggagaccatgcgtcagcttcgcagcacyctccggaaaggcaccgccagccgtgtcctcaaggaccgcgagctytgcagtggcccctccaagctgtgccaggccctggccatcaacaagagctttgaccagagggacctggcacaggatgaagctgtatggctggagcgtggtcccctggagcccagtgagccggctgtagtggyagcagcccgggtgggcgtcggccatgcaggggagtgggcccggaaacccctccgcttctatgtccggggcagcccctgggtcagtgtggtcgacagagtggctgagcaggacacacagkcctgagcaaagggcctgcccagacaagattttttaattgtttaaaaaccgaataaatgttttatttctagaaaactgtgccttagccagagctcctctaggtgatcaacccatgtctggagctagctcttcctccaggacacragagctgggggcctgagtacgtagcgccaggcccggtgtggatgctggggagaatcatcagtgtgggagccgaaagcccccgagggtggggtcctgcacagtgggccatgcctccaccagcaagatgtgcacaggtgacagggcttctccagcctagcagggccagcccaggccctcgtgmcccagatggtcaggaccaggtcacagcttggctatgagcctgtttgyggcttctgtggaytgtggtgaggactgggccaggaaaggctcagggtagcctgggaggaagaagcgcatggcagacagaggtgctggggagggggccacag

SEQ ID NO: 4546 - DNA, 2944 bp, Homo sapiens
gcggcaacgcgcggagccggcggaagtggggctcgggtcccgcggcggggctggaggcagcgagcgccgtcgtctgcccgggcccgcccatcggggtccccaaccccatccggaccccgccgcccgagcgcgcggccccggaagcacccgcctcccggcatggtgctcaaggccttcttccccacgtgctgcgtctcgrcggacagcgggctgctggtgggacggtgggtgccggagcagagcagcgccgtggtcctggcggtcctgcactttcccttcatccccatccaggtcaagcagctcctggcccaggtgcggcaggccagccaggtgggcgtggccgtgctgggcacctggtgccactgccggcaggagcccgaggagagcctgggccgcttcctggagagcctgggtgctgtcttcccccatgagccctggctgcggctgtgccgggagagaggcggcacgttctggagctgcgaggccacccaccggcaagcgcccactgcccccggtgcccctggtgaggaccaggtcatgctcatcttctatgaccagcgccaggtgttgctgtcacagctacacctrcccaccgtcctgcccgaccgccaggctggagccaccactgccagcacggggggcctggctgccgtcttcgacacggtagcacgcagtgaggtgctcttccgcagtgaccgctttgatgagggccccgtgcggctgagccactggcagtcggagggcgtggaggccagcatcctcgcggagctggccaggcgagcctcgggacccatttgyctgctgttggccagcctgctgtcgctggtctcagctgtcagtgcctgccgagtgttcaagctctggcccctgtccttcctcgggagcaaactctccacgtgcgaacagctccggcaccggctggagcacctcacgctaatcttcagtacacggaaggcggagaaccctgcycagctgatgaggaaggccaacacggtggcctctgtgctgctggacgtggccctgggcctcatgctgctgtcctggctccacgggagaagccgcatcgggcatctggccgacgccctcgttcctgtggctgaccacgtggccgaggagctccagcatctgctgcagtggctgatgggtgctcccgccgggctcaagatgaaccgtgcactggaccaggtgctgggccgcttcttcctctaccacatccacctgtggatcagctacatccacctcatgtcccccttcgtggagcacatcctttggcacgtgggcctctcggcctgcctgggcctgacggtggccctgtccctcctctcggacattatcgccctcctcaccttccacatctactgcttttacgtctatggagccaggctgtactgcctgaagatccatggcctgtcctcactgtggcgtctgttccgggggaagaagtggaacgttctgcgccagcgcgtggactcctgttcctatgacctggaccagctgttcatcgggactctgctcttcaccatcctgctcttcctcctgcctaccacagccctgtactacctggtgttcaccctgctccggctcctggtggtcgccgtgcagggcctgatccatctgctsgtggacctcatcaactccctgccgctgtactcactgggtcttcggctctgccggccctacaggctggcggataaacccactgccctacagccgcgtggtgcacacctaccgcctccccagctgtggctgccaccccaagcactcctggggcgccctgtgccgcaagctgttccttggggagctcatctacccctggaggcagagaggggacaagcaggactgagggaactgctggctcgcctggcaccaccacacggccacagccagccatctgctctgccagggtggcaccagctcagctggcgcatgtccygtgctttgtggacgctgctgtgtgctcctgaacacggcaggccctgctatcacaccttgggcttggaggtcattgggagtgagcagatgtgggggtggccagccaggctggccgcactccatcactggcactgcctgccttgggacccgcttcccacctgctgcggtcaccatggtggcgagcacagcaaccccaggtgtccagagcactgccccatgcccaccctgyrtacccaggtccagagggtccgtccaccacagcagccccaggtggagggctggtctccctgggggctccccagtggctctgccctggctgtgggggtggagggaccttgccaggatgaacccyccagtcccaggcaccctctagctccctcagccgaacagcaccctgcatctgggggattgaagcagtcgctgacccccgtccccagcgggcccgggccctcactccctgaaccacacggggtttatttgcggatgttccctggagaggtcgctttgtgaagaaaccatcagcaggctgtgagcatcgccaggctgctgtgggggcgggagcagcctcagtgtcaagggccygcccactgacccagccgtacctattcgtccacggtgccccgtagcagcaggtcctgcrgccaaatctgtctcccttcatgggcctcccagggaaggaggaagccctgctgtgcagacacctctgtggccccccaggrgtgtgagyggcctggggagggggccgtggcactgaggccgaaagtgcctgccagacggcacggtctgggtgcgggtgttccctgtgagcccgagtccgcttcaggaggggagcctgcaggtgccggctggtgaggggatgacgcgctgtgggtgggaggaggcagcgcccatytcagcagcaccaggactgcctgggactccctggcaacccagcaccggggaagccgtcagctgctgtgacaataaaacctgccccgtgtctggagcgcaggctcggtcccgggtccatgtg

SEQ ID NO: 4547 - DNA, 3123 bp, Homo sapiens
aggggctggacgcctgtgtgttctctcctgacgatcgctggcggcagcctctgggctggtcctaccagggctcaaaattcccggcaccactggccttggggatctgggggcggcccctctgcagacaacagagtgacgggggcgggaccgggctggggctggggccttcctggaatcccgcagggcctggggacctgttcacttggggaggctgggagccaggcggggtccgggttccacgaaggccaggtccagtcagtttctcagcctcccggcatggtgctcaaggccttcttccccacgtgctgcgtctcgrcggacagcgggctgctggtgggacggtgggtgccggagcagagcagcgccgtggtcctggcggtcctgcactttcccttcatccccatccaggtcaagcagctcctggcccaggtgcggcaggccagccaggtgggcgtggccgtgctgggcacctggtgccactgccggcaggagcccgaggagagcctgggccgcttcctggagagcctgggtgctgtcttcccccatgagccctggctgcggctgtgccgggagagaggcggcacgttctggagctgcgaggccacccaccggcaagcgcccactgcccccggtgcccctggtgaggaccaggtcatgctcatcttctatgaccagcgccaggtgttgctgtcacagctacacctrcccaccgtcctgcccgaccgccaggctggagccaccactgccagcacggggggcctggctgccgtcttcgacacggtagcacgcagtgaggtgctcttccgcagtgaccgctttgatgagggccccgtgcggctgagccactggcagtcggagggcgtggaggccagcatcctcgcggagctggccaggcgagcctcgggacccatttgyctgctgttggccagcctgctgtcgctggtctcagctgtcagtgcctgccgagtgttcaagctctggcccctgtccttcctcgggagcaaactctccacgtgcgaacagctccggcaccggctggagcacctcacgctaatcttcagtacacggaaggcggagaaccctgcycagctgatgaggaaggccaacacggtggcctctgtgctgctggacgtggccctgggcctcatgctgctgtcctggctccacgggagaagccgcatcgggcatctggccgacgccctcgttcctgtggctgaccacgtggccgaggagctccagcatctgctgcagtggctgatgggtgctcccgccgggctcaagatgaaccgtgcactggaccaggtgctgggccgcttcttcctctaccacatccacctgtggatcagctacatccacctcatgtcccccttcgtggagcacatcctttggcacgtgggcctctcggcctgcctgggcctgacggtggccctgtccctcctctcggacattatcgccctcctcaccttccacatctactgcttttacgtctatggagccaggctgtactgcctgaagatccatggcctgtcctcactgtggcgtctgttccgggggaagaagtggaacgttctgcgccagcgcgtggactcctgttcctatgacctggaccagctgttcatcgggactctgctcttcaccatcctgctcttcctcctgcctaccacagccctgtactacctggtgttcaccctgctccggctcctggtggtcgccgtgcagggcctgatccatctgctsgtggacctcatcaactccctgccgctgtactcactgggtcttcggctctgccggccctacaggctggcggctggcgtgaagttccgtgtcctccggcacgaggccrgcaggcccctccgcctcctgatgcagataaacccactgccctacagccgcgtggtgcacacctaccgcctccccagctgtggctgccaccccaagcactcctggggcgccctgtgccgcaagctgttccttggggagctcatctacccctggaggcagagaggggacaagcaggactgagggaactgctggctcgcctggcaccaccacacggccacagccagccatctgctctgccagggtggcaccagctcagctggcgcatgtccygtgctttgtggacgctgctgtgtgctcctgaacacggcaggccctgctatcacaccttgggcttggaggtcattgggagtgagcagatgtgggggtggccagccaggctggccgcactccatcactggcactgcctgccttgggacccgcttcccacctgctgcggtcaccatggtggcgagcacagcaaccccaggtgtccagagcactgccccatgcccaccctgyrtacccaggtccagagggtccgtccaccacagcagccccaggtggagggctggtctccctgggggctccccagtggctctgccctggctgtgggggtggagggaccttgccaggatgaacccyccagtcccaggcaccctctagctccctcagccgaacagcaccctgcatctgggggattgaagcagtcgctgacccccgtccccagcgggcccgggccctcactccctgaaccacacggggtttatttgcggatgttccctggagaggtcgctttgtgaagaaaccatcagcaggctgtgagcatcgccaggctgctgtgggggcgggagcagcctcagtgtcaagggccygcccactgacccagccgtacctattcgtccacggtgccccgtagcagcaggtcctgcrgccaaatctgtctcccttcatgggcctcccagggaaggaggaagccctgctgtgcagacacctctgtggccccccaggrgtgtgagyggcctggggagggggccgtggcactgaggccgaaagtgcctgccagacggcacggtctgggtgcgggtgttccctgtgagcccgagtccgcttcaggaggggagcctgcaggtgccggctggtgaggggatgacgcgctgtgggtgggaggaggcagcgcccatytcagcagcaccaggactgcctgggactccctggcaacccagcaccggggaagccgtcagctgctgtgacaataaaacctgccccgtgtctggagcgcaggctcggtcccgggtccatgtg

SEQ ID NO: 4548 - DNA, 1557 bp, Homo sapiens
aggggctggacgcctgtgtgttctctcctgacgatcgctggcggcagcctctgggctggtcctaccagggctcaaaattcccggcaccactggccttggggatctgggggcggcccctctgcagacaacagagtgacgggggcgggaccgggctggggctggggccttcctggaatcccgcagggcctggggacctgttcacttggggaggctgggagccaggcggggtccgggttccacgaaggccaggtccagtcagtttctcagcctcccggcatggtgctcaaggccttcttccccacgtgctgcgtctcgrcggacagcgggctgctggtgggacggtgggtgccggagcagagcagcgccgtggtcctggcggtcctgcactttcccttcatccccatccaggtcaagcagctcctggcccaggtgcggcaggccagccaggtgggcgtggccgtgctgggcacctggtgccactgccggcaggagcccgaggagagcctgggccgcttcctggagagcctgggtgctgtcttcccccatgagccctggctgcggctgtgccgggagagaggcggcacgttctggagctgcgaggccacccaccggcaagcgcccactgcccccggtgcccctggtgaggaccaggtcatgctcatcttctatgaccagcgccaggtgttgctgtcacagctacacctrcccaccgtcctgcccgaccgccaggctggagccaccactgccagcacggggggcctggctgccgtcttcgacacggtagcacgcagtgaggtgctcttccgcagtgaccgctttgatgagggccccgtgcggctgagccactggcagtcggagggcgtggaggccagcatcctcgcggagctggccaggcgagcctcgggacccatttgyctgctgttggccagcctgctgtcgctggtctcagctgtcagtgcctgccgagtgttcaagctctggcccctgtccttcctcgggagcaaactctccacgtgcgaacagctccggcaccggctggagcacctcacgctaatcttcagtacacggaaggcggagaaccctgcycagctgatgaggtgtgggcctgccctggtctctgcagggctgggtgcgtgccctctggccccttctccatccccctctgcaccacgctgacccctccggccaggcaggcctcctcctgcggccccaggctgtgctggccaccctcatgccggccgggccggacctcccttccaggaaggccaacacggtggcctctgtgctgctggacgtggccctgggcctcatgctgctgtcctggctccacgggagaagccgcatcgggcatctggccgacgccctcgttcctgtggctgacgtgagtggactggggtggagcccggtgtcccgggtgggcgtggggacccctcctgggcagcagagccttcccgggccagagccaccgccccmcaaagccagttctaccttctccatgctctggagacacggccctcccctgaaccagaagcaggaactccaggggcgctggggcct

SEQ ID NO: 4549 - DNA, 2830 bp, Homo sapiens
cctgagcctccaktagcttctctgggcctggcagagcctcccggcatggtgctcaaggccttcttccccacgtgctgcgtctcgrcggacagcgggctgctggtgggacggtgggtgccggagcagagcagcgccgtggtcctggcggtcctgcactttcccttcatccccatccaggtcaagcagctcctggcccaggtgcggcaggccagccaggtgggcgtggccgtgctgggcacctggtgccactgccggcaggagcccgaggagagcctgggccgcttcctggagagcctgggtgctgtcttcccccatgagccctggctgcggctgtgccgggagagaggcggcacgttctggagctgcgaggccacccaccggcaagcgcccactgcccccggtgcccctggtgaggaccaggtcatgctcatcttctatgaccagcgccaggtgttgctgtcacagctacacctrcccaccgtcctgcccgaccgccaggctggagccaccactgccagcacggggggcctggctgccgtcttcgacacggtagcacgcagtgaggtgctcttccgcagtgaccgctttgatgagggccccgtgcggctgagccactggcagtcggagggcgtggaggccagcatcctcgcggagctggccaggcgagcctcgggacccatttgyctgctgttggccagcctgctgtcgctggtctcagctgtcagtgcctgccgagtgttcaagctctggcccctgtccttcctcgggagcaaactctccacgtgcgaacagctccggcaccggctggagcacctcacgctaatcttcagtacacggaaggcggagaaccctgcycagctgatgaggaaggccaacacggtggcctctgtgctgctggacgtggccctgggcctcatgctgctgtcctggctccacgggagaagccgcatcgggcatctggccgacgccctcgttcctgtggctgaccacgtggccgaggagctccagcatctgctgcagtggctgatgggtgctcccgccgggctcaagatgaaccgtgcactggaccaggtgctgggccgcttcttcctctaccacatccacctgtggatcagctacatccacctcatgtcccccttcgtggagcacatcctttggcacgtgggcctctcggcctgcctgggcctgacggtggccctgtccctcctctcggacattatcgccctcctcaccttccacatctactgcttttacgtctatggagccaggctgtactgcctgaagatccatggcctgtcctcactgtggcgtctgttccgggggaagaagtggaacgttctgcgccagcgcgtggactcctgttcctatgacctggaccagctgttcatcgggactctgctcttcaccatcctgctcttcctcctgcctaccacagccctgtactacctggtgttcaccctgctccggctcctggtggtcgccgtgcagggcctgatccatctgctsgtggacctcatcaactccctgccgctgtactcactgggtcttcggctctgccggccctacaggctggcggataaacccactgccctacagccgcgtggtgcacacctaccgcctccccagctgtggctgccaccccaagcactcctggggcgccctgtgccgcaagctgttccttggggagctcatctacccctggaggcagagaggggacaagcaggactgagggaactgctggctcgcctggcaccaccacacggccacagccagccatctgctctgccagggtggcaccagctcagctggcgcatgtccygtgctttgtggacgctgctgtgtgctcctgaacacggcaggccctgctatcacaccttgggcttggaggtcattgggagtgagcagatgtgggggtggccagccaggctggccgcactccatcactggcactgcctgccttgggacccgcttcccacctgctgcggtcaccatggtggcgagcacagcaaccccaggtgtccagagcactgccccatgcccaccctgyrtacccaggtccagagggtccgtccaccacagcagccccaggtggagggctggtctccctgggggctccccagtggctctgccctggctgtgggggtggagggaccttgccaggatgaacccyccagtcccaggcaccctctagctccctcagccgaacagcaccctgcatctgggggattgaagcagtcgctgacccccgtccccagcgggcccgggccctcactccctgaaccacacggggtttatttgcggatgttccctggagaggtcgctttgtgaagaaaccatcagcaggctgtgagcatcgccaggctgctgtgggggcgggagcagcctcagtgtcaagggccygcccactgacccagccgtacctattcgtccacggtgccccgtagcagcaggtcctgcrgccaaatctgtctcccttcatgggcctcccagggaaggaggaagccctgctgtgcagacacctctgtggccccccaggrgtgtgagyggcctggggagggggccgtggcactgaggccgaaagtgcctgccagacggcacggtctgggtgcgggtgttccctgtgagcccgagtccgcttcaggaggggagcctgcaggtgccggctggtgaggggatgacgcgctgtgggtgggaggaggcagcgcccatytcagcagcaccaggactgcctgggactccctggcaacccagcaccggggaagccgtcagctgctgtgacaataaaacctgccccgtgtctggagcgcaggctcggtcccgggtccatgtg
